United States Patent Application Publication US 2025/0122569 A1 - sequence listing, part 6

SEQ ID NO: 807 - DNA, 9079 bp, unidentified
  source 1..9079: mol_type = unassigned DNA
tcaaaatgtaatattgagtccaaatgtataaatcgcaggtaccggataacttccattatccacaccaaaagcaatggcagaaccaccaaactcaggggtgtagccggtattatgtttccaagttttcaggttctgaatattgaaataggctttcaaagccttcaaaccgattttggatatcagggccttatcaaaagtatagcccaattgcaggttacgtatacggaagaaactgccgtcttctacataatactccgaattttcaaagttaatggcatgaccggtatttaggacaggttgtgtattggatgtaccttcgccgtgccaacggtccagacgctgctccatatagttgaactgcgcccaattgtaattgtcccaagtacggtaaatctgattaccgccctgtcccatcatgtcaatacccagttcccaacctttataggaaacacctaatgagattccataggtaacatccggagtaggatcaccaatcaaagtacggtctgccggtgtaatctcaccatccccattcacatcggcgaacttcaaatcaccgggagtcactgtagccaatgtattcttgggcgaagcatcaatatcggcctgtgactgataaacaccatctaccttatatccatagaagaaaccgatgggataacccgccatagtatagctctggctcttgtctccggcaataatggaatagccgtcttgtaccagactcttcaccttattcttgatagtagtcaggttgactcccacattatacccccaatcgccaatctgatcccgccaagtggcagacaattccacccctttattctctatctgtcccagattcccaattcctggaacggttccggaaagtccgggaacctttgccagcaggtctttcgtattctttttataataaactccttccacatgcaggcggttgcgaaacatattcgattcaaagcctgcttcccaagcttccactttttcccatctaaggttcgcattaggcaaataggccaactgatagcccggatagatggtggacggattgccaaacacagctccaaaagcattttcaagcaacggctcagccggataagcagtatccagattctgattgcccaacgtaccccaggaacctttcaacttcaacatatccaaccaagaaatgtctttcataaactcttcttcggtcatcagccatccggcacctgccgagtaaaagttctgccattggttgcccgtatacgaaaaagccgaagaaccgtcccgacgaaaagacccgttgaacaaatattttcctttgtaattataaatcacacgccccagaaaagaaacagtagtacgttcccactgtgtacttccattggtagctgtggccaaatcaccaatactgacgaaccatttatcgggattatcaggaataaccaatccaataccttgcccacgggcggcatccagacggctgagagaattgtaataagtagtgaaaccggcggttgccgtcagattatggtcgccaaaactatttgtataagtcagcacataatcactttgcaccttcgtttcattttccttgaactggctcacttcagtcttacccgttcccagtgtagccacatttcctttcactgtgttatcatataccttgataatcggctgataggtacgcccgttattcgagccgtaatccatagagaacacagccctgaaattaaaatgttccagaaaatccacctctccataaatgttacccgatgcacgataattctctgcgcgagtggtgttggcttttaaatccacatccaccatcggattcatcatctgtgctttctgaaactccggcaacgccgcatacaactgatattcttcattgaatacaggagctataggagtggtacggacagcattcaggactgatttactatcagcaggcagcatacgtgctccgttaaactgaaacccgacctttatcttgtcggttatcttatactcattactggcattcaaggtgattttgctgaacttctcgtgctttatatttccttgttcgtatgagtatcccatccccagataaaaactatgtttctcagaagctcctgtcacactgatattattattggtaatgaaaccattctgaagcacttcatcctgccagtcggtatcagcgttccagccggaaaaatcaaaagcgggattcttttcattaacaagctgctcactatacaattctttgaactgagaagcattcaccatcttgattctgtccaccacatgtttccagccgaatgaggtgttgatattcaccaaagtctgcccctccttagccttctttgtagtgataatgataaccccattagctccacgcacaccgaaaatagccaatgaagacgggtctttcaacacttccatagactcaatatcctcgggattcagaaagttaatgttatcattgaacaagccgtcgacaatgtaaagaggtttgtagccgttaatggagttcgttccacgtacacggatttcggggtccgagcctgcttgtcccgagttgataatctgcacaccggctacctttccctgcaaggaagacaagggatttgtagaaggtttattagcgatttcggctcccttgatattcgtgatagagccggtcaagtcacgcttcttcgcactaccgtaacctatcactactgtttcagccagcatttgtgagtcctctttcagctgtatatttatcacatgctggctgcctactgtcacatcttgcttcaccattcccacgtacgagaattccagtacattgtcgggtgaggcggtaatactgtacttcccatctatgtcggtaatcgtaccattggaagtaccttgaatcactacggatgctccaatcagaggttcattggtcgaatcggttaccgttccggtcactgtcttctcctgagcaaacagcgacgtagtcatcaacagcagacagactaaagcactaaaagtcctcaatccctgccgcccatgttgtaaaggtttaggtttattgtccattgcattttctattaacaaataaataactagtttaatttcttatattgcaatgaaacaaaaggaaccggaaaaagatgtttaagacgagagaattaacactttaacatcccatgaaaaaaagttacccgaagagcatgtgctcctcggataacttttattattcttatatcaccattctatggtacatggaccaccaagggattacgtaccttctgagcgtattcttccaaatatttgttccaatcggtatcggcttcgaaaccatatttgctccagcctgatccccaataataaatatactcggaacccggttcataatcactgaccgacaacacatgccccaaagcacctccacgttctttctgctctttttcggagaacatttggggcagcgctccttttatattagccggaaatacagcacctatataaatcactccattgttattggctgcattctctgtagagtccgcataggctatataacctgcatttgcatcaaaactataccccgtaggattctgtttgtgcaatacaatgccggtcaccaccggagttgtttcctgcaaattatcaaaagaaaccacagtcttgttcaactgcgatcccttgtccaaagaaatgatacgcgtttctatcacatttgaatctctttttacaaccaacggattataaactaacttggtggtgaatcgaagcggaccgttatccaagacttcacaatccttgtaacaatagggataaacaatggtactatcggggaataaagctgctgttccgccacccagagtcggacccaccgcataacaatccattccgtttccatgatctatgtgataagagattccttgattcaaatcaccgtcataacgatcttccaccaccggttcgggtacattcttggtccagatgtcataaccaaaggcacgctcgcccttctcctgcaaagcaggaccgtatgcacgataagcggcgcgatcgttttcccatgccacatcatccagacgctcgggatattgacgcccacaagcaaccacatccaccggctgtggagttccttctgcaatcgtataagtaaccgaagcttcccctttcaccgaagcaggaaagataagcatatcatcgtatgttatctgataaggcacttcaaggccgttctcgtccaatacgataacttgtgccgtatcgggtaattgtagtttgcctgttatttcagccatagagatttccaccatttctccattcctatcaatagaaagcggattggttactgtaacaatcaccggctccttctgcgaacaggagaacatagtcaacaccgttgcaactgctaaaaagatctttttcatactatttatttcttgtcaaaccgaaaggcaaaaatacaaagaatctgcaagcatcaacaaagacacaagcagattcttcctattttatatcaacaaattatttaggctgtttaccaatgtaagccaaaataccaccatctacatagagaatatggccattcactgcattagaagcttcggatgcaaggaatacagcaggaccagtcaattcctgcggatccaaccagcggccggccggagtcttggcacagatgaatgtatcaaacggatgacggcttccatcgggctggatttcacgtaacggagcagtctgcggagtagcgatatagcccggaccgataccattacactgaatattgtattctccgtattcagaacagatgttacgagtcaacatcttcaaaccacctttagcggcagcgtatgcagaaacggtttcacgacccaactcagacatcatagagcagatattgatgattttaccatgtcctttttccatcatcgcaggcaaaacagctttagaaacaatgaacggagcattcaagtcaatatcaataacacggcggaaatcggcagcttccatttcgtgcatcggaacgcgacggataataccggcattgtttacaagaatatcaattgtacctacttcctttgcgatagtggcaaccatagcctgtacggcaggctcgtcagtaacatcacatacatatccgtgtgctttaattcctttttcagcgtaagaagccaaacctttatccaccaattcctgattgatgtcgttgaaacagatggttgcaccttgttctgcaaaagcagatgcaatagcaaaaccgataccataagaagcgcctgttacaagggcgactttaccttccaaagaaaaattcaaatactgattcatgatacttatattattaaattaatgaagttatattatttatttcaagtctgtaatcaatgagaagtcttgatcaccataatccaaattctctccacccataccccaaataaaggtgtaattgtgtgttgccgccgcactatgaatagaccattcgggagacaagactgcctgatcgcctttcatccatatatgacgtgtttcatccacttctcccataaaatgacaaacagcgtgttcatcaggcacttcaaaataaaaataagcttccatacgacggctgtgcacgtgtgccggcatggtattccacacacttcccggtttcagttcggtcatccccatctgcaactggcaggtaggcaatacctgacttaccagcatcttgttgatgcaacgatgattggaaccttccagtgaacccatttcagcaacgatggcatctgccttggtcacttttttatcgggatagttacgatgagcggtaacagagttaaaatagaatttggcaggatttccggcatctttactttcaaaagtcacttcccggtctcccgaacccagataaagcgcttctttataatccagttcgaacacggcatttccagctttgaccacaccgggaccgcccacattaaaaatacccatttcacgtcgggaaagaaagtaagatgctttcagcggatcaatggcctccagttttaatatctctcccaccggtttggctcctcctacaaccatacggtcatacatggagtaaaccatgttcacctcattgtccgaaaatactttttctattaagaaatcccgtcgtatcctttgagtgccatagcttttggcatcttcgggatgcgcggcataacggatttcataatttgtcttcataagcagctattttatgtttttatagtattccgaattatttcgacttgggcaaagttacgaaacaatcttgtttcgatgctgcaaaaatcgttcagaataggtataaattttgtcctattatatgcaaaatctgctacttaatacgtttcagaacactcaaaaactcaaaatcaacgagataaaatatcacaaaacttatcttgaaacgcacgcgcccggcttaatttcagtacgttttggttaatgataacaaaggccaattgatgtccattagcagcttttacataccctgccagtgaactgaccccggttacagaaccggtttttgcatgcacatttccccgagccttggtctgtttcatccgattttgtaaagtaccgtccactcctgctatgggcagagactcatagaaaggaagaaaaacttcccgatgataataggcatacttcaaatactccaatagtaaacgtggagagatataattataaacggaaacaccgctaccgtccgctatcttatagttctccggattaaaccctaaagctgttttcataaaggcgtgaatggcatcggttccatcttctcctgtcacccgtctatgcagggaacgcttggcagccaaatgataaaacattgattcggcacacaggttatcacttttcttcaaagctctttccaacacttccttgagtggtcttcggacggtataaagcgtaactatactgtcggccgttacaggacaatcggcatacgtgcaggttcgcgcttcaattcctttgctgcgcaaacggctgacaaaggtatgaaaaaagaaatctttggaagtatatacattcaatttctcagtatagggataagaaacattcccggaaacggtaatgatattgccattgctgagccagttacgagtgattttcagctttccggcttgcggattacggctcaccccgtgattatgaacctgataataatcggaaaccggcgtacaaactactttgggcaacgagtctttctgagcaggagaaaccgatacatccacgcagcccctattcagcatgagaggggaaagatagggctggaaggaataaggagtatcgtcccaacaccaaccggaaccccaataaaccgagtctgtcatggaaacatccgccgcaagagtatctgtcacataacggatgcctttacttgccaatgcatctaccagacggtccagatcctcgtccataaattccggatcaaaaccgcctatcagatacaagctgcctttcaacgtgtcattttctatttttccacgataacgaagaccggtatccatggtataatctgctcccagttgtaccaaggcggtaaccgaagtgattattttctcaacagaagcaggccggtacagtttatcgtcctggtaacggtaaacggattctccggcggtcaaatcaaatacggcaatacccacttcggatgttttcagaacttcttcatgcagtaaagcgtccagccgctgagatagcggctgggcgtttatgaagtgaatagataaaatcagtaaaaagaaaaataaaactcgtttcattatagttccctgaatatctcacccacagtaggatgaggaaatacatatcgtttccaatcctctatggtcttaccatcctcaatagccatacctgccaatacaatcagctcggaagcaggattacccaacatgtgcgctcccaatacagtaccgtcttcggctgtcaaaactttgcagacgccgttcactccttcattctcggctacaaaacgcccggagtaagccatcggcaacttaacggctcgataaggaatacctgcggcctgcaaagcttcctcgctcatacctaccccggcaatctcgggatttatatagaccacacccggtatggcacgataactcatcgcatcttccttacctgtaatatgatggacagccacttccgcttcacgcacggcggtatgtgccaacaaagagactccgttcaaatcaccgcatacatagacaccggggacagaagattgcaaatgttcatctactttgatgcatctgcgctccgtccattccaaattcagattttccaatccgaaaccttttgtcaccggacgacggcccacactcatcaataacttatcagctgtaacagttcctgttccatctgcattttcatatgacacagtaataccggtttcctctttggacacccctactactttcgtactgagcaggaacttgattccttttttggcatattcagcccggagcatagccgacagctctttatccatgccacccaggatctcatccaacatttcgacaactgtcacctgtactcccaaactggtaaagaaagaagcaaattccataccgatcactccaccgccgacaatagtcaatgaagcaggtacttctttattatccagtgcatcacggtgtgtccagtaatccacattttccactcccggaataggaggaataaatgtttcactgccggtacacagcagcaaattctcacattcataggtttccccaccacattggatggtattcttatctacaattacagcttctcccgttactatatttacctgatgcgcagtcagttttgccttgatacccagtaccagtttacgaaccacttttgatttacgcgccacaatttttcctaaatcaaaagaagcttcaggcacattcacggcatactttgaagcatgttttgcataatcatatactttagccgaataaagcaaggttttggtaggaatacatccctcattcaggcatacaccgcccaaacttcttttttcgaacaatacaacactcagtcctgcctttccggcagcttcggcagcagtataccctgcgggacctccaccgatgattgcaatttgatatttcat

SEQ ID NO: 808 - DNA, 8000 bp, unidentified
  source 1..8000: mol_type = unassigned DNA
ttaatcttcaaacagcggcttcatcaggggcaggaaatccagcgttgcaaagtaatcgcgcggagtctcggcacggcggatcagacggtgggtgccatcctcgcacagcagcacttcggcgctgcgcagcttgccgttgtagttgtagcccatggcagagccgtgtgcaccggtgtcgtggatataaacgatatcgccaatgtcgatcttgggcagcatccggtcaatggcaaacttgtcgttgttctcgcacagaccgcccaccacatcgtacatatggtcgcaaggctcattttccttgcccagcacggtgatgtggtggtaagcgccgtacatggccgggcgcatcaggttggctgcgcaggcatccagaccgatgtattccttatagatgtgcttttcgtggatggcagttgccaccagtgcgccgtaggggccggtggtaaagcggcccatctcagtaaagatggccacatcgcccatgcctgcgggcaccagaatttcctcaaacttcttgcgcacaccctcgccgatggccatgatatcgttctcggtctgctccgggcggtacgggatgcccacaccgccggacaggttgatataaccgatgtgcacaccggtggccttctgcacccggacagccagctggaacaggatacctgccagctccgggtaatactcatcggaaatggtattggaagcaaggaaagcgtgaatgccgaagttcttggcacccttggcggccagcttcttgtagctttcgatcatctgctcctcggtcataccgtacttggcatcgccgggcttgtccatgacctgaaagccctcttcgctctcgcccagactgaaggtgccgcccgggttatagcggcagaagatgttctccggcacaccggcgacacgctccagaaattccaccatggtggcatcgtccagattgatataggcacccagctcgtaggccttcttcatatcctctacgggagtctggttggaggagaacatgatttcactgccggagaaaccgcacacctcgctgagcatcagctcagtcagggacgagcagtccacgccgcagccctcctccttgaggatctgcaggatgacagggttcggcagagccttgacggcaaaatactccttgaagcctttgttccagctgaatgccttgttgatgcggcgggcattttcacggatgcccttctcatcgtagacatggaacggcgtgggcacatcctgaatgatctcctgtgccatcgcctcggtcagaaacggtttcttttccatagtaacatccctctcattttatatgcacgcggccgatcgccgcagtgacatcagtagaaactcctttcgtcatcgctgatgcgatgccacccattcccctttttgtcgctggcgcgacatctgtttttctctttgttacctgtggtgacatttttccccggcgcagggagaatctgtccctgccgggggaagtctttctcaaagagggaggctttgccgcacggacaagttccctctttgagggggctgtctgcgcagcagactgggggagtttacagcttcagattctggcgggtgggggtgaaggtcgggatcatctttgccagctgctgcaccacaccctcgtcgttgtgctctgccgcagcggcaagctcctgcagctgcccgtagaactcggccagatcgatgctgcgcggcgaagccacaaaaattttattgtgctgggtgcggcgcatcttatcctgctcctcgtccatcatcagctcttcgtagagcttctcgcccggacgcagacccacgatcttgatctccatattcacgcccggctcatagccgtaaaagcggatgagctgcttggcaagatccatgatcttgaccggctcgcccatgtccagcacatagatattgccgctttcggccagcgcaccggcctgcagcaccagctgggccgcttccggaatggtcataaagtagcgctcaatgttgggatccgtcagggtgacaggcccgccttttttgatctgggcctcaaacagcggaatgacgctgccatggctgcccagcacattgccaaaacgcacagccacacacttcatatccgtgttgcccgcaaaggtctggatgagcatttcgcagatgcgcttggtacagcccatcacactggtggggttcacagccttatcggtggaaagctgcacgaaccgctccacatcgtgttcgctggcgctcaccagcagatttttggtgcccagaacattgttcttgaccgcttctgcagggctgacctccatcagcggcacatgcttgtgtgctgccgcatggaacaccacagtgggatgatatgtttcaaaaacctcatccagacgctttttatcgcggatggagccaatgagcaccgttaccgggatatcccggccgtacttctgctgcagctccatcaaaagctcataggcgcagttctcgtagatatcaaaaataagcagcttgccgggcttgaagcgcatcacctgacggcacagttcgctgccgatggagccgccgccgcccgtgaccagaacggtcttgccggtgaggtagccggagatctgatcggtatccagcgtcacctcatcgcgggaaaggaagtccgccgggttcaactcgcggaaggctccctgctgcggtgtaccgctgcccaccagctgcgggtcactgagcagctgcaccgcacaatgggtgctgacgcacagatcgatgacatggttcagcttgctgcccttcagggtaggaatggcgatgatgatgctgtggatgccgtagcgcttgcacaggtccgggatatcctccagcgtgcccttcaccggcaccccgtggatggtctggttgagttttgtgggatcatcgtccaccgccaccaccgcgtgaccatattccttattggatttgcacacgttgatggcccatgcaccggcttcgcctgcacctacgatcatcaccgggcggttggggtccttgctggcagcgccgcgcagcttttcgcccagcggatggttcaaaaacagcctccatgccagacggctgccgcccaccagcaggaagatgagcaccgccgccatacagttggcggagttgaacagcacgccgtggatgcacagacggttgacacagtagacgacaacggtaggcacagccaccgttcccgccagacgcatcaggtcgcgttcaccggcatacttccacagtacggagtacagcccgctgaacagaaagctggcaatgtacaccgccacgatccatggcagattttcgtacagaagctcacggttatgcggccaccaggcagcttccactgctccgtctgcccgcagcagaagcgcaaaataaaagctgaatgcaacaatggctgcatccagcagcacaagcagcgcccggcgcgcaagcacctgcggcgtgttctttttatctttcacaaaaaagtcctctttttgcacacggcgtaaaacgccgctgtttttgccggaaggagcttccggcgttccgtcctgcccggcgcaccagacagccctatctttatattatactcagaacactgcagaatgtccagaaaatttgaatccgctgccaaactccctctattttttcggtctgccgggccggtgcgcagcccagagcgcggctgcttcctctccaaggcccagcggccatgccgccagtaggaacactcctgtggtagcgcagccgcctacgcccaacgcggccagctgcaaaggcagccgagccgcaaacccatccgcaagcagcttccgcagcgccataccagccgccgcagccagcacagctgccagtgccggtgcacccagccagcggcggaatgcatgctgcgtgccgctggaaaacagcagatgcccggtgttggccgcacaggtgtacaagctggaaagcaggatcactgccaaaaagcccttcatgccaaagcgcggcagcagcgccaccaccccgccaatgcgcaggatggaatcccacacgctgtagcggaaggccgccttctgctcccctacccctttcatggcaccgtccaccatgctttccagatacatcagcggcatggcaggagccagcgtttccagataaaacccggcatccgcactttggtacaagagctgtgccagcggccgtccccacacccagaacagcacccctgccagcgcggaaaaatagccggtgagccgcagcatccggtccaaaagtgcgttgagccgttcggtctggcccagaatgtgagcctgcgtgatctccggcattagcagcaccgaaagactgcccagcaggccaaatgggaacgtaagcagcggcagagccatgcctttcagttctccgtactgctccagcgcagcggtgcgcccgcccgcgttgatcagatagaccgcaaggcaggcgggcaccagcatattctccgccgtgtgcagggcgcttgccagcacccgcccgccctccaccggccacaggatctcccacagacggcgggccgggtctgccgggcggacggctttttgccccgcaaaggcactgcgggcatcccgccggtaaaaggccagcatacacagcgccgacaccgcttcgctgacggcggtagctcccagcaccagcatacagcgcacgcccaccgcaaggccctcggtgcgggtaagcgccagtgccaccagcgcgatgcgcaccgtctgctccgtaagctggctgaacacattgggagctacatgccgtcgggcgatgaaaaaaccgcgcagcaccgccgagaccgccatccacggcattcccagcgctgaaacgcgcaaagcaccgacggcgcggacatcgccaagccacaaccgggccgcaagatccgctgtcgtcagctgcagcgcggcggcaaacagccccagcacaagtcctgccgccagcagacggcgcagcatgccgcgggctgcaccacgggcggaagccgggccgctgagttcctcggccatgagccgggtagctgccaccgagacgcccgccgttgccagcgtgatgaacagcgaatacaccgccagcaccagctggtaaaggcccatcccctcgccgcccagctcgtttgccagccagatgcgcaggcccatgccggccagccgcagcaccacgtctgaaccggtgagcagcgccgcatttttcaaatagctctgccgcatggcgcacctcctgccggaatgttccggttccagcatatgaagcggcggaacaggatatgcaaaagcagagcggcgcggcgggttgtttcctgagcgcttttatggtatagtaaaggggcggcttttatatggccgtattctgtttaaggaggaagcacacggccaatgcctctgagccagccgtgcgcaaaaagagaatgagcgaagaatgtacccatgactgctccagctgtggagcagcatgttcttcccgcgatgcagcgcccaagcacgatgcccccaaccccaacagcagcgtcaaaaaagtcattggcgttgtgtccggcaagggcggcgttggcaagagcatgaccagcgccctgctggcctgcgccatggcacgccgcggctaccactgcggcattctggatgccgacatcaccggcccgtccattcccaagctgttcggcatccatggccgtgccatggccgacgacaagggctgctggcccatccagagccgcatgggcatcgatgtcatgagcatcaacctgctggtggaaaatgaggaagaccccgttgtgtggcgcggcccggtcattgccggtgctgtcaagcagttctggaccgacgtggtctggaaggacgtggactttctgttcgtggacatgcctccgggaaccggtgatgtgcccctgaccgtgttccagagcctgccggtggacggcatcgtggtggtggcaagcccgcaggagctggtgagcatgatcgtggccaaggccgtgaacatggctgagatgatgaaggtgcccatgctgggcattgtggagaacatgagctacatcgtctgccccgactgcggcaagcacatcaatgtgttcggcgagagccatgtggatgaggtggctgcaaagcacggcctgcccgtgctggccaagtgtcccatcgatccccagctggctgcgctttccgatgccggtatgatcgagacctacggcggcgaatatctggaaggtgccgcagatgcctgcgaaaagctgctgaagaagtaaaaatcgtttctctgccctgtgccgtttgcgtggtgcagggctttttgtttgcagaaaatatggctttctgcgcctgcgaaatgcagcaaaatggagaaaagacgttcttttccgtatttcttttgttctgccagcgctttaaaaaacaaggttctgtgccgtttttttcttttatttttcgttttgtgaagcggtctcaacttttcatctgtttttttgaagcattttctgctttctctctattgtcaaacccacagaaatgctttataataataaagcggtctgcagccataagctggccggtgtgtaagaacggaaatccgggatcgtcccaaagcgttttagcagcgcgtccgctgtgcggtgtgccgggcggtttcgtctttttcaaattttatagagtaattgggaaaaggagtattctactatgctgacaaatgaatacctgaagcgcgtttacgaaggtctggaaaagcgcaatgccaacgagcctgagttcctgcaggctgtgcgcgaggttctggagagcatccagcccgttgtggagaagcaccctgagtacgagaaggccgctctgatcgagcgtctggtcgagccggagcgcatcatcaccttccgtgtgccttgggttgacgatcagggcaaggttcaggtgaaccgcggctaccgtgtgcagttcaacagcgccatcggcccctacaagggcggcctgcgcttccatccctctgtcaatcagggcatcctgaagttcctcggctttgagcagaccttcaaaaacagcctgaccaccctgcccatgggcggcggcaagggcggctctgacttcgacccccacggcaagagcgacatggaagtgatgcgcttctgccagagcttcatgaccgagctgtaccgccacatcggccagttcgtggactgccccgccggtgatatcggtgtcggcggccgcgaggtgggctacatgttcggccagtacaagcgcctgaccaacagcttccagggcggtatgctcaccggcaagggcctgaccttcggcggttctctggcccgcaccgaggctaccggctacggcctgtgctacttcaccgctgaagctctgaagtgcatgcgcaacgacagcctccagggcaagaccgtggtcatctccggttccggcaacgtggcgatctacgcctgcgagaaggctacccagctgggtgccaaggtcgtgaccatgtccgactccaacggctacgtctacgaccccaacggcatcgatctggcctacgtcaaggatctgaaggaagtccgccgcggccgtatcaaggagtacgccgagacccacgagggtgtaacctatgttgcagattgcaccaaggtctggactgtcccctgcgacatcgccctgccctgcgcaacccagaacgagatcaacaaggagtccgctgaggctctggtgaagggcggttgcaccgtggtctgcgagggcgccaacatgcccagcaccccggaggccatcgaggtctacctgtccaacggcatcctgtacggacctgcaaaggcttccaacgcaggcggcgtggctacctccggtctggagatgagccagaactccgagcgcctgagctggacctttgaagaggtcgatgccaagctgaagggcatcatggagggcatcttccatgcttcctacgatgcatccgtggctgccggttccgagggcaacctgatggtcggtgcaaactgcgccggcttcctgaaggtcgccaccgccatgatggcacagggcatcacctactaa

SEQ ID NO: 809 - DNA, 5837 bp, unidentified
  source 1..5837: mol_type = unassigned DNA
atggctgagagaataaagttatcagattttgaagagaaggtattaaatagttcagttccagttcttgttgatttttattcagacagttgcgttccttgcaaaaggcttgcaccagttgttggaacagtggaagatgagagggcagaaagcctttcggtatacaaggttaatattaactttgatgcagatgcagcttctgaatatgaagtaacagcagcacctacacttgttctttttaaagatggaaaggaaactgcaagacatacaggcgtattcagaaaagatgaacttacaagctggatagatgctaatatttaattgattttaataaaaaataattatgcctaagaggcaggaaagaggtttaatatgcagttaacagtatcaggagtaaagaaagaatatgaagagggaattacacttccaaagctttttgaaattgaaaatgttgaaacaccagaatatgttacagtttcaatcaacgaagaattcattccaggagaccagaaagaaacataccagttaaaagatggtgataatgttgaattcttatactttatgggtggcggacagagataattataatagtgtaattaactataatgtcacaagatagtattaaaatatcagattcaagtaagaattactttaaaaggagtaagatctactttaaaaggaggtatatatggctttaacagatgagcagatagaacgttattcacgtcatatcattttaaaagaagttggtgctaagggacagaagaagcttcttaatgccaaagtgcttataataggtgcaggtggacttggagcaccagcagctatgtatttagcagcagcaggtgttggaacaataggaattgcagatgcggatgaggtagatcttagtaatcttcagagacagataatacatcagacagcagatgtaggcaaagcaaaggttcagtcagctaaagagacaattaatgctatgaatccagatgtaacagttaacacatatagagaattcattacaagtgataacataatggatattatcaaggactatgatttcgtaatcgatggaacagataatttcccagctaagttccttattaatgatgcctgtgtaatggctaagaagccattctctcacgcaggaataatcagatttaagggtcagcttatgacttatgttccgggagaaggaccttgctacagatgtgtatttaaaaatccaccaccaaaggatgcagtacctacatgcaagcaggctggtgttatcggagctatgggtggtgttatcggaagccttcaggctatggaagcaatcaagtatatacttggtgtaggggatttacttacaggtcatctccttacatatgatgctataacacaggaattccataagattaagttgccatctgatactgatggctgtgctgtatgtggaaagcatccaactatcacagaacttattgattatgagcaggtagtttgtgaagaccactgataattatatccaatcataaggacaataaggaggcgtcacaaagtgattacatttaataagagtgattttgatacaatacttgaatatgctaagaagaatcttccagaggaggcttgtggtcttattggaggaacaacagaaaatggggataagcacataaaaaagatatatcttcttactaatattgaccattccaatgagcatttttcaatggatcctaaggaacagttagcggcagttaaagatatgagagctaatggtttagttcctcttggcaactggcattcacatccagagtcaccatcaagaccatctgatgaggataagagacttgcatatgacagcaaagcaagttatatgatactttcacttatgaatatagatgaaccagtgcttaattcattccatattgaaggcaatgtatcaaataaagaagatctgagaataatatgataaagcattgagccgtgccgtaataaactattaaccattgctgtgcttgcacaaagcgatggttaatagtttattacgatagggcgaaagcccggcagttccataaagctttgctttatggaacgtgcacggcgaaaaaggcgttgtgcacggcgaaaagccggcgtgcacggcgaaaaaggcgttgtgcacggcgaaaagccggcgtgcatggcgaagaaggcattgtgcacggcgaagaagcgaataaatagtagttcagtgcgataggaatggagatttattatgagtaatctaacggatatttcagatgttattattataggaagtggtccggcaggactatctgctgctatatatgttgtcagggctggattatcagttactgttatagagaaagaatttatgggaacaggacagatagctgacagcagtaaagtagacaattatcttggtattccagcaataagcggttatgacctgggcgaaagtttcagggaacacgcactttcgcttggagtaacaatagaagataataatgttaccagacttacccctgttgatgacatatgggaattagagttatcagacggaagcactaagaaagcccaatgcgtaatatatgcggctggctgtagccataaaaagttacaggtagagaatgaagaacagtatacaggcaaaggaatatcatattgtgccgtatgtgacggagcattttataaggataaagatgtcgcagtagtaggtggcggtgacacagcactttctgatgcactttatctttcagatatatgtgccaacgtatatattatacacagaagggaagaattccgtggagcggcttcacttcttgcaaagttaaaggaacgtacgaatgtgcacatatgcactaacagaacagtaaagaaagtggaaggcagtaataatcttgagaggataatacttgataatgatacaggcattgacgttaatggattatttgttgccgttggaatgagcccacagacagagcttcttaagggtattgcagaacttgataattcaggatatgtaatagcaggtgaagattgtgttacatcagccagaggtttattcgtggcaggtgatgtcagaacgaaaatattaagacaagtaataacagccgcagcagatggtgctatggcagcaacacaggcagtacagtaccttagataaaaggtatgtactgcctgctggtatttatatatgtatagcctggctgtgtatatttatataatatgtatttattgtatacttattatgtgtttactataaatattactaaatatatttaacacaatatacatttattatatatctaatatattgctatagatattactgcgtatatttatacaatatgtatttattatatatatttattgtatctattatatctagttatttagtgcgttatagcttcatatatataatcaagaacctttatgttatctttttcgtgtaaaatatcgtggcgcatattattaaatatcattatatcttttatattaaatccctgtttggtcattaaatttacggtagttttaatattttttccatactcacttacagcatcatcactgccgctaagaatatatacaggtgccaagcttgctgtcttagcctttttagatacacagttaatcattcctgataatagttcatacataaggcttgctgtaatctgtgctggaatatgagggtcgttaagatatttatcacgttcttcttcattatagagaagccagtctgcacgcgatgtagcatttttaatcttattattgtacattccaaatgcaatgaactgtataagcggactgcaattctgtccgttagcctgcatacaggcgtggtcgatataacttcttattgctttgagaataaaacgtggctgagaaccagttccgataaggaaacatccgtcaatcttagtccttaagtgaggagataaaagcatatcccttacgatgaatgagcccatagagaaaccaacaatataataaggaagtttagggtagcgtttcttcatttcggtgtagcaggtatgaacgtctttaaccacatattcccagcttcctttcttgccaagatatgctttcctgctgccattctgtagtgagtggccgtgtcctataatgtcaataccgcatacaacgtatcctttgcttgtaaaatactgggcaactttgtcatatcttcccatatattctgttattccgtgtacaagctgtattacgccgattggtttgctttcagctttccatacagctgcctgtatagttgtcttattatccgatgatttaaaattaaacatatataacctcaattcttagccagtaggcctttggtactaaaaagcattatacgacaaaatatttaataaaactacataaaaattgctaattaaaacatataattatttattgaaaaagaataataaatgtgttatagtcagtatccgtctgaatggcttgatttgcttaataaaataaagaatatcgaggtatatatgggtaacgataatacaaaagcactaagcggtatggatatgactacaggttcgataccggttaaaatactaaagttcagtattccacttatgctggcacagattttggaagttctgtttaatatgtcagatgtggcagttgttggtaaattttcaagttacgaggcacttggagcagttggctctacatcattgcttgtaacattatttacaggatttcttataggtatgggatgtggtgtcaatgtaagagttgcacagcagcttggtgcaggtcagaaagaaaatgtacgaaagactattcatacatcatttcttctctgtcttattgtaggacttacagcactggttctttgtatattgggtgctgaattcttcctgtcacttatgaatactaaaacagagcttatagatggggcggtgctttattttagaatatacgcacttggtatgccggctatggctatatataactttggtaatgcggttatgagtgcgagcggagatactaagaagcctcttatatatcttacgtttgcaggcgttgtgaatgtatgccttaaccttatacttgttatagggataggtatggctgaggatggtgtcgcatttgctagtataacagcccagtacatatcagcaatacttgtagtggttaatctgttaagaagaagtgacacagacagatgccggttaagagtaagagaattaaagctttatccgggtgtgccaaaggtaatacttatgcttggaattccagcaggtatccagaatgctatatttgctatggctaatctatttatccagacaggtgttaattcattcagtgcggttatggtgtcaggaaatgccgccgccgctaatgcagatatgcttatatataatgttatgatggctttttatactgcgtgctcaagctttatgggacagaatatgggagcttgtaacaagaaacgaatgttaaaaagctaccttataagtatggcttatgctttcttagcggcggcgatacttggaggacttcttataatatttggaagacagttcctgtcattatttacaagtgagccagaagttatagatgcaggtatgcagaggattatgattatgggcttatcgtatgctgtatcctcatttatggattgtacgatagcggcatcaagaggacttggcaagactatagttccaacaatagtggttattataggttcgtgtgtgttcagagtagcatgggtgtatacaatatttgcacatttccacactataccatcattgttcctgttatatccctgctcctggataattacagctgccgcagagataacctatttcgtgcatatatttaagaaagtgacattttaa

SEQ ID NO: 810 - DNA, 23892 bp, unidentified
  source 1..23892: mol_type = unassigned DNA
ggagacagtcggttataatattttgagcctgttcatattgcttaattgtaagaaaataaatacattgataaaaataaaaatctcggtcatgtggataaatgagacgtaaatcctgtaagagtgtttctgctaagttcatattagagtgctgcaaagcagattcaatgtggtctttatctggttgtttcattgtacaatagcctcctatctgttataattgtatcataaaataaaattacagaaaaggcttatttgcataaaggagacgatatgctaaagttaaaacaggataaattattggatgaagaagcacttacagtaatttgtgaagcacttcatgttaacaaccaagatattacggatatagatattatgaaaaagggaatgacgaatcggtcatttacatttcgatgtaaaggcaaacgttatatgatacgaatttcaggagttggtacagaaaaactgattgatcggtgtcaggagaaagaggtatatgaagcaatccgtgatatggatatttgtgatccggtcatttatatagattctgaaaaaggatataaaatatcggagtttttggaaaattcgcgggtatgtgatccgatgaatggtttggatgtaaaaagaagcatggaatgcctgaaaagatttcatgacaaaaagttagctgtcggccatacgtttgatctttttggccagattgaaaagtatgagttgcttcgggggaattcaaaatctgtctatgcagactatgaaaaaacaaagagggatgtttactggttaaaatcatttattgatcgcaatatagaagaaaaggtactgacacatattgatgcagttccagataatttcttgtttgtaaaagatgagtacggaaaagaacagattaagttgattgattgggaatatgcaggaatgcaggatccacatgtggatatcgctatgtttggtatttattcattatatgacagagaacatatggaacaattgattgatgcttattttccagagggctgttcgaaaagaatcagaacaaagatttattgttatattgcagtgggtggtcttttgtggagtaattggtgtgaatataaagaaaaattgggaaatagttttatggagtatgcaacccatcagtatcagtatgcaaaagagtattcttatattgcactgttgaaattgcaggaaatggagagaacattacatgcataaagtagaacgtgctataatcctggcagccggaataggaaaaagaatgaaccccgttacattaggaacgcccaaacctttggtaaaggtaaatggagttagaatgattgatacgataataaaggcactgtatcagaatgatattacagagatttatattgtagtaggatatttaaaagagcaattttgtgagatacggaaggagtatcaggggataacattgattgagaatccatattatgcaacatgcaataacatttcatcattgtatgttgcgcggaaatatcttgaaaatgcaattattctagatggagatcagatcatatgtaatgagagaattttgatatcggagttttgccggtcggggtataatagtgtatggacatttgaagagacggatgagtggcttcagacagtgaaagatggaattgtgacagcttgtagcagagttggggggggatgtggatggcagctgtatagcatttcgcgttggacagctgaggatggaagaaaactaaaaaaacatctggaactcgagtttgaacaaaagcacaacacacaaatatattgggatgatattgttatgttctgtcattcacaggagtatcagcttggtatttttgaaatgcagccagatgatgtgatagagatagatagtttagaagagctgataagcatagataataactatgtgaaatatagggaaaagggactagcatgaaaaaaaaagaacgtgaacaaattgattggttaattacaatcgtgccatttttattaattattagtttattcgtattatttatcatattgccagagcaatctaattatattcttggtcggatacgatttttcttaggagatacttttggaagttattatattatgatagggatagtttttttttgtgtttccatctatcttgcgggctcaaaatatggaaatattattttgggaacacagggagaaaaacctaaaaattcttttttttcatggggagcaatgatgtttacctgcggattggcagcagacattttattttattctttttcagaatggatgatgtatgcatcagatccacatatcatagaactaggaaacattcagaaatgggctggtatatatccactgtttcattggagttttattccatggagtttttatttggtgcttgcagtggcatttggttttatgttacatgttcgaaatagagaacgtcaaaaatattcagaagcatgcagaccaatattaggaaaacaaaccgatggcattggtggaagaatgatagatctgttggcagtatttgcattgattgctggtacagcaacaacatttggtattgccacaccgcttatatcagaaattttaacggatgtttttcagatacagttagagcgtacagccttgaatttaatcattctgattatcacatgtttaatttatacatattctttacttcatggatttcatggaatcagtttccttgcaaaaatctgcatttacatgttttttggaatcttattgtatgtattattatttggtggaaaaacccgatatattattgaaagtgggatatcttctttgggtatcatgatgcagaatttcataagtttagctactgatacagacccgttaaggacatcttattttcctcagaattggacaatttattattgggcttattggatggtatggtgtgtagcttccccgttttttattggaagaatttcaaagggcaggagcatacggcaggtaattctgggtggatatatgtttggtgcggggtctactatggtaagctttatcgttttaggaaattattcaatggaaatgcagatgtctgggatggtggattatgtgggtgaatataatcggacaggagatttatatcatataatcgtaagcattattaaaacacttccgggtgcaacaatagtactgttggcagtggtatttacgatgattgcattttatgcgacatcatttgattcaattgcattgatagcttcttgttatagctatcgtaaattggatgggcagaagcagccacataaagttgtgcagctgatatggtgtattttattgattctgtttccgattgccttactattcacaaatagttctatgagcaacctgcaatcggtaagcattattgcggcatttccaattggtatggtaatgattttgattgtaataagtttctttaaggacgttgagaagtataaaaaagatcttgacaatagtcaaaagcaaacaaaataaattgaaaatgaaatatttgattagctggaagaggaagaaaaataatggtgacaagatgtgttatgaaaaatgacaagaaggaaatgatatgggatttatttgaccaaaaagaaaatgcaaatgatatacaaacaatgattttagaatatgaaaatgaattttctgatgacatggatatctttctgatgaaaatgtgcctttttatctatgagaataaaatacaggcagcaattgaaatcggaaaacaggcattaagaaagaacccatatttattagaaatccatcttaaactggcagaagcatataaggatcaatcaaagtatattgaagcgtataagcattattgtatatccaaattattagcgtcatttgcaggagaagagaaaatatgcagagattgcgaattattagcaaaaggttcgttagaacagttggaagaactaatcacttatttacctgatgaacagaagatatatttgtctcaaaaaatgataccagcatttcttggttatgaaaaaaatcaatttggatataatgagcggcgttttaggacgtttgagcatattggtggcgattattattatgagagtgaagaagtaaaaaaatatgttggaatgtatcatatacctatgtatgtaataaatgaactggatgcagtgcactggaaaatagaatttcaggaagttgtagaggcaaattacttgaaactccctgatacagagaaaaaatggattgttccagtagcggtggaaaaaaatactacccattggtttgaaacagataatgggaaaatgccagttattcagcgagacattaaaagcttttattattatagagtcggaggcggcagggaaataatatcttcggatatatgttattggggaaatccaataccgattaaaagtgataaaaataagaaaagattggtgttaagtatatttgttgatggtctggcacaggtattgctgacagcagataaatttgcatacctaatgcctaatactgcaaaatttttcaaaaatggaatggtttgtaaacaggcttacagttctggggaatggacatatccgagtatagctggagttatgtcaggacttgcaacaacccaacatatgatgtttcataatgaaattgattggaaacttccaaattcagttaaaacactgatggaatattttcatgagtcgggatactatacatctgctttttcaggcgattggagaataatcccatcatatgggtacgcaaggggatgtgaccgatttatttatcaattgcaacacacagggttttcagtcgaaaaaatgattggcggtgttatcaatgaaatagatgcattaaaagagattaatcagtttgtgtgggtatcgttaggggatttacatgatgttgctgatgaaatggaattaccaaccagcgtgcagacgcatttgaaaatagaagatcgcgtatgcgaaaaaggaagcgagacatctgtaaaacaaaaatatgatatggctaaaaaaattcaatatgaacagatgttacaatatatggatcgttatttgggaatgttattttcatatttggagaatacatatgaagaaaatgaacttatagtggcattgttttcagaccatggacaaggatttttgataccggaggatgggcagtttttaggaccggaaagaacaaatatagcatttatgtttcgaaatggacaacttaaaggcgaaacagaggaagttatgtcatctttggattatacggcaattttatgtaagatggcgggaatagcatattgtgaacagggggttgagggacgaactccaagaatatttggtggaagtggaagaagatgggcgttaacagagagtttgcatccaaaagattattatagagcggcactggtaagcgaaaactatcgattttatttttgcaacccgattccggttggatatgatggaagatttgagattggagattattcaatttgtcttacagataaagaaggaagaaatgtttatgctgaagatgttgaaaaggaatgcttagatattattatgaggcagatagcaaatctgtgtatttattaaatggcgcgttgagatttgatgtataatgggagagagaactatgaaacgaaatatattgttaaatccgggaccggctacgacaaccgatacagtaaaacaggcacaggtagtgccggatatctgcccgagggaacaggaatttgttgaaattatgaagcagatacgaaaagatctagttaaaattgtgcatggagatgagcaggatgatacatctgtattgttttgtggttcgggtacgatttctatggatgtctgtttaaattcattattgccggaagagaagaaaattctgatcattaataatggagcatatagttccagagcggtagagatatgtgaatattatggaatgccgttcattaatctggagttcccaatagatgaaagaccatcattagagctgatagaacaggtactaaaagaaaataacgatatagcacttgtatatacaacacataatgaaacaggaacaggtatcttaaatccggtgcgggaaatcggagcacttgtacatcggtatggagcggtttttgtggtagatactacatcgacatatgcgatgaggccgattgatattaagaaggataatattgacttctgtatggcatctgcgcaaaaaggattaatggcgatgacaggtgtatcatttgtgattggtaataaaagcataatagagaggtcaaaagattatcccaaacgttcctattattgcaatttgtatttacaatatgactatttcgaaaaacatggagaaatgcactttacgccgccagtacagacagtttatgcaatgcgtcaggcaatagcagagtattttgcggaaggagagcaggaaaagtggaagcgccataccagagtatatgatgcattgtacagtggccttgaacgactgggctttcagaatgtgataaagaaggaatggcaggcgggactggtggctgcagtgaaatatcctgatgatccaaactggagtttttctgccatccatgatttctgctatgagagaggttttaccatttatccgggtaaaattaataatacggagacatttcgcttatgtgcgttaggtgctattgacgaaactgatattgaagacttctttgaaatatttgaagaaggattaaagcagatgggagtttctttgccagtgtattaccagaaatgaggaacggatatttaaaatatgttgaaagaaaaagatgagatagctattttaatggctgcaggattaggtacaagaatgcgcccgctgacagagcagattcctaagccacttgttcctgttatgggaacacctctgatagaaacggttatttgcgctttagaacggcggggaataaaaagaatatatgttgttgttggttatttaaaagaacaattttcttatttgttagaaaaatatgataacttagagattgttgaaaataaagaatatttgaaaaaaacaatatttcgtcattgtatgcagtgagagacattcttggaagttcagattgttttatttgtgaagctgatttgtatgtgcccgatgatactattttttgagacaatattcaacttcgtgttattttggaaaaatgatagagggctattcttcggactgggtattcgatgtgcaaaatggtaatattacaagagtaggaaaaggcggtacagacacatataacatggcaggtatttcttattggaaaaggtcagatgcgttaatcataaaaaaagcaattgaagcatcatataagaaaccaggacatgagaaattattttgggatgagattgttgatcaggaattaaaacgtttaaaggttcaggtagaggaaatatcaccggaaagtgtaatagaagttgatacactggaggaattgagccagctggattcgaggtataagacatgttagtaacagattttgttgagcaaataaaaaaaataggaataaaaacattagccggggtgcctgattctgcattaaagtctttttgtgattatatcaatgggacagggaaaaatgaatttgaacattatgtgccggtaaatgaaggggcagctgttggcattgcgattgggagttatttggcaactggagtaccagcctgcgtttatatgcagaatagtgggctgggaaatatagtaaatccaattacatcgcttgctaataaagatgtatatggcataccaatgttattattagtgggatggcgcggtgagccaggaacgaaagatgaacctcagcataaatatatggggaaaataacggaagacttactgcgtgtgttggaaatcgaatatatagtgttggaaaaggaactttctatgcaggaaataatgcgtagttttgaaagagcagcacaagtgttaaaagaaggaaaacaattcgcatttgttttgaaaagagactttctacagaataataacagtagtgattataaaaacaataatagtttagtaagagaagatgcaatagcggcaataataaaaatgttggatgaaagtgatgtcgtcatttctacaacaggaaagatttcaagagaagtatatgagcagagtgatagaataaaagggagtcatgcacaggatttcctgacggtagggggaatgggacatgcatctatgatcgcacttggaatggctcacaaattagagaaaaaaagggtgtattgtctggatggagatggagcagtgcttatgcatatgggaagtatggcatatatagcaaaacagaaaccgcaaaatttgatccatatttgtctgaataatgacgcacatgaatcggtagggggaatgccgactggttgtgtgggattaagctatgcagatattgccgggaccgttgggtatgaaagggtgtattgcgtggataagcagcaggatttaacaaaggtgttgagtgacataaaaaagaaaaggaatcttacattcattgagataaaggtggcaatgcaatcgagggcagatctggggagaccaaaggaaactgcagaagaaaataaaaataattttatgaaatatcatggggttggcttatgaaaaaagtatatgcttgtttttgcacggacgtaatacatgaaggacacctgaatattattcgggaagcaaaaaatatggaaaattgattgcaggtgtattgagtgatactgcaatgattcgatataaccgctttccgacggtatcatttgaagaacgaaaaaaaatgttagaacagataccggaagtggatgaggtggttgttcaggacgaggtaatgtatggttcgattttagaaagaataaaaccggattatgttatacatggagataattggctaaatgatccaatggaagtgatccgtgataatgtcattgaaaatctgaaaaaatggggaggtcagttaatagaaatcccatatacatataatgagcaggtaaggaatattgaagctgttatgcgagaaaggactgctatgccggaatatcgtagaaaacggttacggcaattattacagttatgtccaatagtaaagacactggaagtgcatagtggtctgaccggattgatagcggaaaagacagttgtggccaataacggtgagattgatcaatttgatgcaatgtggttatcaagtctgtgtgattcgacagcgaaaggaaaacctgatattgaactggtagacatgtcttccagacttcgtacggtggatgacgtgttggaggttacaacgaagccaatcatattagatggggatactggtggtatgattgagcattttgtatacaacgtaagaacattagaacgtgtaggggtctcagcagttattatcgaggataagacgggactcaagaaaaactctttgtttggaacagaggtagagcagacacaggatagtatagaaaactttactgcaaaaatcagagcggggaaacgtgcgcagcgtacaaaagattttatgattattgcacggattgagagccttattttagaaaagggattagaggatgcacttgtgagagcatttgcatatgtggacgcaggggcagacggcattatgattcacagtagaaaaaaaactcctgatgaaatatttgcgttttgtgacagatttcgtgaaaaagataaaattactcctctggtcgttgtgccgacctcttataatgagacatatgaaagtgaactacaacagcatggaattaatattgtaatatatgcgaatcagcttacaagaagtgcctttccagcgatgcagcagactgcaacagatattttaagatatcatagagcaaaggaagtggatgacagactgatgtcaattaaagatattattacattggttgatgaagtttaaggtaaatttcttgagagggttcatattcaaatcagattgaagatgcatttcaagctggaagaggatatcaatattcagttgatcatcagtagaaaattgaggacttacaattgagataacaaatcatcatgagtaaccgggagcggctcacagccgctcacaataccccccgaacttctcctccgtcatcccctcctcaatcatccgatacagctccagctgcttcggaatcagagcactgtacacagactgagaataatccggcacctctgtgaacaccgttttttctaattctttgtagaaagaataggagggtttaaaatcccggagttttgcaaaatacagtgtctcatacagataggtatggagaaaatatagtttgatttcatcatagtattcctggaaaaacggcgtattcttcataaaattccagacggcaagttggacatcggcatgcatttttagggtttcttcctgtctcatatcatttcgcatggttccagaatcattttgtctgtaataatagtaggcatcgtttaagattacgattttatttgcaaaatataaaagcggatatacaaagagcggttcttcgtaaataacatgctctgcataagcggtatgagcagtttttaaaagatcgtgacggtaaagtttattccagcagccataggtaattttctctgagatcaaaaattcttttcggtcattgacagaagaaatttcaatcacttccggcataatgttccgaccggagtccacggcacccagacggtctgtataataaaaatattcaaactggatgatatcagcatccgattctttggctttttcataagtttccaacagaaaattctcagcgacaaagtcatcagcgtcaacaaatgcaatatattcacccgttgcatactgcagggcaacatttcttgcaccgccctggcgcatattttcctcaagttttaagatcataatgctttccggataggcgcgttcaaattcctgcagcatgttccaggtagcatcctcatctgtggatgcatcgtctacaaagatcagttcgatctggtcaattccgattgtctgctgtacaagtgacataaagcatttcggaagatattttgttgcattaaaacatgggatgatgacacttacttttttcatagatcgaaattctcctggtaaaaaggttacatatggtataataaacaaaaatggtatattattaatttatcacaacaaaaaggaacgcacaatatcagtctgaaaagcagggaggtcataatgtctggaaatatagcgatcggtatacaggatttttccacaatcatccagggaaactatttttatatagataaaacgccttttattaaagaatggtgggattgcggggacagtgcgactttgatcacccgtccgcgtcgttttggaaagacacttacaatgagtatggtggagcagttcttttccatagactatgccggcaggtcagatttgtttgaacatctggcgatctggaaagaagaaaaataccgtgagctgcagggaacttatcctgtcatcagtctgtcatttgcgcggattaaagagagagattatgagaaaacaaaacaaaagatgtgtgaggtgttaagaaacatatatataaagttttgttatattaaagacagtgaaaagcttacagatgccgacagagcatattatgagcgtatgttggaggaaaatataaaagagacggatgcgacatcttctttatatcagttatcagattttctgtatagatattatggaaaaaaagttatcattttgttagacgaatatgatacacccatgcaggaagcatttgtggatggttactgggatgaacttgtcgcattcacccgaagcctgtttaattcgacatttaaaacgaatccggcactggaacgtggaattatgacgggaatcacaagagtaagtaaggagtccgttttttcagatttgaataacttaaagatagttacgactacatcaaatgaatatgcttctgtatttggttttacagagaaggaagtctttgatgcattggaacagtatggtcttgagaaagaaaaaaaggaagtaaaaagatggtacgatggtttcatttttggggagcacaaagatatttataatccatggtcaattttaaattatctcgatacacagttatacaaaacattttgggcaaatacaagtgcgaatagtctggtaggaaaattgattcaggaaggaaaccgtacaattaaggaaaaatttgaaaaattattatgcggagaatgcatctggtcagaaattgatgagcagattgtatacaatcaactaaatggaaatgaaaaagcggtttggagtcttttgctggcgagtggatatttgaaagtattatcttatgaaacgtatcaggatattgaggaggggaagatgccgaaataccagcttgcgttgacgaatctggaagtaaagttaatgtttcagggtatggtacatgactggttcgctcctgtacaaccagattacaatgattttgtaaaggcgatgttacttgatgatgtggatgcgatgaatgaatacatgaatcgaattgctatacagacatttagttatttcgacaccggagaaagggcatccggggcagagcctgagcgtttttatcatggctttgtattaggtctgcttgttgacctgcgggatagatatcaccttaaatccaaccgcgaaagtgggtttggcagatatgatgtaatgttagaaccgaaaaattcaaaggaatgcaaagcagttattttagaattcaaagttcgaaatccacgaaaggaaaaaagtattcaagagacagttctgtctgccttaaagcagatctgtgagaaaaaatacgatgcagacctgcttgataaaggaatcagaaaggaacagatatatcattatggatttgcatttgaaggcaaaaaagttttgattgggacagacagggaggagtgaatatgcccaccaatatagcgatcggcacacaggagaacaaccacatgttatcagtctgtatcatcaccaaaaatgaagaacacaatatagcgcgctgccttaaatctttccagaacaccggatttgagctgatcgtagcggatactggatcgacagatcagacaaaaaaaatcgccgcagaatatacggaaaatatctatgatttcccatggtgcgatgatttttcggcagcaaagaattttgcggtttcaaaagcagcacatccgtatgtgatggtcattgacagcgatgaatatttacagcagattgatcgggtacagttagagaaaatgattgccgaacatccaggtgaggttggcaggatccggagaatcaatattatttccggaaaagatggaaagcaggaaaataaagagtggatcaaccgcatttttgcaaaagaaagttttcattacacgggaagaatccatgagcaggtaactgcctgtgacgaaaaggaatatcgtacatacgaagcaccggtcgtgatcggtcatacaggttatgatcttccgaaggaagaaaaaaagaaaaaggcgctgcgcaacataagactgttggggcaggaattaaaaaaattagggtgggatgctgaagtgcatgccacgcagttagaacagaatatcgcaaagcaggatacggatgcagagcagaaatctgaaattacggatgcaaaaaaagagcagcagatcccgtatttattgtatcagcttggaaaaagctattacatggcagaagattataacgaggcatgcttctggttcggccatggactcagttatgaccttgaaccaaagttagaatatgtcatcgatatggtggaaacctatggctatgcactgatcaacagtgggcgtgccggggaagcacttttctttgaaaatatttatgaagaatttggaaatagtgcggattttcagttcctgatgggactcatttatatgaacaacgctatgtttgatgcagcagttggagaatttttgaaagcggccaaacaccgggactgcaggatggcgggagtaaattcctatgcagcttattataatgttggagttatttatgaatgcctggggaaaatcagtgaggcaaagtattattatcagaagtgcggtaattatgagccggcaaaaaaacgtttaaaattgataaacagttaaatttgttatagtcagcttattggagaaacagagtgaaaaatataatttttcaaatgcagaatggagattagaatgggaatatatttaaatccgggaaatgaagaatttcagaaagcacttaattccaagatatatgtggataaaaccatgttgatttctgaaatgaatcagaatctgaataccgaacatcagaatatatgcgtaagcagacctcgccgttttggaaaatctatgactgcaaatatgcttgtagcttattatagcaagggatgtgattcgaaaaacatgtttgcggattataagattgcacaggatgaaagttttgaggcaaatctgaataaatataatgtccttcatgtcaatatgcttgactttcttaaccgtgcacagacagtggacggaatgatcgattacctgcaaaagaggcttttgtgggatatcaggcgggaatacggagatgtagactgttttgactgggaggatcttattgatgtattggagaacatctatagtcagaaaaaacagaaatttatcatcattatcgacgagtgggattgcatatttcgaaagtatccgggggatgatgaagcgcagaaaaaatatctggatttcctgcgcctgtggatgaaagataaaccatatattgcactggcttatatgacaggaatactgccaatcaaaaaatatggcgagcattctgcacttaatatgtttgacgaatattccatgaccaatcagcgtgaacttgctgaatttaccgggtttacggaagaggaagttcaaagtctgtgtgtgtcatatggtatgccttatgacaggatgaaacagtggtacgatggatatgatttaaagggcattcagatctataatccaagatcagtagtcatgtcattgctgggacatgattttgacagttattggacgaagacggagacctatgaggcactaaaaaaatatatccagatggacatgtatcacttgaaggcgttaatcacacagcttatatcaggcagccatataaggattaattcggataagtttcagaatgatatgtccacatttgcgagcgtagatgatgtatttacgcttttagtgcatttgggatacctgacctacgattttgagaacaagactgtttctattccaaaccaggaggtgcagaaagagtttattaactgcatagaggatggcggatgggaaccggtcatggatgcgattcgtaattctgaaacactgcttcaggcaactatagatggaaaagaagaatatgttgcggaaatgatcgagcaggtgcatcaggaaaatatatccattttaaagtataatgatgaaaactctatgtcatgtgtgctttcgctggcatattatgctgcaagaaaagattatgtgatgtatcgggaactcgccgggggaaagggatttgcagatatcgtgtttgttccgagaaagtttagagatgtgccggcgatcgtggtggaattaaaatgggataaatcctcagatgcagtgattgcacagataaaaaagaagcagtacatgcagagcctgaaagattatcatggacaagtgatcctggttggcattaattatgacaatacagattctgtaaaggacgattataaaagacatagctgcaggatagaaagaatcaagttataacaggagaccaccatgcaaacaaccatcatctacatcaccggcatctacgatacccttgacttatttacacaggaactgaaaaatgcgtttgagaccatggggtatgcctcatttacttatgatgcccgtttggaagaggagagtaagcaggcattgatcgaatgcatcgaagaaggtacaaaaaaagatcagaggtttttctgtgtgacgtttaataacctgggatataatctgtcacttccggcaggcatgaccggaacagggatgcttttgaagcaggacattttccaaagtacagcaggatcaaaaagagcaggttctgcggaagaagagccaaatctctgggaaacttacaatattccatatatcaatatcctgatggatcatccgtttcactatgaaaaaccactgcagaatgcaccggcaacatctattgtgttgtgcacggaccgcaaccatgtccggtatatccgcagatattttaaaaatatccggtatacggattttctgccacatgccggggtggaacttggcagcaggcataagccgcttgcggagcgtggaattgatgttttatatgccggggcattgccgatctacacagttgcgaagatgataccggatttgtcatccatcccggaagtcgatggagaggagatggcacaggctgtgctgtcagaactggtgcatcatcctgaccggacaacagaggatgtgatagaagaatatttaaaatataagcggaatgatatttcagaacagcgtattcatgagatcatcgtgcagatgcgttttattgactcgtatgccacgtcatttttccgtgaacaggctgtccgtattctggtggaaaacggaatacgggtaacggcatatggaacaggctgggatcagtgtgagtggagtgacaatccgtatctggtgtatggtggaaaagtacttgcaccggagattctgcctttgatgaacgacagcaagatcgtcttaaatacaatgacttggttcaaagccggggcacatgaccgtatttttaacggaatgcttgccggagcagcagtggtgacggacgattccacctatctgcgaagagaatttacggatggaaaagagcttgtgatgttttcaagaaatgagaaccgtaccctgccggaacgtgtatttgatctgttcggacacatgcagtccacacaaaggatggcagactgtggatatcaggcagcaaaagaacatcatacgtggaaaagcagagcggaatggatccgggaagcctggatgtagagccggaggttctcattccctccctgcaacaggttttacatacagatgaaaaagttattttggctgacacggcacaggaatggagattagtgtgaaaaatacatttttcacacgcaagatttgtgcttcacacaaactcgtgatgcgcttaaaagcagcgcaagaatggagagtattatgcacatattgatgtatcgctggaaagcttataattacagagacatagagcagacttttttattgctggggcatacggtggataatatcgaacagcatcttggcaattatgatattgatccggaatttgaaaaaataattgagcacaaaatacaggaaacgcattatgatatggtatttacggtcaattattttgcactgatttcgaatgtctgtcagaagatgggaataaaatatgtatcgtggagctgtgacaatccgctgatcagtatgtatcacgaatccatttttcatccctgcaattatatatttacctttgacaagacaaattatctggaatttcgggagatgggagtagagcatatctggtatcttccgcttgcggtagatacaaaccggatggatatggtgattgcaaattcgccggaaatacagaaatacaaaggggatatcgcatttgttggaagcctttatgaaagaaattcttatgataagataaaaagcaggctgccagaatatctacgggggtattttgacgcagtgatcgaggcacagttaaatatcagtggcgcaaatattgtggaaaccatgctgaccacggatatactggaaaaacttcaggaatattttgaactggaaaaatcagaagggtcgttttcggatcttggactgatctttcagacgaccgtacttggatttaaaattgcggaagtggagcgcagacgtgcattgatcgaactgtcaaaacgttatcatgtcaatgtgtacagtaacagtgatgtaagtgatatgctgcggattcagtactgtggttcggttgattactggagtgagctgccgcaggtttttcgtatgtcaaagattaatctgaattttacgattccgaatatcaagagcggcataccactcagggtatgggatgtgcttggggcaggaggctttctgatgacaaattatcaggcggaaataccatattattttaaagagggggaagacctggtatgctttgacggaatcaatgatctttgtgaaaaagcagaatattatctggcacatgaggaagaacgtctggcaatcgcagaaaatggttatcgaaaagtaagggagcatcacaattatatagagagaataaatacgatgctggatattatagaagaaaatgaaaatcaggaaaatgatatatagtacatgatcagtgcgaaagatgcataatctgaagttgcatctgggatattggaatattaaacggacactacagaaaatctgtaagtgtccgtttagcaatatctgtctaacatcattccggaataaacggaggtcaggtaagggcaggaaaaattcttatgacctggttttttgtaagtgatcatcgttttgcttgcataatttaacgggtcaacagagacggttccggcggtcgtcccgagatcgtttttaaacttatttaatgttgcaaagcattcttttgcatccgtggaagtgactgcatccgtcaaaagatgtgtatcgaccttgatggcaccgtcatctgaaagttttaatccatacgactcaaattcattgtaataaggttttaccacctgtgtaaaatcgcgccgcagtttatctgcttcctgtgtgctgtcatagcgatagcttaactggatcagattgttgtatacatttaccagagactggacattgtctacaatggagtcagctgttgttttaaagccgatctgtacagggtttgcctgggagcttggtttattcagtgtcagttcaaaagcattgttgacagtaaaagtatttgacagagatgcatgctccgtaccgtttaataagaaagaagaattacttgctgtctgggtaacacaatcaataccgagtgtctgcattgctttttcggatgcatgatcggaacttggggtaacttcaaacagataggactgaccgtctgcaagaccggtctgacttgaagttaaacgcagggcaatcttgttactggcatttttggcaagatcggcatgaatcccggcacctgaagaattgaccaggcgtgcaagcttttcaagaatatgctggttgtcatcatttctgcttacggtatactgaaactcatatgaacttaaatcagttgatatatcgaatgtgtaagtacctgttttgaaatcgcattcatcagggtaaagaaactttccgacattgatctgtggggctgcaagctgttttacctccacatcaaaatgcaaagaattatcgagactctgatcctcaccaatgtaggtaacattgacagaagattcgtcggaagactttgcaacttttttgttgaatacattttcaatcccctcgtcgttgtcagaaagggcagcgattacattctggatcgaacgggtatgttctttcaggtcaatcgcaaattttttcacatccgtggaatctggaattttatacagaggagtatctttatttgtttttacaatctgattatagacagcacgaagctgactcttcttatgggtatcataacgcgataccttcgaagtgccataagtgcttaaataataatgataggcactgtcaatagcagccaagaaaacccctcctttcttccatgaaatatatacatttatcaggttataggacagcatccttgccgcctggcatgataaatgtggggattttaattatatttttaaagattctttaaaagtatttcggtctaactatataaaaatattataccatttgagaaaaaaatgtgaaataggaaaaaataatcaaaaaggtttaaaagggtataatatacaaaaaaagattgacggaaacaagtggatatgatatagtagacaggcgatggaagtaggtcttttttttatgcctttttttaaggactgtcgctgatccttaaaaaacgtctcactacggagaccggggcagaaaaaagcacaaagaattttaatggaggtggaagttgtgcgcacaaaaataacattggcatgtacggaatgcaaaaaccgtaactacaacatgacaaaagacaaaaaagctcatcctgacaggatggaaaccaaaaagtattgcagattctgcaagacccatacgttacacaaagaaaccaaataagacgcgcgtggcaaaggagtgaaaaaatgggagaaaccgagaagttagacaaggctccaaaagagagctggtttaccggtctttcggctgaattcaaaaagattatttggccggagaaacaatcacttgtaagacagaccacagcagttattgctgtatccgttgtattaggtcttatcatcgcgcttttggatttcgcaattcagtatggcgttgatttccttgttggttttaatttttaatggaggcagagtgatttatggcagaggcacactggtatgttgttcatacctactcaggatatgagaataaggtaaaagcgaacattgacaagacaattgaaaacagacatctggaagatcagatcttagaggtccgcgttccgatgcaggatgttgtcgaaatgaaaaatggcgcaaaaaaatccgtatcaaagaaaatgtttccgggatacgttcttatcaatatggttatgaatgacgacacatggtatgttgtcagaaatacccgtggtgttaccggatttgttggtccgggaagcaagccggttccgcttaccgatatggaaatgaaacctttgggaatcaagaaagagaacattgaagttgactttacagagggagacaccgttgtggttaccggaggtgtctggaaagacactatcggagtgatccaggcgatgaatcacggaaagcagagtgtgacgatcaatgttgaattgttcggccgcgagacgccggtagaaataagtttcgcagatgtaaaacttaacaattaaagcacagaccaggatctgtgcgcaggcatgagattatgcctgaaacattggattaaggaggcaattccaaatggcaaagaaagtagaaggatatatcaaattgcagattcctgctggcaaggctacacctgctcctccagttggacctgctcttggacagcatggcgttaacattgttgaatttacaaaacagttcaacgcaagaaccgctgatcagggagatcttatcatccctgtagttattacagtatacgcagacagaagcttcagcttcgttacaaagacaccgcctgctcctgtattaatcaagaaagcctgcaacattaaatctggttctgcaacaccgaacaagacaaaggttgctacactttccaaagcaaaattacaggaaatcgcagaattaaaaatgcctgacttaaatgcagcatctttagaggcagctatgagcatgatcgctggtactgcaagaagtatgggtgttacagtggaagaatagaatttgcaaaaacagcaaattcattggaagaatgcaagaacggcattcttctgagaaattctgcaaaaattaacgatatttattaacgattatgtgggagggccctctcccgataataccaccaggaggtttttttagaatgaaaagaggaaagaaatatcaggaagctgtgaaaagttttgataaggctgctcagtacgatgttgctgaagcaatcagcctggtaaagaaaaacgcaacagctaaatttgatgagacaatcgaacttcacatcagaacaggttgtgatggacgtcatgcagagcagcagatccgtggtgcagttgtattaccacacggaactggtaaatcagttaaagttttagtattcgcaaaaggaaccaaggttgatgaagcacaggcagcaggcgctgattacgtaggcggcgaggagctgatcccgaagattcagaacgagggatggttagacttcgatgttgttgttgctacaccggacatgatgggcgttgttggacgtcttggtcgtgtacttggaccgaaaggtttaatgccaaacccgaaggctggaacagtaactatggatgttacaaaagctgttaacgacatcaaagctggtaagattgaatacagattggacaaaacaaacattatccacgtgccagttggaaaagcttcttttacagaagaacagttaagcgacaacttccagacccttatgggtgcgatcaacaaagcaaaacctgcaagcttaaaaggtcagtatgttaagagtgcaactcttgcatctacaatgggacctggtgtaagattaaacgtagttaaaattacacagtaaaagcagaaaattgttgacaaccataatatacaatgttataatgcaaatcgttgagccggttttccggtactcagcgatttgcatatatgccgaagacagcaggtgctatatggcgtaaacgtaagacgacctgccgaggggatctttatcaagatttttttgaccgtatctctctgtctttgcagggagttttttattgcagattttaatctgaataaagcggttttatatacctcaagtcttttatgcagcagcagtgggaaaatcactgtgatccggcggattatccgtcggcaaaataataaaaggaggtgcacgattcgtggcaaaagtagaactcaaacagcctatcgtacaggaaatttctgaaaacatcaaagatgcacagtcggtcgtagtagttgactaccgtggacttaccgtagcagaagatactcagttacgtaaagcattaagagaagctggtgttacttacaaagtatacaaaaatactttagtaagccgtgcagtagaaggtactcagtttgaaagcttaagagacgttcttgaaggaccgaatgctttcgctatctctactgaggatgcaacagctccggcaagagttttagctaagttcgctaaaacagctcctgctcttgaaatcaaagcaggtgttgttgagggtacttattatgatgaggcaggcatgaaggctgtcgcagcagtaccatcaagagaagaacttctttccaaattacttggaagcttacagtctccgattaccaaccttgctcgcgttctcaatcagatcgcagaaaaaggcggtgcggcagatgcagcagtagaggctgctccggcagaagaaacagcagctgcagaagaaccagcagagacaccggcagagtaatctatccggcggctggatgaaacagtatatgggcacggcaggagagactgaccggtgcgacaataaattataatggaggaaaattataatggcaaaattaacaacagcagaatttatcgatgctatcaaagagttaagcgtattagagttaaatgatttagtaaaagcttgtgaagaagagttcggcgtatctgcagcagcaggcgttgtagttgcagcagcaggtgctggcgagggcgcagcagcagaagagaagactgagttcgacgtagagttaacagaagttggcccgaacaaagttaaagttatcaaagttgttcgtgaagctacaggcttaggcttaaaagaagcgaaagacgtagtagacggagctccgaaagtattaaaagaagcagctgacaaagcaacagctgaggatatcaaagctaaacttgaggctgagggagcaaaagttacattaaaataattgcgggtgctttatacgcagtgattgtaacagggcggctgccggataattccggcagccgcttttatactttataggattcgggtgtcaaaaggtggttcataacttagtgattgtcaaattgcacaaagccgagactgtttttgtgactttgggagaaaattag

SEQ ID NO: 811 - DNA, 7374 bp, unidentified
  source 1..7374: mol_type = unassigned DNA
caggcagggagtctgcaccttgaccatcatgtagccgtcttccagcatacgcttgaccgtgaggctgttgccatccttctggatgtcagcaacataggtcacctgaggcaggtgcagcttctcagcgatctgaggaccgacctgtgcggtatcaccgtcgattgcctgacggccgcagaacacgacgtcctcagggccgacaccgatcttattgacagcagcagcgaggatctggctggttgcgaaggtatcagaaccaccgaactcacggccagagaccagaacagccttatcagcgccgcgggccagcagctcacggagcataccctcggccggcgggggacccatggtgacgacaacgacttcgcagccggtctcgtccttcagcttcagagcggcctccagagcattcaggtcatcggggttggtgatggttgccatagaggcacggtccagagtaccatccgccttgacagccaccttaccggaggtatcaggaacctgctttacacaaacgattgctttcattgtaaatcttgcctcccttacttcagcagcgcgccggaaatgaccatcatctgcacttcgctggtgccctcgtagatctcagtgatcttggcatcacgcatcatgcgctcgatggggtagtcacgggtgtagccgtagccaccgaacagctgcaggcagcggcgagtcacgtcgcttgcggtgcgggctgcgatgagcttagcctgagcagcctcgacgctgtagcggacctttgcgccattcatagcttcctgcttcttcagagcggcagcgtagaccagatactttgcagcctcgatacgggccttcatctcggccagctcgaactgggtgttctggaaagcggagatgctgcggccgaactgcttacgctccttgacgtaagcgacggtctcctgcagagcgccctcggcgatgcccagagcctgggaagcgataccgatacggccgccgtccagagtagccatagccagctggaagcccttgccgcgcacgcccagcatacggtccttcgggatgcggcagtcctcaaagatcagctcgcaggtagaagaaccacggatgcccatcttatcctcagccttaccgacggagaagcccgggtcggtacgctccacgatgaaggcagagcacagcttggtgggacggcccttcttgtcgaggaccttatcggtaacagcgatgacgatgaacacgtcagcgtaacctgcgttggtgatgaagatcttggagccgttcagcacccagtaatcgccatcttccacagcagtggtctgctggccctgagcgtcagtaccagcgcccggctcggtcagaccgaaagcacccagccactcgccgctgcacagcttgggcaggtacttttccttctgctcgggagtgccgttctcataaataggtgctgcgcacaggctggtgtgtgcggaaacgataacaccagtggtgccgcagaccttgctcagctcctcaacagccatgacgtaggacaggacgtcgccgcctgcaccgccaacggaggtggggaagtaaatgcccatcatgcccagcttgcccatcttctcgacggtctccttggggaaatactcttcggcatcgactttctttgccagaggcttgacttcgttttcagcaaactcgcggtacatcttctgcaccatctgctgctgcttggacagagtaaaatccatcgctatatcctcctaacggatgtttttctttcagcacagggcagctacactcatgtcctgtgcaaacaaattcctcccggccgttttcttcgggacgaccgagagaaatttcaaactaatttacagctcgtcgacaggggtcttggtgcggtctgcgttgtaaacgtagaagcccttgccagacttgcagcccaggttgccgccgcggaccatcttacggatgagcgggcatgcacgatacttgctgtcgccggtctccttgtacaggacgtccataatggcgaggcagatgtccaggccgatgaagtcgcccagctccaggggtcccatcgggtggttggcacccagcttcatagcggtgtcgatgccggcgatgttggaaacgccctccatcttgatgaaagcagcctcgttgatcatcgggatcaggatgcggttgacgacgaagccggcagcctcgttgacctggaccggctgcttgccgatggcaacggagatctccttgatcttctcgacagtctcagcgggagtgttgcagccagcgatgacctcaatgagcttcatgcggtctgcggggttgaagaagtgcataccgaccagaggacggctgacacccttgccgatctcggtgatggacagagaagaggtgttggaagcgaagatgcactcgggcttgcagatcttatccagctcgccgaaagtggtctgcttgaccttcatatcctcgaaagcagcctcaacgacgaggtcgcagtcagcgcacaggtcttccttcaggcccggggtgatagcagcgacgatagcgtcagccttctcctgagtcatcttgcccttagcgaccagcttctcatagcccttcttgatctttgccagaccattctcggcccactcctgcttgatgtcacacagagcaaccgtgttgccctcgacctgagcaaatgcctttgcgatgccctggcccatagtgccagcaccgataacaccgatcttcatgggaaatctctcctttattatatcttctgaatgtagtgcctctccgcgcctcccctttccggggaggcgctgcagaggccttatggtttagttgttggtaaagacagccttgggcttcggcttttcacggctcaggaagcaggccatgccttccttctggtcatgagtctcgaagcagtcgccgaacagcttctcttcgacttcgacagccttctcgatggggaggctgatgccgtcgttgatcgccttcttgcagttgcgcacggcgatgggagcgttcttggcgatcttattggccagcttcaggacattctccatcagctcagcctgcggatacactacgttgaccaggccgatgcggtaggcctcgtcagccttgatgttcagtgcagagtataccagctgctttgccatgcccatgccaaccagacgtgccagacgctgggtgccgccgaagcccggggtgatgcccagaccgacttccggctgaccaaacacagcgttgtcggagcagatgcggatgtcgcagctcatagccagctcattgccgccgcccagtgcaaagccgttgacagctgcgatgacggggatggggaagctctcgatcatcaggaacacatcattgcccagtttgccgaaagcctcgccctcggccttggtcatggtgctcatggagccgatgtcagcacctgccacgaagctcttgtcgccttcgccggtcaggacgatgcagcggatggcggactggtcaactgcctcaaaagcagccttcaggtctgccaggacttcggggttcagggcgttcagtgccttcgggcggtcgatggtgatgatctcgactgcgccctgcacctcggtttttacaaatgccattgtgaaaacctccattcaggttatatcttattcaaaacagtccccggacaaggggcaagtctccggtctcgcccactgtccgggctgtatcaatatccggagtgacccttcaaagggaaattagtccatctcgacgatggttgcgcagcccatgccgccgccgatgcacagggtagccagacccttgtgagcaccacgatgcttcatagcgtacagcagggtgacgaggatacgagcaccggaagcgccgaccgggtggcccagagcgattgcgccgccgttgacgttcagcttgtccttatcgaagcccagagcctcgccgactgcgatggactgtgctgcgaatgcctcgttggcctcgaccaggtccatatcagcaacggtcatgccggtcttagccatgaccttcttggtagcagcgatggggccaaggcccatgacctcaggctcgacgcctgccagagcacctgcgacccaggtagccagaggcttcacgcccagctccttggccttctcttcgctcatgatgaccagagcagctgcgccatcgttgatagcggaggagtttgcagcggtgacgatgccgtccttggtgaaggcgggcttcagctttgccagcacttcgggagcgctcagacgggggccttcatcggtatcgaacacagtatcgcccttcttgcccttgatgacaacaggaacgatctcatccttgaaagcgccgtccttgatggccttatcagccttcagctggctgttgtaagcgaaatcatccagcatctcgcgggtgatggggctgtagccgtacttcttctgataggtctcgttggtgcagacgttctcagcggtcatgcccatgtgcttgttgaagccgcaggcatcccacagagcatcgttgaccatggtatccacgatctcgctcttgcccatgggagcgcccatgcggtagccgtagcggcccttcatcattgcgaagggagccatgtccatgttctccatgccgcctgcgaccacgatgtcagcatcgccggcctcgatcatctgagcagccatgttcacgcagttcagaccggagccgcagaccacgttgacggtgacagcaggagtctcgacgggcaggccagccttcagggaagcctgacgagcgacgttctggcccagaccagcctggatgacgcagcccatgtaaacatgatcgacctgctcgggtttcacgttagcacggttcagggcctccttgataacgatggagcccagctctgcagcagggacgtttgccagggtgccgccaaacttaccaatagcggtacggcaagcagatgcgataacaattttcttcatgttaatagcctcctgaatttatatgtttcggggtttcgtaaaactatttatcaaaaagcccgagggcctttctgcattataaaaggtatcagattgtctttccttccgcccggagctgctccactttggcgtggatggcattctctacgttgggcgtcacgaacttggagatgttgctgccgtagcgggcagcctccttgacgatggtggaagaaaggtagctccacttgatgctggtggcaaggaacatcgtctcgatgccgggcatcagtgcgtggttcgtctgggcgagctgtatctcgttttcgaaatccgtcaccgcccgcaggccccgcaccatcaccgaagcgtggcgcttcttggcgaactccacggtcaggccgtcgaagctctccaccgtcacattcgggatgtccttgcagcattcccgcagcagcgccacccgttcttctacggtgaacagagggttctttgcgctgttgatgagcactgccacaatgagctggtcgtttatctttgcagctcgcttgatgatgtcgagatgtcctctcgtgaccgggtcgaaggacccggggtaaactgctgttgccatcggtatggtctcctttatttgcgcgctttggaaaagcgcatttggtgttgccatgatagcacttttcagtttctgcttcaagtaccagaccgcatcgccattgcaatatcgttaatttttagtcaatcaacgccgcactggggcgcatcatcttggtacacccttagtaaaccatatcgtcaaaattttatcaagtactttttcgaaaaaaattgtttttgctataccaaacaatcgccacaaatacctaagaaatttagtcaaattgtcctgcgaggcattttttcgcggaagagggcttgattataatgtttgttaatgttataactaagctgtgcaggtgtgccgctgccggaaactcctgccctgccgaccccaaggataccgccggggtgtgataagacagtgtccggactggaaagaaacggtaaatttccggctaagattttgtcccgtagaattgtgaataataaatttacaattcttttatgttcttaaaggagaggatggtttataatggatttcatggaaatgtatgcccagaaaaagatgactgccgagcaggctgcttctctggtcaagagcggcgactgggtggattacggctggtgcgtcaacacccccgtggccgtggacgccgcccttgccaagcgcctgcccgaactggagaacgtcaatttccgcggcggcatcctgatgtgggtgcctgagatcttccagatcgacgaccccgctgcccacatgacctggaacagctggcacatgggcggcatcgagcgcaaagccatcgcacagggcttctcgttctactcccccatccgctattcggagctgccccgctactaccgcgagagtcccgacccgctggacatcgccgtcttccaggtgactccgatggacgagcacggctacttcaacttcggccccagcgcttcccatctgggtgccgtctgtgagaaggccaagaagatcatcgtggaggtcaacaccaatatgccccgctgcctcggcggtatggagaactgtgtccatatctcccaggtcaccggcatcgtggagggcgacaatccgcccatcggccagatggccgctgccggccccgcttccgaggtcgatctgaaggtcgcaaacctcgtggtgccgcagatccccaacggtgcctgcctgcagctgggcatcggcggtatgcccaacgccatcggcagcctcatcgcccagagcgatttgaaggacctgggcgtccacaccgagatgtatgttgacgcttttgtggacatcgccaaggccggcaagatcaccggcgcacacaagcagctggacaagggccgtcaggtctacgccttcggtgccggcacccagaagatgtacgactacctcaacaacaaccccgagtgtatgtctgctcccgtcgattacaccaacgacatccgcagcatctccgcactggacaacttcatctccatcaacaatgcggtggacatcgacctgttcggccaggtgaatgcggagagcgccggcgtcaagcacatttccggtgcaggcggccagctggacttcgtgctgggcgcatacctttccaagggtggcaagagtttcctctgcctgtcctctaccttctttaataagaagaccggtcagctcgagagccgcatccgtcccacgctggaaaacggcagcatcatcaccgatacccgcgccaatctgcattacctctgcaccgaatacggctgcgtcaacctcaagggtctgaccacctgggagaaggccgaagccctcatcaatgtggcacaccccgacttccgcgaggagcttatcaaagaggccgagaagatgcacatctggcgccgcagcaacaaaatctaa

SEQ ID NO: 812 - DNA, 16124 bp, unidentified
  source 1..16124: mol_type = unassigned DNA
  misc_difference 12933: note = a, c, g, or t
  misc_difference 12934: note = a, c, g, or t
  misc_difference 12935: note = a, c, g, or t
  misc_difference 12936: note = a, c, g, or t
  misc_difference 12937: note = a, c, g, or t
  misc_difference 12938: note = a, c, g, or t
  misc_difference 12939: note = a, c, g, or t
  misc_difference 12940: note = a, c, g, or t
  misc_difference 12941: note = a, c, g, or t
  misc_difference 12942: note = a, c, g, or t
  misc_difference 12943: note = a, c, g, or t
  misc_difference 12944: note = a, c, g, or t
  misc_difference 12945: note = a, c, g, or t
  misc_difference 12946: note = a, c, g, or t
  misc_difference 12947: note = a, c, g, or t
  misc_difference 12948: note = a, c, g, or t
  misc_difference 12949: note = a, c, g, or t
  misc_difference 12950: note = a, c, g, or t
  misc_difference 12951: note = a, c, g, or t
  misc_difference 12952: note = a, c, g, or t
  misc_difference 12953: note = a, c, g, or t
  misc_difference 12954: note = a, c, g, or t
  misc_difference 12955: note = a, c, g, or t
  misc_difference 12956: note = a, c, g, or t
  misc_difference 12957: note = a, c, g, or t
  misc_difference 12958: note = a, c, g, or t
  misc_difference 12959: note = a, c, g, or t
  misc_difference 12960: note = a, c, g, or t
  misc_difference 12961: note = a, c, g, or t
  misc_difference 12962: note = a, c, g, or t
  misc_difference 12963: note = a, c, g, or t
  misc_difference 12964: note = a, c, g, or t
  misc_difference 12965: note = a, c, g, or t
  misc_difference 12966: note = a, c, g, or t
  misc_difference 12967: note = a, c, g, or t
  misc_difference 12968: note = a, c, g, or t
  misc_difference 12969: note = a, c, g, or t
  misc_difference 12970: note = a, c, g, or t
  misc_difference 12971: note = a, c, g, or t
  misc_difference 12972: note = a, c, g, or t
  misc_difference 12973: note = a, c, g, or t
  misc_difference 12974: note = a, c, g, or t
  misc_difference 12975: note = a, c, g, or t
  misc_difference 12976: note = a, c, g, or t
  misc_difference 12977: note = a, c, g, or t
  misc_difference 12978: note = a, c, g, or t
  misc_difference 12979: note = a, c, g, or t
  misc_difference 12980: note = a, c, g, or t
  misc_difference 12981: note = a, c, g, or t
  misc_difference 12982: note = a, c, g, or t
  misc_difference 12983: note = a, c, g, or t
  misc_difference 12984: note = a, c, g, or t
  misc_difference 12985: note = a, c, g, or t
  misc_difference 12986: note = a, c, g, or t
  misc_difference 12987: note = a, c, g, or t
  misc_difference 12988: note = a, c, g, or t
  misc_difference 12989: note = a, c, g, or t
  misc_difference 12990: note = a, c, g, or t
  misc_difference 12991: note = a, c, g, or t
  misc_difference 12992: note = a, c, g, or t
  misc_difference 12993: note = a, c, g, or t
  misc_difference 12994: note = a, c, g, or t
  misc_difference 12995: note = a, c, g, or t
  misc_difference 12996: note = a, c, g, or t
  misc_difference 12997: note = a, c, g, or t
  misc_difference 12998: note = a, c, g, or t
  misc_difference 12999: note = a, c, g, or t
  misc_difference 13000: note = a, c, g, or t
  misc_difference 13001: note = a, c, g, or t
  misc_difference 13002: note = a, c, g, or t
  misc_difference 13003: note = a, c, g, or t
  misc_difference 13004: note = a, c, g, or t
  misc_difference 13005: note = a, c, g, or t
  misc_difference 13006: note = a, c, g, or t
  misc_difference 13007: note = a, c, g, or t
  misc_difference 13008: note = a, c, g, or t
  misc_difference 13009: note = a, c, g, or t
  misc_difference 13010: note = a, c, g, or t
  misc_difference 13011: note = a, c, g, or t
  misc_difference 13012: note = a, c, g, or t
  misc_difference 13013: note = a, c, g, or t
  misc_difference 13014: note = a, c, g, or t
  misc_difference 13015: note = a, c, g, or t
  misc_difference 13016: note = a, c, g, or t
  misc_difference 13017: note = a, c, g, or t
  misc_difference 13018: note = a, c, g, or t
  misc_difference 13019: note = a, c, g, or t
  misc_difference 13020: note = a, c, g, or t
  misc_difference 13021: note = a, c, g, or t
  misc_difference 13022: note = a, c, g, or t
  misc_difference 13023: note = a, c, g, or t
  misc_difference 13024: note = a, c, g, or t
  misc_difference 13025: note = a, c, g, or t
  misc_difference 13026: note = a, c, g, or t
  misc_difference 13027: note = a, c, g, or t
  misc_difference 13028: note = a, c, g, or t
  misc_difference 13029: note = a, c, g, or t
  misc_difference 13030: note = a, c, g, or t
  misc_difference 13031: note = a, c, g, or t
  misc_difference 13032: note = a, c, g, or t
ttgaaacattttaatgcagtaactaaatacatagcgttggcactcattgtctgcctgactttcatatccgttacatcacctgtatattcacttgctgataccaagacagaatatgatgataataacaaagaacttgaacgcttaagaaatgagcagtcgcagctctcaagtgaacttaacgaccttaattcagagcttgataatgctggtgaaaagctgaactctattaatgacagaattgctgatacacaggaacagattgacagccttaatgaagacataagcaatatggagattgagaaacaacaccagttcgatactatgaagcttcgtatacaatatatgtacgagaacagcgactatagttttcttgatgtattgctttcttcttcaagtatggctgatttattgcaaagaaacgaatatgtttctcgcatttcccaatatgaccgcaaaatgcttgaagaattaagttctcttattgctgtgcttaaccagaaccagctaagtctacagactaatatgacagaacttgtgtctttaaaagagcagtcaatagctgagtctaataatattaaaaggcttatagcttcaaagcagtcaaaaatagatactaactctgaaaatattgccaaagctgaagcccttgcattagaatacgaggaacgtatccgtcaggaagaaatccaaagacagcttgaagaaatcaaaaaaatgaccccatcagttgatgaagtcattaataatacacctatagcatatgatacaagcgaccttgcaatggtatccgctatgatagaatgtgaagctgccaaccagccttatgagggcaagcttgccgttggaagcgttatcgtaaatcgtgtaaacagtcctaaatttggcaacacaatccaatccgtactctacgccccttcccagttcagccctgtcgcaagtggacgtttcgcaattgtccttgccagaggtgctaacgctgaatgtaccagagccgctaatgaagttctcaatggtcatataacaatcgctgccctgtactttcacgtctacgacagcactgtcgataaaggcggcacaataataggcgaccatgtcttctattagctaaccatctcctgccaaaaaggcaccactgtaagggtcaggctgcattaaatcaacataagcttgtctttgctgcttatgttgatttaatctaattgtctgtcctatctagcctatccactcaccaaacttattaagcccttccgaactacctgaaagatacaatatatccccatttctaaacacatactctggatttacaacctgcataacttccccattattctcaattgcaattatattaacattaaatttcttacgcatattaatatccacaactgttttcccctcaagcctgtcaggaagcataaccttagatatattaattttctcactaagctgaatgacatctataacctgcgaagctataagacggttagcaagtctttctgccatatccttctcaggatatacaacttctgccccaagcttagccaatatttctccgtgttcaagacctcttgctttcgctataaccttttttattcccatactgacaagattaagcgttgtaagaattgacgtatcaatatgttcacctatacacacaactgcaacatcacaattctgtattcctgttgcgctaaggcttttcttgtcaagtgtctgcacgacataggcattttccgtataatcgcgcatttctcttaccttttcctcatctttgtctataaccataaattcagcaccgctgttagcaagcgataatgcaagcgactcgccaaatcttcctaaacctataattccataagtagtatttttatttgatattctagttttaaacataattacctccgaattcacatattattgttgggtgtgtattgatgattgggtgttggctaacggacgttgtgagtgcggactatattaccgctgggcacgctttcgctacttgaaaccgcagcggacaccaagccagcacatcaatactctctccacatacattcacacaccatattttatatatatatcataatacacaaacaataacatatatcatatcttttatataataagttataagccctaacatatatattatatcttctatataattaaattaaaaaccataacatatatatcgtatcttatataccataacttaatgccataacaaaaacgacaccatcaccaaaaaatccacactcaaaaccacacccgaattcttcacactccgttctggcgctgataattgttaaacatatggcaatcgcaacccagctgggcggctggtagaagcataagaagacgatggggagccgccggcacttaagcgctgtcctttagcgctttagtaccgctgcgagcgacactcagtgcaaacgtgtcttcgttgcttctaccagccgcccagcgtccgttgccccatatatttcacaatcatcaccctatagttatattaccctccggataattaatcctctctcccttagagaaatgccacaatgtagcaatcgtaagcggtccaagtcttcctatgtacataataacaatagataacagctttcctgcaattcctatctgttgtgtaattcctgttgaaagccctgccgttccaaatgcacttgcgacctcaaataatatatcaataaaatcaatatccggctcaaatattcccataagataagctcccacggtcacaacacacatagcaagtatcataataaccgaagcctttctgaacgcttccttaggtactgcataatgaaatgctttctccgacttattagttgctgccgacttaacaccctgtatgaggacaaaaaatgtgcttgtctttattccacctcctgtagatcccggcgaagctcctataatcataagtattataatcacaagtagtcccgattttgaaaatgtcccaagtgaatatgttgcaaatccagccgttctggctgatacactcataaagaatgctcccatccacgagatattttctgtaatcttaagaagcagagcaccagcgataataagcacaatactcactgatattacaatccttgtgtgcattgagaatttcttccacttaaatctcttttcccacaattcacatattacaaaaaagccaatacctccaaaaaatacaagcgtacaggttataatattaagtgctatattaccactgtaattaataaggttctggttatttccaagaatatcaaaaccagaattattaaacgccgctaccgaatgaaacacgcttattcccaatgccctaaaaaatggataatctcttataaacaccagaaaacctgctattgcaccagccccctcaaatataagcgtaacaataaatatcttatgtataagccttacaagcccctttgccgtatccatattcagtgcttcctttaaaagagtacgtccttttatatctacctttttacccataacaagtattattccggcacccatagttgtcacaccaagaccacctatctgaataagtgcccctagtataaattgccccacaggtgtaaatgtgtcatatgagtcaaccaccacaagccccgttacacatactgcactcgttgatgtatacaaagcatccgtgtattttaaatcaacaccatccctaacactaaacggcaaagacaaaagcactgaccctgctataatcacaaatataaacccaaacgctattattcttgcaggcgactgctttcttattaaattaaccatcatagtacttccttaaatcgcaatatttatactcaaatctcataaaatttatcatttaagatactatataccaccctgctctccaatgcaagcaaaatcctcataaatattctaatgtcagcttccaaaccttcccacaaaaaagtgtgcactccgccactacagcaaaatacacactcttcataactatttaattaaacatctccaacaactaaaataactcctgccatacatcctatgtcccagccatatgtggagccgccggcacttaagtgctgtactttagcactttagtaccgctgatagcgacactcagcgaaagcatatctttgttacttatgttaatttaatccaatctcccgttgtctatacatctatatctgatataatcaaccgtcacaaatccatccccctgattctcattcttaatctcattattatgattaacaaacattccattcttaacgccaacccagcgtcctgcctttgctgtaaagctcacctgcttctcataagcctttccatcaaagcttatctccaaagtcacctcttctacaggaacatttttaacagccagtgccatttccttggtatccttagttcctgttctcttaactgtataccttaaatatacagtcttttccttatcagcaaatgtatccttagctataggatagtccttaaaatcttccttagaatatgccgcctcacaatcaaagctctgggtgcctctgactgtccttattgcatattccccgaaattcttgacaattccaactgctccatattccacgcctaatgacacaattccggcatagtctccattttcaagaccattcacgcacattttagtaacacactcaaattcaggtgcaggccacttctgtaagagaagatttctgtaatcgctcactggtctaagaggtgttgatgcaagtgcattaagtcttatatatgagccgtctggtgttttctttccataggcatctgtcttagtcacataccagctgtcatcataattagaattccactgccactgtaacatcatcttgtcggtatcaaattcatctgttgtgtctggctcacatactggatatttatctgtgtccttaaactcctctgctgtctttccaatattgggctttacatattgcataactggttcaccgtaatcattgccctctttattaacaccaattattggccagtcattttcccaatgcattggctgtaaatgtgttattctgcctgcggcatacacatcttgaaaatgtaagaaccagtcctcaccagtaattgtatctacccacgcaccctgatgaggtccgttgactggagagtcaccctgtcttaatacaaccttatattcatatggtccaaatggatttttggaacggagtattgtctgccagccggtcttaacaccgcctgctggtgcaaatatataataatatccgttacgtttatacattttaggtccttctattgttatctgatcattctcattaccatcaaatatctttacttcatctccaaatatccccataccgtctggtctcattcttactatatgaagaacactcttatatccaattctgctctttgcaacacctgccacaagataagcattaccgtcatcatcccagaatggacaagggtcaatccagcctgcacctggtcttatattaacaggctcgctccattcaccaaacggatctttggttgttgtcatatatattccctcatctggcattggaaaacatacataatatgtaccctcgtggtatcttatagatggtgcccacacaccacatccgtgcagcggattgttatatctgaattccggaatgtgtttcaagcaataattaacaaccttccaattcactaaatcttttgaatgtaatattggaagtgctggcgaattagaaaagcttgatgctaccataaaataatcttctcccactcttatagcatcagggtcagaataatctgcataaagtatcggattcctataatttccattgcccaaatcagctaaccacataaacattacctccataatcatacataatatttcttaagttaatctaagtttacatcattacaagtaatttgccaacactttcataaagtaattttataaaagtgtttttacataagtattttttattataggtgcctatatttgcactgcagtacgaacctgtatataggactttttatgtataatgaattaaattaattagatttccctattacataaaaagcctgccagtatcacatcttacaatatatcacataattgtgatacaatcataaaacccgatacaagcaggcttacatattattctatttattgaaatctttttctattttcttaagtgtttcaagtggaatataataacttattccaagtggattaaatattgctcctgaagctccaagctcgtctatagcctcaacaagttccttatatgtatagagcatattctcatactgtcccttatagcatttgtccatctcaaaaccatctgtaaatgccggtattgctataacctgctcatcttccttatgctcaagcctgtctgtaacatcaataaaatgatgtgctatagatacttcttcctctgtctcctccttaacacatggaaccatatattcagaattaaccatagcatttaacatagcattttctctcttatcaagaagctcttttattgtatctttgtctgtattctttctgaactcctgaaaataagaaatcattgtattctgtaaacctgggttagtcacataatcatccctaaagaactcatcatatgttccaaatgcttctcttggtattacatattcaagcttgtcgccatctgtaagtcttatattcttatatccattacgatacatatggcataactccatagcaaacgcatcattattctcaacaccaactgatacctcgtaaccactgagcttaagctttttctcaataagtgaagaattcttaggattaaaaagaacaaataaatcactgtctaccatatatgggtacgatgttgtacttgaatatacaacccataaatgttcctcttttcttaatttatcagctataacctttgcatatatctcttcaattcttccaaaatatgctaaatcgttagtattgcccatctccttggctcttttctttaaagatggcagtacaacagccataacctctactgcatcagctaaagaaagcttctccatcatatctacgccgtagtcttcatctttgctgatatgtcttattacgtcctgtatttttgtctgattcataatatatataccctttccgaattgcatcatatgtataatagtaacatatttgtgtacaattatcaattcaactttatttaatgattcaactcacaaaatctttactctgttttatttaattcagctgccctgatataactgcacgaattatgtaatataccgcatctgcaaattgcactgccacattacagcttcacaactgccattaattaaagaactcctgccagtcagttatattcttatctgtaagacataacattgccattattcttgcctgccagcttgtcattgtctgtgctgtgatgacatttaaaccatcagccgcatagtcatattcactgccagaattattaacaacaattaccttaatataacctgatacatcttttacaagctgtgtcattgctggcgacagacttccgtcagcagtatcgctgactactactacagactcatatgaagccattattttctgtgctgtatacacatcattgcctatataatcattaaccataccgacatagcccatatccttaatccctgtcacgtcaaaatgatgttttgcactatcattaaccttattcgctttattatcaacaatatcagctatttctgtcttataattgttattatcttcctcaacaacatatatactcttatctgtatctattgtataagtaagaaaatatctaatctggtctgcaaatcttttcctcgccgatacgataactatatccgcatcaccactacatatttcctggactttagaagccaatgatattaaatcctttgtttcatcaaaatctttattttcctgaattaattcaatatctattttattctcataatctgctgtattaacaagctcactcacacttccatatgtcccaacaatacaagcctttctcttaccactggtctggttattaccattactattgtcgctgccattaacaatacttccggcatcagagctgttatctttcataccgcccgcattatttccactattatctgttatcttatcagtgttatcgctaaccgtaccattctcattatctgcctggctcatatattcaaccgggttagacacaaagccacagcctgcaagtgaagttacaccaagcataacagctgccgctattgacactgcattttttaacttcaatttattctttagattaataagcgtatcacttatattcaataatctcatatattctcctttttgccctgattatcaaatatattattcaggacatattaagcattttaacataatccccctgattataaaagtcccccaaaagcttttaaggcacattcgccttacttagcttctggaggactataatattaattataaaatgtattatataaacattatatcactctgcataattatgccgtctatattaatgcaattaacctctgttatcaattgtagcaatatctactattgaaagttcctgattattaaatgcatgctcaagacttgagataagtgcgtgagctgtatcaagacttgtaaggcagtgaacgcctgtctcgatagcatatcttcttataaggaaaccatcctttgctctctcaataccattttctggtgtatcaataacaagatcaatcttatgctctaatataaggtcaaggagtgttggagcttcctgtccaatcttattaacctgaatagcgtgtacgccattttctttaagaaccttagctgtacctcttgaagcatatatcttgtatccaagtgcttcaaatctctgtgctatatcaataccgtcctgcttatccttatctgcaagagtcataataatctgcttatgctttggaagtcttattccagctccctcaaatgccttgtaaagtgcttcatcaaagctcttagatataccaaggcactcacctgtagacttcatttctggtccaaggcttatatcagcacctctgatcttctcgaacgagaatactggcatcttgattgcatagtaatcagcagccttctgaagacctggctcataacctaaatctcttatcttagctcctgtaataaccttagttgcaagcttaacaataggaataccagtaaccttgctgatatatggtactgtacggcttgaacgtggatttacttcaattacatatacctgatcgttgtatacaataaactggatattaatcataccctttacatgaagtgctctcgcaagtcttcctgtgtaatcagcaatcatttcagttatctttggagagattgacttagctggatatactgaaatactatctccagaatgaataccagctctttcaatgtgttccataataccaggaataagaatatcttcgccatcgcatacggcatccacttcaatttccttacccataaggtacttatctacaaggattgggtgatcctgcttaattctgttgataattcccataaattccactacatcttcatcagatacagcaatctgcataccttgtccaccaagtacatatgaaggacgtacaagaacaggataaccaagttcattagcagctttaagggcttcctcaacagtgaatactgtctgtccttttgctctaggaatctgtgtcttttcaagaatctcatcaaataactctctatcctcagcagcatctacatcttctgccttagttccaagaattggcacacccatcttcataagagcttctgtaagcttgatagctgtctgtccaccaaactgaactacagctccatccggcttctcgaattctacaatactttcaacatcttcttctgtaagtggctcaaagtaaagcttatcagcaatatcaaagtctgttgatactgtttctgggttattattgataataattgtctcataaccctctttcttaaatgcccatgtacaatgtactgaacagaaatcgaattcaataccctgtccaattcttattggacctgaaccaagtacaagaactttcttcttatccttagtctctgcagcttcattctcactgccatatactgaatagtaatacggagttgtggctgcgaactcagcggcacaagtatcaaccatcttaaatgctgcgtgaatatcatacttatcacgaagttcttttatttctctttctgtatgtcctgtaagttctccaataacattatcagggaactcaattctcttagcctctcttaataattcttctgtaagaggacctttctttaaagaattctccatctcaacgataatctgaagcttatctataaaccatctgtcaatctttgttatgtcatgcataactgctggctctatgcctcttcttaagccttctgctatcttccagattcttctgtcatcaactacagcaagatcttctaaaagttcctcatctgtaagtcctgtaaaatcgtatgacataaggctgtcaacatgctgttcaagtgaacgtatagccttcataagaccaccctcgaagttatcagatatactcataacctcaccagtagccttcatctgtgttgtaagtgttctctttgcagagataaacttatcaaatggaagtctaggtatcttaactacacagtagtcaagtgctggctcaaagcttgcatatgtctttcctgtaactgcattcttaatctcatcaagtgtataaccaagtgcaatcttagctgcaaccttggcaatcggataacctgtagccttagaagcaagtgctgaagaacggcttacacgagggttaacctcgataacgcaatactcaaagctgtctggatgaagtgcatactgtacattacatccacctgtgataccaagctcatctataatgttaagggcagatgttctaagcatctgatattccttatctgaaagtgtctgtgaaggagcaactacgatactatcacccgtatgtacaccaacaggatcgatattctccatattacatatagttatgcatgttccgttgctgtcacgcattacctcatattcgatttccttccagccagatatacatctttcaacaagaacttcaccaactcttgaaagtcttaaaccattctcaagaatctctcttaattcttctacgttatgggcgataccaccgccgcttccaccaagtgtgtaagcaggacgaagaacaaccggataaccaatcttagctgcaaatgcttcaccagatggaacatcattaacaactaatgaaggtgcacaaggttcacctatcttttccatagtttccttgaacataagtctgtcttctgccttcttaattgtaagtgcagttgtacctataagctgtacattattctcttcaaggaaacctgtctctgctatctccatagcaaggttaagaccagcctgtccaccaagtgtaggtaagatgctgtctggcttttcctttaatataatctgctttaatgcttctacagtaagaggttcaatatatacttcatcagcaatatccttatctgtcatgatagtcgctgggttagagttaacgaggcatacttctattccctcttccttaagagaacggcaagcctgtgtacctgcatagtcaaattctgctgcctgtccgattacgattggacctgaaccgattactaaaaccttctttatattaggattctttggcattgtcttagtcctccttcttcatcatatccataaatctgtcaaaaagatacgctgtatcctgtggtcctgcacaagcttccggatggaactgtacagtaaatatattcttacccttataagatagaccttcattagtcttatcattaacattttcaaatgctggttctgcaacctctggattaagtgttgcttcatctacaacataaccatgattctgtgttgatatatatacctttccagtagcaagatccttaactgggtggttagcacctctgtgtccatactttaatctgtgtgtatcagcacctgtcgcaagagacataagctgatgtccaagacatatggcaaatataggcacattgcttgcataaagcttctttatctcttctattatctctacacattccttaggatctccaggaccatttgataacataataccatctggattagaagctaagatttcctctgccttagtatacgctggatatactgtaacctcacagcctctgtcattaagagacttagcaatattcttcttagcaccaaagtccataagtgcaactcttggtccatctccgttaagtacatacttttccttgcatgtaacctttcttacaactcccgcaaccttgtattccttaatcttaggaagtacttcatcaagattatagttttcgttagttgtaatcattccgttcatagtacccttttctcttaatatcttagtaagggctcttgtatctattccacagatacctggtatatcattatctaaaaggaacttctgtataggagcttcatttctgaagttacttggcatccttgataattctctcacaataaatccatctggccatgctttttcagactccatatctttatagcatatgccatagttgccaatcagaggatatgtcattgtaactgcctgtcctgcatatgaaggatcagttaacacctccagatatcctgtcatcgaagtattaaaaactatttcgctaatgacttcgcgagtggaaccaatacttgttcccttaaatactgttccatcttcaagtattaaaaatgctttcatgaatgccacctattccctttcgtatattaaattgattatagtgcgcaaaccacaactgttaatagtctttatatagtttcaattgacttttgcgcaaaaaaaaagacacaaaannnnnnnnnnnnnnnnnnnnnnnnnnnnnnnnnnnnnnnnnnnnnnnnnnnnnnnnnnnnnnnnnnnnnnnnnnnnnnnnnnnnnnnnnnnnnnnnnnnnttaatagtctttatatagtttcaattgacttttgcgcaaaaaaaaagacacaaaaatgtctttttttcttaaactctataaatattatcatataatgaataataattcaagcaaaaagtcaattatgcttattattattctgcgtaatctcaagctgccttacgaacacccatgtatcacctttatcagatgactgatacttagccgccgtctttccatcattataagttccatcagaaccctgtgtaagatatacagttataatacctttatcatcaactgtaggaactaacgcttccttgtatacatcattccattttaactcatcatctgctaccgtgcttgaagccgttgatgacttagctgtactgtcaagctcctgttctggaagtgtcactttagaaaatgtcttgccgccatctttagtcatataaagattgccgtccattccttctgcataattgtagcagaaaaatccaacattttcgtccacatacataacaccttttaatatataattagcaggaccgcttccaactgttgtccacgtctcgccaccattagctgtctggtatatcctgtaagactccttttcattatcagtcctggcataaccacatacaataacacccttattctcatcaaagaaatcaacatagtaatcttctgcgttatatatattatcaagttcacagctggtccagttaacacctttatcatcagaatatataagagttaccggtactttcttagaacttcccatcctgccgccaaataaaaatgcagtctttgatgtagttataagataacttccatccttcaacgtgcttgtacttccgctttcatacataagattttcaacatctactggaacagttgcataatgctcaccatcatcataagttacactcaatatatcatctcttataacatatcttgcaagcaggtctgtagaagcattggtcttgttctcgctatctgctgccagggctgccttctcattgtactgtgctattccgtattcttccggacttaatgctgatgtaacatacaccgtagcagtgttgtcagtatgtgcatcaatatagtaagatacaacccactcacatttcaatctgtcatcatcagtaactccgtcccacgaaagaaaataatcagaagcagcatttttaagaattaccgaaaaacttattaacgctgtatgttcatcttcattcaatacattaatatcatctattgtcatcctcttaactgacttattatacggaagatactcattcatatactgattaacatactcattaagccacgtcctggccactgtttctgtcttaacctgtgatacatcaggcatcgtatttatgacattagaatcatcatatgtagctgcccttgtctgatactgctcatcaataacatccccgtaagcatctatatccaccgtgaaagtataccttgacttaatatcaagattactttccttgcttctgtaataatacgaacgtatgaatacagctataacaaaagcacaaagaatccctatacatacccttaatgtaatcaatcttaacttttctctgttctttttcttcatattcgttctccatcatcctaatcagctctcgtgttttaaatgcatagcctctctgacaatctttctgtaatacttataccaccataagaaatacattgcaccagctcctgcaaggaaaaataccagcaccacaaaaggatgtactgcatagagccagttatgggaaagtcgtctcacaaaaaatggcacaccatacgcaagtaaaacacataccgccataacagttccattaaacacacttctattctcatatacccatataaaatgatcaaaagacataatcgcaaacatctcgcctataggtcttacgcatattgtaagcatacagagcataagcgaatgaaaccacgaaacgccgaatatattaagaataataaaataaaatatgaattcagcagccatcttataaagaagctttcctaaaaaattcatatatggacttattgacataactcttatcataaggtaatccctgtcacctatagtaaataatatgttgttagaaagacttccgcatataaccgaaagcataacaaacatatatataattgtaagctcctgattggccttaatcaatggacactcaagacctataagcacatatggtatatatataagaataaatacatatgcaaacttctttataaattcccataaaaccataaataactgtgccataattccaacaaataatctcgccttggaattctctgcaaatgtattctctttaacacatctgcctataagtggtgcattacttatatatcttatacctgcattagtaccctcataaaaccttaaaatcttctcagcaaacagcttcctaaataatctcattgtctgtctcccctaatatatctaaaactgccttccttatctctggaatttccatagtctttttatctatgtgattaaattctccgttatttaagactagcgtatcctcacttatcctcttggaaatctctagaagtcctgttgagataagtattatcctgccttcttttattgtattaataacttcgttaaacttattaatgtattcttcactgcaataatcaagtggctcatcaaaaagcacaacataaggtcttattacaagaatacaggcaagctgtaaaagcttcttctcctcaaatgtataatccgctataagctcatctctcttggcaacactgaacccaattctatcaaatatatcctctggctcagggtcgtctctctccatatcacaaagcatacttataaactcataacctgttatgtatacaggaagaacactctgctttgccgcataaaaatatttacacttatcaattgtaactatgcttccgtcatcaacagatatatctccacatatacactcaaataatgttgttcttccagctcccggtccaccaagtataggatatatctgtccctcctcaaatgtaaaggatatatctgtaagaacttcattcttcttatagctcttttttatatggcttaatttaagcat

SEQ ID NO: 813 - DNA, 12198 bp, unidentified
  source 1..12198: mol_type = unassigned DNA
gagcaggagctgctggacaagccccgcgataccgttatcatccatatgtatctggagccgggcgcttcccccgtggaaacgctggccctcattgccgcccgcatggaagctgcaaacatcgcctacaccgtagagaccgagggcgtggagcaggaggactggcagaacggctggcgcaagtattatcaccccctggaaatcggcaaacgtctggcggtggtgccctcgtggcagcagtacgacaccgaccgggtaaagctgatccttgacccgggccttgccttcggcaccggcggccacgagaccaccagcttgtgcatggaagcgctggacgagcgggtgaccggcggcgagcgggtgctggacatcggcaccggcagcggcatccttgccattgcggcgctgaagctgggcgctgccgtggccgagggcgtggacatcgaccctgtggccgtgcgcaccgcaggcgagaacgccgcgttgaacggcgtgcaggacaagctgaccgtgctggtgggcgacctttccgataaggccagcggcaaatacgatatcatcaccgccaacatcgtggccaacgccattctcagtctggcaccggctgtgccgggcctgatggcggagggtgccacctttattgccagcggcatcatcgacagccgcaaggacgaagtgatcgccgggctggaaaaggccggccttgccgttgtggaagtgaaggagaagcgcggctgggagtgcatcgtctgcaagaaagcgtaaggagattttatgccgcaccgttattttaccaccgagatctctgacggcaccgccaccctgcgcggggccgatgcccaccatcttgcccgcgtgatgcgcgcaaggctgggcgatactgtcattctatgcgacggcaatgccgtggaatacaccgccaccatcaccggctttggcgatgagtgtgtggagttccgggtggagccgggctatcccagcgccgccgaacccagcgtggaggtcactctgctggctggttatcccaaacaggacaagcttgagcagatcatcaagcacggcgtggagctgggcgcagcccacatcgtgcccttcttcagccggtattgcgtggcggcccccaaaaaagaggagcagaagaacgagcgctacaaccgcattgcggtggaagccgccaagcagtgcggccggggcattctgccggatgtggccctgccgctgccaaacttcggggccgtgtgccgcacctttgcacagtacgaccttgtgctgttctgctacgagtgcggcggcgcgcccctgcgcgacctgctggccgcagcaaagcccgccgatggtgaaaagctgaaaatcgccatcgtgactggtgccgagggcggctttgccgccgaggaagccgagatggccgcaaaggccggtgccagaacggtgggccttggcccccgcatcctgcggtgcgagaccgccccgctggccgtgcttgcttcggtaatgaccctgacggggaatctggaataacaaaaaagcagctgcaatgcagctgcttttttgttattttcagggtttatgtttctgcttccagcagagctttcttcacgttcaaaaggttctgcgggctcaccgagaagctgcgcaggcccagctgcaaatactgcaccgtgttggccgggttgcccaccgcaaggccgcagatggtcaccggcacattgcgcacctttgcggcattcagcaccatagtgatgagctttttcatggccttgctggccgggcggtagtagtgctcggcgctggcaagctcccggtctgccgcgtgggtgtactgggtcaggtcgttggtgccgaccacaagaaaatcgaccccgtgctctacaaattcctcagcggtcaggcaggcagcgggtacgctgagcatcacgccgaactttgtatcttcgttgaacgccacgccccgctcccgcaggtgctcgcggcagcgctccaccacacgcatggctgcgtcccagtcctccacattcgtcaccatggggaacatcacccgcagcgggccgcgggcggcggcgcgcagcagcgcacagagctgcgtctcgaactggtggggctggcgcagactgttgcggatgccccgcaggccaagcttggaagactgcaggccctgataggcgtcggaaatggtgcggtctgagccaaagtcgaaggtgcgcaccgttaccgggcagcccttggcggcagcaagacaggagcagtagaagaaatactgttcctgctcgtccagaatgcggcccggcagcatcatgtagccggtgcgcagcaggcccacgccctgtgcaccggactgcatggccgtgtcgatgtcctccggcccaaagcagttggccagcagctcaaagggctggccgtcctttgtcctgctgggcagagcatgcagctgccccatctcttcgttctcccgctgcagctcgcagatgcgggtctcggcctgctggcgggcggcagcgtccgggtccagcgtgcactggcccccggtggcatccagaatcacggtacggccgtcgcagtcgtccagaaaatcccggcccacctgcacgatgcccgggatattcattgcccgggcaatgatggccgcgtggctctggccgctgccctctgccgtgatgatgcctaaaatcatgccggagggcacgctgaacaggtcggtgggcatcagccgctctgcggcaaggatcaccgggtgatccagcgccagccacatgcgggggcggttggtgatgatgttgatgacccggcggcttgcgtcgaggatatccacactgcgcagctgcatgtaggggttatccttcatgttggccagctggtcggcgtagcgctggcccacctgattcatggccgctgccgcgccaatgcctgcattgatgcagaagcgcacctcgttcatcatgccctcgtcgtccagcatcatgctctggaactggaagatggcctgttcgctgggtgcggcgcggtctgccatggattccagctcgtcctgcgccgtgcggatggcatcggtgagcagctgcagctcccgggacggtttaaaggggcccacggtcgtggtctccacatggtgctccagacggctcacctgccccagcacaaggccgggagaagcgcaggaacctttatacactttcatgttcggtcacctccggcaaaagctcggcttccggcgtggtcagggtgcgccagaccagcgcctgcaaaaaggtattgggcagcagcgcggccagtgcggcccgcgccgcatcggcactgccctcaaacagcggtgcaaagctctgcatccgtgcctgatcgcactttgcaaggaatgcatcgcacaaagtatgggtggtgtagtaatgggccggatccacaccagcatcttccgcggcggcttccagcggggcaaggtcggcatccttcatcttggccagcagcagggccgcatccgccgtcagggtgaccgggtatttctcccgcacggccttttgcacccgctcaaattttgcgtggaacgcagcagcgtccgtgcagctctgggcatcacaggagacagcataggcacacccccgcagatatcccatagcgcggcgggtatcatagtagcccagctcgatgttgcggcgggcggtgtcggggtcaaagtgcaggatatcgcccagctcccagtagctgcgcaccatcacggtgggcaggccggtgaggttggggcgggtgatgcccacgccttccagatcgacgcacaccagttcatccgcgcccatgcgtttggcaagaccggtgggcatgttgtcgctgtagccgccatccagaaacttgaccccgtcgatctcccgcgcacgcagcgccgggaagcaggcagcggaggccatcaggtagtccttgacctttcctgccgggatctcgtccagcgtcagctcccggggctttaagccccgctgctccaccgtgacaaggccgaagcggatgggagccgcgcgcagggcatcctcgtccagcacccgctccacgatctcttccagcggggtcacatccatgccgccggctttcaccacgctgcgcaggaactggtgcagggccgaaaggtcggcatcctcctccggcagctccatcacatccttgctgcggatggccagccacatatcgcgggccgtctcgtactggtccagcacgaacatggcaccgttcaggctgccaacgctggtgccggtaatgatctgcgggtgccagtccagctccatcagcgcgcgccacacacccacctgatagctgcccctggctccgccgcccgccagcaccagagctttgcacggagcactgcgttcatccattgcatccgcctcctttgatcgtttccggttttgttcagattatagcatatttccagagaaatttcttccgttttttgtaaattgatgcctttctcccggcaaagaaacatggtatacttgtcaggatttcaaaaggaggcattctcatgcactgcaagcaatggatctttgatatggacggcaccctgaccgacagcatgaccgtggtgtgggagggtgcccccgacgcactgctgcgccgctatggccgcaccccgcggggggatctgcgcgccacactgctgaacatgggaatgcaggagggcgcacagtatctgatccgggagtacggcctgccgctgaccgaggaaagctatttttccgtgatgcgcgaggtgatcgccgaattgtacgagaccgtggagctgaaacccggcgtgcgcacgatgctggcaaagctgcaggccgagggcgcacgcatgtgcatctgctccaacacctgggccgaacagtgccgcaccgtgcttacccggcttggcatcgcgcagtatttctccttcatcgtggaagcgcggggcgtgctgcacaaaagccacccggaggtgttctttgagtgcatgagccgtctgggcggtgcagatcccgccgcctgcgccgtgtgcgaggatgccgtatacgccgccgccaccgcccacaaggccgggtattacgtcattggcatcgcagaccgcacctctgccgccgacgagctggagatgcgccgcatctgcagccagttcgtgccccggtgggatgcgctggactggacacgtgtgtaagaaaaaagggccgcagcgtgcggttcttttctttatctgatccttctttgctcttgcattttgtgcgcaagaagagtatgatattataaataggactgccccaagggggaagtgtccttatttgtgagaatacactctgtgatttttaatataaaggtataatatccgtaaagaggagaccttccgtcatgaacaacccactcgtcagcattatcgtgcctgtgtacaacgtgcagaatagtgttgcccgctgtctggagagcatttgtgcccagacatggaaggatatcgaggtcattctggtcaacgacgggtcccgggacgaaagcttttccatctgtgagcaattccgtgaaaaggacccccgcatcgttctggtggacaaatccaattccggtgtgtcggagacccgcaactgcggcatgtcccttgcaaggggcaagtatgtgcagtttgtggacagcgacgattatctcgaccctgattttaccgagcggctggtgactgccgccgaagcgaacaacgccgatctggtcattgcaccttactggatggtgattcccgccaactcttccaaggccacgcaggcactggaaaacctgcaggagaaccttggcatcgatgccgagaaaaagcccgatgatatccgtgaatacggcttcctgcccgagggcatctacgaccgcgatacctttgccctgcgcctgatggagaagcccgcatccttcttctacagcgtgctgtggaacaagctctaccgccgggatattctggcagaccatcatcttcagttcaccagcgaggtgcgctgggccgaagatctggttttcaatctggaatacattttgtacgccaatgttttcgtatccatttccaaagcgggctaccactatgtgcagaacccccagagcatctgccacacccagatcaatctggcttccatcgtgcagaacaaactgcaggtgttccgctattacaaggagctgtacacaaagctgggcctgtacgatcaggtgcagccgcagctgtataaattcctgaccgcgttctccgagaacgcctatccctccggttctccccagaagatcatcatggacatggccaaccgctggggctttggtgttctggatgcttccgacaaggaaaagaaacacaaaaccgaacccgatgcctgacctccgggcacgaaaaaaagagccgtgaaagcggctcttttttgtttgccattttaccggtcgatccagctgcggaaggcttcgcgcactgcgccctcccgtccgcgcgggatggggatgcgcgcaccgctgcacatctgcagctcgcccgccgtcagcagctgtgccgccgccagattgaccacataggagcggtgcggctgcaaaaaacgcccgtcttccagcagcggctttgctacctcggcaaaggacacccgcagcgaaagggacaccacatcctcgccgctgagcagatggaagtgcaccacatggtgggtgcactccagatattcgatctgcgcataggccagcgcccgcaggccttcggcggtgacaacggtcattgccgggccgtactccggctcggtggcgcgggcaagcagggccgaaagctcctgctggtgcaccggcagaagcagatactgcatggcatccacccggaaagcgctgtaggcgtgggccggtgtgcgggccgcaaaggccagcggagccctgcggccccggcggcgcagctccgcagccgccgaaagccctgccggggccgctacagcgcccagctcgatgagatacaggtcaaaccgttctccctcggtgtcccggcgcagcagcgcatctgcatccggcagctgctgcacgatgcacgcatcctgccgccgggcaaaatattccatgcactggcgttccagcccgctgcgcaaggccgcgtccgggctgcataccgcaatgtgaaataccatctcacattctcctttccgccagccgcccgccttgatttttgcgcagggctggagtatgataaataaaactttgctgcatcgaaaaaagaaaaaacggagggacccgccatgccgcagccacttgtcagcgttattgtgcccgcctataacacggcgggcttcatctcccgctgtgtggagagcatcacatcccagagctacccggagcttgagatccttctgctgaacgacggctccaccgacgacacccttgctgtctgccggaagcttgctgccgccgacagccgcatccgtgtggtggacaagcccaacaccggcgcagcagacacccgcagctgcggccttgcccttgcccacggcgaatacatccagtttgcggacagcgacgatcacctgctgccgggctgcaccgcaaacctggtggctgctatgcagcgcagccatgccgaccttgtgctggctccctaccggatgatggtgccccgcaaggatggcggctatgacacccgggagtacagcctgctgcccgccggggtgtacaacaaggtggattacctgtggcagctcactggcaatgccgctgccttttactacggcgtgctctggaacaagctctaccgccgggatctcatccagatggcgcacatccggttcgagcatgtggtatacgccgaggaccagctgttcaacacccggtatctgcaggtggcacagcggtttgccgccatcgacgaagccgcctactgctacatccagaacccgcagagcgtatgccatacgcaggtgagcgcggcggacatgctgcgccaccgcagccggatgtaccacacctataaggaactgtgcatccagctgggcgtgtacgataaattccgcctgcggctgcacggcatctatctgagcctgtttgaaagccctctgcccaacggcccggtgcagaagctttccgacgcatttgcccgcacccacagccgcatctgagaaaaggagaacctatggaatttccccttgtaagcatcatcgtgcccatgtacaacactgccgggtgcattgcccgctgtgtcaaaagcatctgcgcccagacttataaaagcattgagatcctgctgctgaacgatggctccaccgacgacacccttgccgtctgccgcgcccttgccgccagcgaccaccgcattgcactggtggataaaaccaacaccggcgcagcggatacccgcaatcagggcattgcgctggcccacggcaaatacatccagtttgtggacagcgacgactggctggcccccgattttacggaaaagctggtctccgccgccgaggcccacaccgccgatcttgtgatcgcgcccttctggatggtgtacccggaaaactatgtggagcacatccgcccatgggaaaaggcgctgcagcatgtgctccagcgcaatccgccccgcacccaggcctatggctatctgcctgccggggtgtacaccggacaggagtacgcaaagcatctgatccagaagccaaacaccttctactatggcagcccctgcaacaagctctaccgccgtgacctcctgcggaagcacagcctccatttccgcaaagaattgtttgcagaggatcagctgttcaacaccgaatatctgcgctatgtgcgcaccgccgtttccatcccggacatcggctattactacctgcagaaccgccagagcgtctcccactccagagtgaccaccgccgatatccttcggctgcggcggcgggtgatgggcctgtacaagagcatctataccgaactgggcatctacccggagacccgggcggccatcctgcgttcgccctttggcgaaaacgagttcactcttccgccgctggacaccccacagacgcactgctgcaagctgtgaccctataaaaagcacccggctgccgccgagagccgctctggctcctgcacggctccgggtgttttttgcgctttctcagcagccgatggcggcacacttctccgccagccagctgcgttcttcgtcgttcaggtgcggtgccagctttgcaaacacctgacggtggtaatcgttcagccatgcgatctcgtccttatccagcacaccgggcaggatgggagaggtggcaatgggcacgaacatcagcggttcaaaaccaaggaaggtaccgtactggttatcggccttgtgcacgcacaccagctcgttctcgatgcggatgcccacgaggtcggtctcgtaaacgcccggctcatcggtgaccaccatgccggggcgcatccgggtggtgttgcggctgttcagggcatgggggccctcgtgcacattgcccacaaagctgacgctatgaccggtgccgcagcggtagttgatgaggtgccgccacagcggttcccgggcaatggtgtcgatcatcttacactcgcagtaatccagccagacggccttggcaaggtcgatgtggctctgcagagtccatgtgtagaagcgcttttcgtcctcggtcagcgggccaagcgggtaggtgcgggtgatgtcggtagtgccgtccatgtaggtggcaccgctgtccaccagcagaaagcccttcttttccagcacagcgtgatcttccggggtggcgtggtagtgcatcatggctgcgttgccgccgtaggccgcaatggtgccaaagctttccacaaggaatttatcgtccgcactgcggtacttgtgcagaatttcatccaccgtcagctcggtcagggtctcaccggcagcaaggcggctttccagctcgatctggaaccgcaccatggccacagcgtcccggatatgggcctgctttgtgtgggcaagctccgtttcgttcttcacgcccttcatcatcagcagcgggtcggtgccgtccttcacggtgagggcagggttctgctccagcacctgatacacggcgtagttcaccgtggagcactcggccagcacggtctggggttccgtctcagcagcgaggaacttcagcacatcgtcgtactccgccagcgtgatgccgttggcttccagctctgcctttgcctccggggtgacgcgggctgtgttgatgaagagtaccgcgcggctgggggtcacatagcagtaggccatggcatagggagtgcactcaatatccatggcgcgcaggttcaaaagccatgccagattatccagcttgcccacaaactgagcggtgcagcccagctccttgagcttgctgcgcagctgatccagcttttccgccggggagaagcccgcatattccttcggcaggatccacgctggggtatccggcagggcagggcggccctccgtccacagctcgtcctcaaggttcagggtcttgatggaagcgcccttcttttccagtgcctttttcaggtcgttcacgagggcggtattcgcggtcaggccgcacaggcccagtgcttcgccctcattcagggcatttgcgcagtattcctccacggtgggcacgccgggttcccccatgcgctgcagcttgatctcggtacccgcaatttccttctcggcctgcacaaaataacggccgtcggcccacagggcgctctcggtgcgggtgaccacgaagttggagttctcgccgtggaacccggagaaccaggtcaggctggtgtaatggcagggcaggtattcgctggcgtggggatcacccacagggatcagataaacggccacgccgtttgcagccatggcggcacgcagagcggcaaggcgctcgggtacggtattcatgctcataatgacagcttccttttttctatggccggaccgccggaaaagcccccggcggcagggaatttttctgtgtcctattgtatcattccgggaaaaagattgcaatgcaggggcgggacggtttggaatgacctccgcttgccggggagcatcctcgccctctcagtctcgcattcgctcgacagctcccccaaagtgggagcctttggcagtccatgcaaagtatatcattatgccaaggcctctccctttgggagaggtgtcaccgtaggtgacggagagggcgagcccgctgaagaagagaacatttttcgccttttccccgaaaacgcaactttcttgcaaaaaaagttacaattttttcttgaaaaaggcggttttcccattgacagccttgttataataggagtgtaagttttttgagccagcactctgcggctctgtgtgctattcaaagaaagaggcaattgaatcatgaccaaaatcgatattttctccggcttccttggtgccggtaaaactaccctgatcaaaaagctcatcaaagaggcctttgccggccagcaggtggtgctgatcgagaacgagttcggcgagatcggcattgacggcggctttctgaaggaaagcggcatccagatcaacgagctgaacgccggctgcatctgctgctctctggtgggcgacttccgcaccgccctgcagcaggtggtggagcagtaccaccccgaccgcatcgtcatcgagccctccggcgtgggcaagctctccgatgtgacccgcgctgtggaaggcgtggctgagcatctggatgtgcagctgaacagctttgtcaccgtggccgatgtgaacaaagtcaagatgtatatgaagaacttcggcgagttctacgacgaccagatcagccacgcaagctgcatcctgctcagccgcacccagaccgccagcgaagagaagatcgccgctgcggtcgccatgctgcgcgagaaaaaccccaccgctaccatcgtgaccaccgcatgggacgagctgaccggtgagcagatcctgaaggccatgtccaccaaggacgacttcaaggcagagctgatcgccatggctgcaaaggccaatgaggagcactcccacgaggacgaggaagaagagcatcaccaccatcatcaccactatgacgagaacggtgtgtgcagctgcggccatcatcacgaccacgatgatgacgacgaggatgagcacgagcatcaccacgatcatgatgaggatgatgaccacgatgagcacgagcaccatcatcacgatcatgacaaccatgaccattgctgctgcggcca

SEQ ID NO: 814 - DNA, 58743 bp, unidentified
  source 1..58743: mol_type = unassigned DNA
ctgtataaaaatacggttagtaccaataacgcccccatcgcgatgaaccgtggaagagaaaacatcgtggcctacggcaactactttatggacgaaaacagctttgaagaaaagaagatagcggcattgctgaagcttacggaaggtacaccaagcggagaggcgactgctaacgaagggagaacatacggtacaagttgtaagaaccattataactacggtacacggctgtatgcgggtattgataactccatagagagcggaaacagtttctttgcagcaggcatgatgacaaacacgcgggatttgaatacggttgatactacaaaatgttacataatacctgcagtcaatgaaaaactggctacgatttactatacaggcaatcccggtgcatcggatatcaacaacaagaatcttgccaccatcctgctgtggtacggcgaaaaagacaaggttgcaggcccgagtatgaaggacatcacggacgacttgatccagaactactatacgcaagttttggacaagttcagccccgggacggtcgctgacttgcaagttgcgcataaaaaagatagcagcgctgtctatggccgctatgaggtaacatggacggccgcggacacagagggcattttcccggataacaagatacagaatgtaagccattatctggtaacgctgtataaggttgacggtgcgaacactgttgctttggaaaactacaaagacataaaggtctacggcacgcgctatctgtttgacgcggatgatgcgctggcaaatgctattggcaacagccaattctgtgtcggtgtaaaggccgcgaacggaaccgccacaggtgcagaggtaaagtctgacccgcagtacttcgtgcgccccctgcccaccccgaagctggagatccgcctgaaaaaacaggacagcaatggacagccctacggccagtatcttgtgctgacaaacgcaagcgattatcaaaacgcgggcaactggcaggtaaccgcctacctgatgaaccaacccgatacggaaattacgctgagcgcaaacaccaccgaggcactgatagcaaacggccttggctcggccacccgcctgcgcgccacggcaaccccgggtacaggtgcaacaggtgcgtggatggagtctgcccgctatgacgaggagatcggtattcctaaggcagggacaaatatcaacagcggccttgtccacggtacggcgtctataagcgagccggtcataaccggcagcacggcggacgatctgtcgattaccgtgaccctgaaatttaccgcagatacgatcttcaacaccgtgccgaactaccgcgttatgctggtgggtcaatacaacggtgatgaaacaatcagcaatgcggcagaggatacaacggtagccaacccacagccgctgaaaggccagtatgtgacgcttgctgcggtggaaaagccggtctacagcagcggcacaaaatttacgctggagaacctgcccgccgtggtctttgacggcagctacaccgacctgaaggtcatctctgtgcctattgatgccggttacccgcaggttgtgacccgctgggaaatcaccgcagatgatgccttgaaagctattggagagggtaacaataaccccgtcagttggaacaacggcatcgagatcgtgcgcggtgcggacggcaaattcagctattaccacctgaccccgctgcagttctttgcaaccggtgaccagtggtataccatggctaaaaagcagattcacaaggacaatctcaacctcacgcttctgaaagcccccacggtaagcgaaattgccgagggcgatgttgacaccgccaacaagctgaactatacctttacatggacgcagtacaatgcggacggcaccacgccagatacaacagaacatgcctacgatgtcgccctgtacggtctgctgaccgaaaaggatagcgaaaccaccacaatcgcgggcaaggaaaaaatcgagctgaaggacggcgtgtcgctggcgggtaaaactgaatttaacgcccaaaccggcacctataccctgaccctctgcgtggacgatgaccttgcaagcggcagctggcgctatgatacggtgcggctgcatgtcacccgcaagccgagcgatggggacaccaatgcaatcggtctggcgggcgaggcagattgtgctgttaagcagcgtctgtctgcggtaggtcaggtcaacagcatcatgcgcaccaacgacaacagcgccaatgcgctgaactacgacatcacctggcccgcaagcgcggacgccaaaggcgagaacacggtgacatataccctgtacgcggaaaagcttgacggcaatacttggacggcgcttgccaactggccgggcatcacgaaaaacagctgcaccgttgactttgagaagtatcagggcgaaaccctgcggttctatgtcgtagcaaatgcggttgacaaatcgaagtattgcagcccgaacggtgagtacagcaacccgctggttgtcgaaaagcgccttgctgcgcccgaagtgaccgcagccaagttaagctaccagacgccgagccagacccagttcctgaccgaggagaagctgacgctgacagttcaaggtgccagcagcggcagctactactacatgggctatctctttaaagatgccgcggattacaaggaaattgctgcgctggcggacagctatcagcaagcgcggacgcccgatgaaaaggctacatgcctgaaaaacctgacggacgcgctgaatgatatgcttgccgacacggaccccggccgcgtgctgcgcctgctgccggaaggccagatggacggcggtgcgcaggcagaaacgacaaaggacggcgcagcgtttgcgcttggcgatgaaagctttaccatgaagccggagtatgccggttactggctgctgcccgccctgcgcagcatgtccaccgacggcacaaccgccagctccaactggtactactatgtcgcagacggcttgagcgtagcacccacccagatgcagctgcccaagatcaagctggatgcaccgcagacgaaccagaacgcctttacaactgtagattccaaggcaaccctgcagctgttcggcgctgacggtgagacgccatggacgcccgcaagcacagaggcggatatttcccgctttgcagtggaatggaacgccgtaaactacagcaaggaaacaggggaaggtctggcagacaagtatcaactggagatcacttctgccgatggcaacacaaccgacaagatcacctttactgtggccgagcggaatgtaatgaacgaggacggtacgatcgcaaccaagtgcggggaaatcctgtctgtgacaaaggaagttacaataaaggatactgcctacacgatcacgatcccgcagaccgaagaaaacgggcgcacattctatgatctgaccactacggtcaagacgaacgagaagggcgaggcagtccttgacgagaacaataatctcgtacttgcaacgaaccatgtgacgctggagggccattatgagctgaaggacgccagcggtacgccgcgctataagctcgaaacctttgcaacgctggaataccttgaccgtgacggtgagccgggctaccgcgtaacgctgcctgaccttgtcgatctgctgcacaaggacgatacacgccagcgcattaccggtaaggttactgtgctggccgagggcgatgcggaaaagaccacccagtctgaaaagctggaattgactgtgccgaatgacggtacagctgccgccctgaccctgacagcagaggagcagcccgcgcaggacgctgcagcagagcaaagccctgccgcagcaccaccggttttgcgggcggcgcgtgtcctgcgggcaacgcccgaaacggctgcagctgagaaagaggagctgcctgcagtgggataacacaatgaaggagggtatacctatgggcagaaaagcccgcggtatcatgcaaaatcaacagggactgtcaatgatccttgtgctgtgcatcggcgcggtttttgcggcgctgtctgcggcgctggtctatgcggcgtctgtgttgacggcaaacgcgaaccgccagttgatagagcaggaggtgtatacccttgcaacgagcttttccgatgtgctggatgaccagctgaccggctacagtacggcagcgggcgatgcgcaggcggacagcctggcagcgttcattgacaaaacctaccttttgcagactacctacagcgatgccacggagcatacctttgcggacgaaagcagcgggctggagatcacgctcaaaaaaacgccggctgacgaggtggataaaagcgagtatgttgcagtgctggcaacaaagggctatgacattactgcacttaacggccagcttgacagctttaaagagaaggaactgtcggattatgttgtggaggtgacggtgactgcaaagcaggggagcgagaagttctcctacacaaggagctaccagcacaccagcacatgtacagtagcgtactatacgattggcacggacacggcccggtataatagttatcagttgaccaaggatgtcgaaaatggaacgagtcaacaactcgtttttaaacgcacggatgttgataactcatatacacttagcccgggcgctgatactgaaatcaagatccactatgtcctgaaccagacagttaagagcagcaaatttgtgcgccaatgacccggaaaggagcggctatgtcgagataccttaaaaatcaaagcggagaaacgattgtggaagtgatcgtttcctttgtgctgctgcttatgtttacggcgctgttcgtggtgtccctgcgttatgcgcgcaccatgtcattgaaggcggaaacgatccgccagacggcctatgcgcagtgcgaaaagctgtaccccgccggagatggaaagccccaatgggtgaatgacggcggcactgcaagctatacctttaccggtacgggcgcacagtttgttgttgggaatgtccaaaagcaaaaacttgaggcaaaggcctcggaggatggcacggatgagacctacaccttccaccgttacagcaagggccagtcgaataccagcgggggacaggaaacaccatgatgcgagtgctgaaaaacaaaagggggacaacgctggtcgagcttgttgtctgcatggtgctgctgtcgctgtttacgcttgcggctgtcacgctgatacagcccagcgcgcaggcgtatatgcaggtgcagcagcagacccgcgcccagaatctggctgatgcgctgatcgagaccatccgcggcgagctgctgaatgctaacgggtatatccgctttgcggacggcgcaacagataataattttgacacggtgtttgacaaaaaaagtggtgtcagcagcggtacagcgttggagttcagcgtctaccccaatcatatcgagctgatcgacaaggataaggtcccggcgttgacgaaggcggacggaacgccgctgctgagcctagatgctgcgaacgagctggatggttacctgcacatgcggttctatcagcaggagaaaaacacctataagccccagcatgaagtgacatcagaaggaacagacctgcctaatgttgcctacgcctacacgacagcctaccccaaggacgcctacatggggatgtttatcagtgacctgcagttttacgcccgcagctataccaaggacgagggggaaaaatacgcccatgtcacggcgctgaccgttgtgctgaccgtggcccagaaggatgcgcagggcaaggccgtgcccctttgtacccaaaaggcgatcgtgccgctgccgggcgcaccggtgtatatcgaggaacccggcagctgggacggcagcaacccggcggtgtcgtgaagcaccgcccaagcaagaacatcccgtgttatgctggacaaactccttgatttttgttatactatagaacaatatgggaaaggtggggcgctgcgccccgttgtatagagcagagaggaatagcacatggcaacagtcgaaatcagaatgttgggcgattttgagatccgcgtaaacggcaacccggtgctggcccagctggcacagtcccgcaaggcaacggcgctggtgcagtaccttgtgctgcagcgcgaggagcgggtgtcccacaagaccatcaccgatacgctgtgggcgggcgagcgctcgaccaacccggatatggcgctgcgcgcgattttgcaccgcttccgcaatatgatcgaggccgagggcctgaccgagctgcagggctgcatccagaccagccgcggcagctaccagtggaaccccgcgctggattgcagcgtggatgtgtttgaggtcaacgacctgtcagagcaggcccgcagcgaggccgaccccgaaagccgcggccgcctgtatgaggagatcgtcaacctgtacaagggccgtctgctgccccagtttgccaccgagccatgggtcgagagtgtcagcgtccggctgcacgggcagtaccgcacggccattctgggcctgctggagctttgcaaaaagtggggcgaaagcggccgcattatttcgctgtgtgcccacgcgcttgagctggacccctacgaggagcgcctctatctggaggagatcgtggcgctggaatcgctgggccgccacaccgaggcacaggaccttgcccgccgcggcaacgcaatgggctgcctgcaccatgccattgacccggggcgcgccggctctgcctaccgccagatgcgtcaggcggaccgcaacatggagagcgagctttcccgcctgaccgccgccctgcccgacaccgaaaacaccggcgcctgcctctgcgactttgaaacctttaaggaaacctaccgcgtgctgcgcggtgtgcaggcccgctacggtctgccggtgtttctggccatcgtgacggtggcccccggccagaatgccgagcctgccgagaccgctaccatggtggagcagcttggcgagctgatccacaccacgctgcgccagtgtgatgtggccgcccgctacagtgatatgcagtatgtcatcatgctcagcggcagcgcggccgagacaggctccagcccgctggagcgcatcaaggcggccttctaccgtgtgcccgcccacggccggtatctgctgagctacaatgtctatgtgccggagatcaaggctgacagcggacgcgcccgccgccgcaaaaaaacaacgaagaaataagcaattttcccagccgcgccggtgcgcggctctttttttacactttacacaatcttttgactaaaaatttttacaaaaaatctaaaaaaactgtttaaatttccacaacaatgtggtaaagtagtatcaaacaggtgggaagtgttcaaaattcactccgccgcaaagaatatctacgccgcagggcggttggaaacgccccggcgcgaaaagaggtttgacgatccatgggctacgcaagcaaagacatccgcaacattctggtggccggccatgccggctgcggcaaaacaacgctgaccgaggcactgctgtacatgagcggcgctaccgagcgtatgggccgcgtggaggacggcaccactgccagtgacttcgaccccgaggagacccgccgcaaggcatcgctgaatgccagcgttgtgccggtcgagtatgagggcatcaagtacaacctgatcgacgcccccggtctgtttgactttgagaccggcgccgccgagggcatcatggcagcggagagcgtgctgatctgtgtatccgggcgctccggcgttaccgtcggcgcagagaaggcctaccagctggcactgaaaaacaacaaggcgcggatgatctttgtcaccaagaccgaccttgagaacgccgattactttaagatccttgagcagatgaagatcaagttcggcccgagcgtctgcccctgtgtcgtgccggtccgccttgatgacggcacggtcgcgtacatcaacctgttcagccagaaggcctttaaatatgagggcggcaagcaggtgcagatcgaggtgcccgacatcggccaccgctttgagggtctgatccaggccatgagcgaggccatcgccgagacggacgaggccctgatggagaagttcttcgagggtgaggccttcaccaccgaggagatcgtgcagggcatggccgccggcgtgcgcagtggtcagatcacccccgtgttctgcggcagcgccgtcaacatgcaggcactggatatgctgctctacaacatgaatgtgctgctgcccggcgcagataccgccgcagccgtggccgaggataaggacggcagccctgtggacatcgcggtcgatgacgctgcgccgctgtgtgcctatgtgttcaagaccgtggcagacccgtttgtcggtaagctgagctttatcaaggtgctgtccggcaagctgaccgccgccagcaatgccgtcaacgcccgcaccggccagccggagcgcatgggcaagacgctgactgtctgcggcaaaaagcagaccgataccgccgagatcgcggcgggcgacatcggcgccgttgccaagctggccaccgccaagaccggcgataccctgtgcgaccccgcccgcgttgtggcgctgcccgcacccgtctaccccgtcagctgctaccgcatggctgtcaaggtcgccaagaagggcgatgagggcaaggtcagcggcgcgctggcccgcctgatcgaggaagatcccgccatcagctttatggtcgatcccgagacgaagcagcagatcatcagcggtctgggtacccagcatctggaggtcgcgcttgccaagctgaagaataagttcggcgtcgagatcacgctggaggcaccgcgcgtaccctaccgcgagtccatccgcaagagctgcaaggcgcagggccgccacaagaagcagaccggcggccacggccagttcggtgatgtatggattcagttcgagcctgtgcagggcgagggcatcgagtttgctgagaatgtgttcggcggcagcgtgccgaagaacttcttccccgcagttgagaagggtgtccgtcaggcggccgagcacggcgtgctggccggctacccgatggtcggcatgaaggccaccttgctggacggcagctaccaccctgttgattccagcgaaatggcgttcattatggccgccaaactcgcgtataaggccgccatccccgaggccggccccgtcctgcttgagcccatcggcgcattgaaagcccatgtccccgccgacaataccggcgatattatgggcgaggtcacgaagcgccgcggccgcgtgctgggcatgaaccccgatgaggacggtctgcaggtcgtggaggctgaggtccccgtggccgagatgcaggatttcaccaccttcctgcggcagctgacccagggccgcggttacttcacctttgattttgtccgctatgagaccctgccccagatgctggagagcaaggtcatcgagcaggccaaggccctcggcaactttgcagatgaggattaaagcgtaaaaaataagcacctgctgaccggtatgcgtgtgaccggtcagcaggtgctttttggttgagacatttaaagcttctttgcttacttttttctcgaagaaagtaagagataagggagcctgcggaaaggtccaaagcccctcaggcctcgcaggctcggccagtccttcggacccgaacccctctgtcgcttcgcgacatctccccgcgcagcggggagtcaccccgcaatgcgaggagccttttttgcgggctccgcccgagaaaagcctcccctcacaggggaggtggccgagcgcagcgatggccggaggggcttcttgccgttacccgtcagcaccagcctcccgggaggcggcgggccgggcatgcccggcccctacagtgcatcaaaatttgtaaatgcacacacccaatcaggtaatcttcagcgcccgctgcacccgatatacaatataccggaacagcccgacgatcaaactgccctccacccagatatagttgggcagattcttccaccggaatttgggcttgtcgatcttcggcagggcggcccatgcctcgtggaagccctttgcgtagtcgttgccgaagccgcgcagccggaacataacgacttttaacaggtaccccagcagcatcgggatgaaattcaggaccagcatcagcagcggctggtttttgtagggcagcaaaatactgttgcggccgctctggatgctcttgaacgggttgtaccgcaccgcgcctgtggtcgcaccgcagatgtggcggcatttggccgtggggcagtagacatttttgtagccgtagctgttggcgcgccagctcaggtccacatcctcgtaataggcaaagaacagctcgtcaaaaacgccgatctcgtccaagatggatttgcggtagagcgctgcgccgccgcaggcgctgaaaatgcggcagggctttgtgtagcggctggcccgcagaccatcgccgcgcttgcaggcaaagcccaaaatcgtcacataatcgcctgcatcatcggccagctccggctcatagtagcgcagcatcaggctgctgaccgcaaaaatcttcgggtcggcatcggcggtcctgataagctcggccagccagtccggctcggcaaaggcgtcgttgttgaacaggactgcgtactcgcccttggcgatcgcaatgccttggtttaccgcgtgggaaaagccggtgttgtcggcgttttcgatcagggtgtagcggtcgcggccgcagtagctgcgcgcaatcgcaaggctttcatcggtggagccgttgtcgatgacgatcagctcaaaatcctgctcggtctgtgcccagatcgactcgatggaatcccgcagccagcctgcgccgttcaggttcgggatgatgacagatgctttcatggcgtctccttaccagaaataggggttggcgtagtagtaggtgagaccggcgtgcagcacggcgctcagcaccagcgcaccgaccagcaggaacaccgcaaaggcgactgccaccacggcggtgcggatcagataggcgcgcgccagccgccggcgggcggggttgcgggtgccgccgaagctccacaccaccgacaaaaccaacccgaccagcgggatggcaaagaggatcagtgcggctgtcgtggcgctctggctcatggcagtgacggcagcgtcctcgtcccggtcaggcgtgtcatacagcggctgggcagggccctgctgcggcgctgtgcaggcggccgggggcaccggtgcgccgcactgggggcagctgcgggcgtcatgcggcaccagcaggccgcagtttttgcagaagcgtagcataactttgttattcctccaatgtcaggttgcggtccagctgggtgttcagaataatctgggtgttggtggagcccatcttttgcatcttggtcagcagatgctccagcgcatcaatgtcggtgcagctcaccttgattataaaattgtagctgcccgtcacccggaagcactgcagcacctgagactcctgctcgatcatcgagaggaagcttgcgcgggtggcagcgtccaccagcaccgagatcagcgcctcgacccgggcaggggcatcggggtggcgcagcacaacggtgtagccgccgatgatgccctcctgctccagccggtggatgcggctggaaacggctgggctggtcaggctgacccgctgggcaatgtctttgacgggcatacgagcattttctgccaacaactgtatgattttgtggtccagttcgtccatgaaatgactccttgcttttgttttgtataatgcgcacaaaaaaataatgtgaagtatacagacattgttgtctttaacaaagttgaaaaagtatgcttttttgtgctgccgctaaataaaattaagcgtcaatggttttattataatcttttgaaaaccaaaatgcaagtatgacatttgacattttaagaaatcctgctataataatactcgtaatcaatcaagacattcactgacctttatatactttcccacccctctatgcacaaagccccgcaggtagcccctgcggggctttgtgtttgcatctgctacaaagtaggtaaaaatgttcaaaatatccctgcgggcaactgcgctataagaaaggcggactgtcgaaaaggatggtgcttgcgtcttggctgcttcttggctccctcacagttgagatttttcggtatcgtgaataaagcaagtaaatgcgcgcggcaggagccgcaaaaccctcgatttcgttaatattattaactgatttcgggtttgacggcaggccggctgttgtgttataataaaaattccgacatcaatcgtcattttttatgggaggaatcactatgcttatccctgtactgctgtttattgtcggtttgctctttttgatcaagggcggcgactggtttgtggacggtgcgtctgcactggcccgtcgctttcatctgccggagcttctcatcggtgcaacggtcgtttcaatcggtacgaccctgccggaggtcatggtctccacgatgtccgcactctccggccatggcgagatcgcctacggcaacgccatcggctcggtcatctgcaatgcggcgctgattgcagccatcaccatcgccgtgcgccccggcaaggtggaccccaagaccttaaagacgccggtcgccttcttctttgcggcggcagccatctactgtgcggcggcctatgtgttcggccggtttacccgcgtcatgggcatcatcatgctggcgatgtttgtcgcttacatggtcgtcaatgtgctgcagatgaaaaacacccccgccgaggcccatgaggacgccgaggaggagatgcccctcgccaaaacgctggtgctgctggtgctgggcgcggtgctcatcgcgctgggcgccaacctgctggtggacaacggcaccctgattgcgcaggcgctgggtgtgccggagagcgttatcgcgctgacctttgtggcgctgggcacctctctgcctgagctggtcaccgccatcacctcgctggtcaagggtcacagcgatctctcactgggcaatgttgtcggtgccaatgtcttcaatctggtgctggtcagcggcgtttcggtcacgctggctcccttcaccgttccgcagagcgccactctgttcggcatcaactccagccttgtgctggagctgccggtcatgctggctgttatgctgatcctcacggttcccgccctgtgcaagggcaagctgaaccgtgcgcagggcattttgctgctggcgatctacgcagccttctgcgctgtgcagttcacgctgtaaacaacacaggcttggcccggcacacccgctgcgcaaaggcagcgggtgtgccgggccgttttttgaaaagcgccgcacagagcctgcagacagggataaaaagcagatacccggcatacatttccgcgaggtggtgtgtatgctgggcattttgggttattttttgcaggtggctgcagggcatatcctgtatcttgcgctgcatcttgagagcgggtcctttccgcggccgctgccgccggagcgggagtgcgcggcctttgccgacctgcgccggggcgggccggccgccgccgctgcgcgcgacacgctgatacgccacaacctgcggctggtggctcatatctgcaaaaaatactacgctggggatgccgcacaggacgattacatctcgatcggcaccatcggcctcatcaaggctgtggataccttcgaccccgacaagggcaaaaagttcgccagctatgcaagcaggtgtattgagaatgagctgcggatggaactgcgccgcacgcgcagggcagggccgcagctttcactgcaggagccgctggaggcgggcggtcagctgacgctggcagacaccttgcccgatgagactgacatggaggcagactgcgagcagcgtgccgatgcggcccggctgcgcagcatggtggagcagctgcccgggcgggagcggcagatcatgcggctgcggtacggcttcggcggtgcggcacagacccagcagcagacggcgcagacgctgcacatcagccgcagctatgtatagcgccgccactaatgtaaacgatgcccggagggccgaaaggctccccggacatcagtgttttgattattaactttagcggccactcatcaaattattagttacgatctgcatcttctacgattgatttgattatctctaaagtaggcctaaagccttcgaaagagaacatacgctaagcacaccttagctaacaagagggcggagtattatagaaagttaaaacctattttggatcatgagcatctctatgaagatctctcagcggcagataaaaaacgctgccagggcagccctttcacggtggaggagatcctcggcgaaaaatggttgcgggaaaagctccgcaagagtctttccgttctgtcggaaccggagcgcgtggtcatcaagctgctctataaggacgaacttacccacgagcaggctgcccggaagttgggtgtcaccagttctacaattcggtctcataagaagaatgctctcgataagctgaagaaagaaatgctggaggatgattgatatgatttcttttcgcgaactgttgattaacgctaaaaacggtgatgaaaaagccttgatggaaatgtttgacctatttcgccccatgatagagaatgcgagccgcagtgctaaccgcaaagatgaggatctgcatgatattatcgttatggcgttcattcaggcaatttcaaagtttcccatcgataagccttgatcagcgaatcgtgcttgatggcaattaaaaccacatagcattatcagcacgagcgtctgccgtttggggtagacgctcgtgctgtttttttatccctgtcatagcgagatattctatgtgtctgttagcatgggcttaactgactccttgaccccggagttgttttttgttattatgatcctgtacaatggcatgcccattgctggctggattatctccgtaatcgccatgaagttctacccgcttactggcaaaaagatgattgagattgaagatcaaatcgctaaactgcaactgaagcagacaaaagaataaaacgttggataaaatcggcgcacgtataacgatatttagccaagttatggcgttatgctatgcgccggtttcttctccgtcagccaagccgcctaagaaaggaatgtggatatatggatcttgagaagcaaaaacagatgccggtatggggaccgtattccaagaaatacatggggctctcacgtgtgatgaaggagagcgcgattcccggtgccagatttgacctggtgatatatcccacctatgccaacagctcagtgccagcgcccaatgttacggtgccgtccaattatcatccctggcaggcggacccggaggggcgatatttccaatatcggtatgagctgatttggaaggatcagctgtatgcggatgtggaattttttgaactggatgaggagacctggggcgtccgggtggagtatcacaaccacacggaccgaccgcaaaattgcctgctcaatctactttcagccattgaatacccacagataactgtcaacacccctgtgctgcccgaaaagcatgattactggaaggccatcgactaccagaacctgcaatttgccagaaagagaccgtgggaccgactcaatccggatggattgaaaaaaggggaagtacaacagaaagactttgtggacggtgtgggcgtgggggaaaccttctatgcattcatggctgcccacctgaagctgaaggcttttggcggtgattctgatgacacaatctcatttcagcgggagatcaagaatcagtaccggaatggagtactgtgtgtgcgttaccagacggtgaatgagtccgaggatgtggtatttgccactgcatacggagacattacttttgaaaaaacaagtacaaccagaatagccttcctggaattagggcagctggagccaggcgtgtttcagttggatctggtatccaaaggcaccaacggaaatggagtgaagctggactttttctgtattgtggagcgggaggatatccacgaaataaccgtgacgcagacaaagcgaaatgtcattccggatatagaagaaactggacacactacaaaataccgctatcattatcacgagaaagagattggcctgaccattttcaatccccgcgtgcggaaaagaaccctgcattccggctgcattgaggatgccttggttacaagaatgagtaactccgaccacacctatgacgacttgacccgaagcttctccaactcgtttcagcagaagcactcggatgatggcttttatcacatcaatgtggtggaggcgatcttccttgcgcctaacacttcaaagacagagtatttatatgtcagcagcactggtgctcagtatactcaggaacagctggagaaaaagcggctgctttatgtggaacagcagcaaaaatgctgcaaccgggcgggagagccctttgcctttgctgctcggctgatgaaatcggccatattctcaaatgtggtctaccccatttgcaggcacggttgtcagattatccactacaccccgggaaagcggtgggacagtctctatacatgggattccggaatgatcgggattggtatgctggagtattccacgcaaaaagcggaatatgtgctggatacctacttgtcagaaaaagacaaccaggattttgcctttttgttccacggatctatggtgcccacacaattttatctgttctacgaactgctacagaagctgccgccagagggcaaagcccggctcaagcagtactatcccatgctccggaggtattatcagtttttcgctgggaaaagcgaggggtctacaaccgcccggtataagagcggcctgcttactgtgtacgattacttctacaacgccagcggcatggacgactatccggcccaggtggaactgcataagcagaagttggagcattctgtggctcccctttgcagcagcgtgcatctggtgcgcatcgcaaaattcatgaaggctattgcggagtattttgggtacgagcaggatgtccagcaatatgccgatgacgcaaagcaggtgggagatgccattgtcaaccatgcctgggacgaggagagcggatatttcggctatgtggtacatgacgaaaatctctacgctgcaggtattttgagaacggaaacgggagaaaactataacaagggtgtagacggcgttaccccgctgattgcgggggtcacaaccccggagcagacccagcggctacttgcacacctgacaagtcagcaagagctgtttaccccggtaggtatatctactgtggaccagagtgctggatattattatgacaatggatactggaacggaagtgtgtggcttccgtatcagtatttcctttggaaatccatgcttgatttgggatatggggaatttgcagagaaaattgccaaaacagccttgcacgcctggagccaagagacggatttcagctataacacctttgaactgatccaaattgaaagtgagcgaggaggatggttccatcagttcagcggattgtcttctccacttgtggtgtggtatcattcgtactataagccgggtaacgtaacggttgggtttgacacctggttagaggaatggcacttttctgacgattattccagcgctagaattcggtataaaaccagtcgagtgggaggcttacttctagccgtgatgaatgaggaatattcggactactccgttactattgatggagagcccgcgcaatttgtgcagcgaatcccaggcacactagagattcagttgcttcattgtcagggagaagtgatagttcaagctcaataaacatagtatgctggatattctgaaatataggtaatgacaaacttggtcacaatctataaaacagtcattgatattagcctctcaagaaacccggctatacgtcaagtatgagccgggtttctggcgtagtgtgccaggcatgggcaacaactaagtagtgagagaccactacgcgcttggcagtaggaagtgatattgacaatatcatgtggcggttacatgggaggaaagttcttgttcctactcggggagattttgcagacggagagtagggagatccgaaagccgcagtaacaacgagctgcaagaagccagccgaggccatagtcaacgtcacttagttaaataggcaatccctctacaccaacacagaacttggtatagagggatttttttctaaacactgtaagcgctcaaccacaactggtagacaaaaataaagctggagccaaaatcggctccagcaaacttcaatcaatttcacaacatggacaggcaagaaaatttgcccctttacatacgatgaacaaaggaggtagaacgtatgaaacaaaccttgccggttgtgcactgcatatataccgaagccgaaaagagcctcgctgagttgctggaggagtcttttcggctttatcttgcccgcatccttgcgacatctgagaaacccgttgtacaatgtttgcgatgagtggtcgcttatttcaaggaggaaactatgtacttagaaataagcaaccctatggattaccatgtcgcattgtacatccgtttatcaaaggaggatgagaccgaagggccatcccaaagtgtaaccaaccagaaatccctgctcaatgaatttgttcagcagcatcgcctttccgtttacgatacctatgtcgatgatggttggagcggtaccagttttgaccgccctgactttcagcgcatgattgaggatatcgaagccaagaaggtcaacatggttatcaccaaagacctatcccgtctgggccgtgactatatcatgaccgggcattatatggagagatacttccccgaaaagagagtgcgctacatttcgttgttggacggtattgacaccggtgtagaatccaccgccaatgacattaccccgttccgtgccattatgaacgatatgtatgccaaagacatttccaagaagatcaaatccgtcaagcgggataaacagcggaaaggtcagttcattggcggcaagcccatgtatggctataagatgcatccgacggagaaaaacgaaattgtcatcgacgaggaagtggctcctgtggtgcgcagaattttcgccatggcattggatggtatgagctgccgaaagattgcgacgactctcaacgaagaaggtgttccgacgcctgcaacttactgtggctggaatatgggacgcaaaggtccttatgccggactttggtccagcgaacgcatttctgaaatgctgcagaacgaaacctacctgggcaatatggttcaaggacgaacggtgaaaatcagctacaagtccaagaaatgtctgaaacaagatcgggaaaactgggttgtagttgaaaacacccacgagccgctgattgacaaagaaacctttcagaaggtgcggatgctggtcaacagccgcaggcacacccgaagcagaacctatgacttcttattaaaaggcttgattttctgccatgagtgcggttatccaatggcggtgctaaatcgtccgccggtatccggtgaagatcgactgtttttcgtgtgtcgaacctaccagcgtttcaccaaagcaggtgtctgttcctgccactccatcaaagagcaggtcgttaccgaagcagttctggctaaagtaagagaagtctgtgaagcctatcttgatccaaataagcttcagccaattgctgccgatgcagtagagaaagcccgcaaagcggaaaaccatgaagcagaaatccagtccattcagaataagatcgacagtctgactgccaacctggataagatgtatatggatcggctgaccggacttcttgccgaagcggacttcgagcgcatctatcagcgagtaaagatggacagaacttctctggaagagaagctgaaagagctggaatcacaaaaagaaagcccggtcagcacagaagaccgagcaagagagctggtgcagcagtttttggattctgcctacaccagccgggagcttctggtcagcctcatcgagcgtgtggaactgaccgaaaacaaacaaatcatcatcaaattccgcttccgtgagttggaagcgatttcttagggccaatcgtttacaataggcgcggcggaatgtttcccggctggaaaaacgggcgctgaagatgctgcgagagcgatggaaggaatcgagatgaagttgaatccggtgggcagaatgtacctgcgtgaggcgtatgtgtggcaaggtgtggcaaattgtgccgcacatgtgccacaccttgacgaactgtcgaatctatgtggaaaatagaaaaaacaggcagttgcaccgcaaaatgtagaaaagttgtgaaaatgttacaaagtaaccataaatccgaaaatatttcgcaaaaaatcattgacattttactcacaaccggatagtataaaagtataaacgaaattctgggctacaccgcatggctctatgcaccgctgaaagaggcgaggtgtaccctctgcaaagatcaaaatgtctgcagtgccgcagcgttttgggcggagggtgcgcagccgccgggcggtgcacaggcccgccgggcagacgccgtgcggcagtaccttagggagagaggtataccaagtgcacctgacaaaaagcgaacaacagatcatggagattttctggaaggccgatcatgcgatggcccagacggaggtcgtttccacctgcgtggagcgcaaatggaaggaacgctcgattttttcgatgctgaacagcctgatggaaaagggcgtcctgcgtgaggtcggttttgtccgcagcggcaagacctatgcccgcacctttgagccggcaatgtcccatgccgaatatctggctgctgtagtggcagagcagctgcccgcaaagcagctgccggagctgctcgccgcgttgatgcagaagatggaaacgacccctgcgatccagaaggagatgcgggccgccctgcgcgaaaatacgcagtaaagcaaaccgcagcgcatggatcgtgcgcagatgccagagaaattggattcgttcaaaaaagcaccgctgcccgtatcgggcggcggtatttttttgcgtccctttcgcctgcggtgtgcttgcaaggctgatataaaagcggtataattaaaaattaagcagtatgcctatactgcgcagattctattcgatttacaggagaaccccgatcatggataaacgcaataaaaccgcgctggcctatctgctcatcggtgtggcggcggcaggccgggcactgctctctgtgccggaaaacgccgccattcaggaggtctcgctgaccgtgctggcgctggtgggttatctgctgctggcctccaaaagcaggctgccggtgcttttcggtgcggcgggccttgtgttggagctgatcctcagcggtgtgcctgcaggcggtgcatcggtctggctgattcccgcgctgcgtgtggcggatctctggctgttctggggcgcatcgatggtgctgcttcggctggcagggcggcagagcagcagggtgccgtaccttgcggcgctgccgctggccgtctacagcgtggcgcactttctgcctgcgctgaccacactggcggctgtggcctttgtggcgttcagcgtcctgatgctctggtttgcagcggtcatgatccgcgcctacaacaatgcgcgcgtaaaaaagtgacaaaatccgaaaactgtggtatactgtagtatctgataaaaatcaagccgtgaaagaaggattcttatgattccgtttaatgtgcccccctgcgtgggtgaagagatcgaatatgtaaagcaggccattgcgtcccacaagatctgcggtgacggtgcctttaccaagcagtgcaacgcatggctggaggagcgcttccatgcccagaaggtgctgctgaccaccagcggcaccacggcgctggatatggccatgctgctgtgcgacctgcagcccggtgatgaggttatcctgcccagcttcaccttctccagcaccgccacttccgccgtgctggcgggggcccggctggtgtttgtggacatccgccccgacacgatgaacattgatgagacgaagatcgaacaggccatcaccgacaagacaaaggtcatcgtggcgatgcactacgccggtgtagcctgcgagatggacacgatcatggagatcgcgcaccgccatggcctcaaggttgtggaggatgcggcgcagggcgtcatgagcagctacaagggccgtgcgcttggcaccatcggtgatttcggctgctactccttccatgagacgaagaactactcgatgggcgagggcggtgcgctggtcatcaacaacccggcctacaacgagcgtgccgagatcctgcgcgaaaaaggcacgaaccgcgcgaaattcttccgcggtcaggtcgataagtacacatgggtggacttcggcgacagctatctgcccagtgagctgaatgcagcctacctgtggccgcagctgctccacgcggacgagatcaacaacgaccgtatgaacacatggaacgcctaccgcgccgccttccagccgctggctgatgccggtaaggtcgagctgcctgtgattccggcagactgtgtacacaatgcgcacatgttctacctcaagtgcaaggaccttgatgagcgcacggcgctgatccgccacctgaaaaacaacgatattctggcggtattccactatatcccgctgcactccgccccggcgggcgagaagttcggccgctttgacggcacggatgtctacaccaccgccgagagcgagcgccttgtccgcctgcccatgtattacggcctgaccgagtccgaccgcaagcaggtcatcgaaaaagttctggaattttatgcgcagtaagcgtataccgggctgggcgcaggtgctgggcaccgccgctgcggcgctggcttttctgcttgtgtatgagctggcagtctaccgcgtaccgctgcagcagatctttctgccgtgcagctattggagtgatgaggtcatctacagcaagcagctggccgctgtggtgcgctgcggtgcgccgcagggatatttcggctttaatgaatcgcatgccgccagcggcacctttgccgcatgggggccggctgtcttttttgtctacgcgctgccggggcttttcctgcgcgggcagaatgcttttttgtggtgcaatctgctgtttgtggttgcagggtggacctttttcgcgcgtgctgcacggctgaacggcaagcagcaggcagtctttgctgccgcgctggccgccttcaacgcaccgatacgctatgtgttctccgccatgcaggagccgcttcactatgcgcttgtgctggcggtgctgggctgcggtattctggcccggcgggataaaagccgcgccgcatggggcgcgctctgcctgctttgtgccattgccacattggtgcgcccttatgaggctgtgctttggctctacccattggcgctggcgtggcatgaccggcgccgcatcgcggtgtgcgttgcgggcggtgcagtctcgctgggcggcacgctggtgctgatgtcgaaattttacgcgccctacttcttcacgaatgtggacatgacccccgtgcaggagcttctccacggtcacccgatcgaagcgctgaaggatgttgtccataagctgatgggggcgctgcagaccgttgggcagacgatccttacggattttgcccggcacagcggcggatattatctgctgttctttctgctgctctgcattgtgctggcctgtctggcatgggatgtccggcggcagcgccctgtgttctggaaggggtgcgccgctgcgacctcgggcatcgtttttctggcgttgatgctgatgtaccgcccgggcgagggctcgcgccatacgctgattttggatctgctgctgttggcaagccttttgctggagaaccgccgccctgccgcagccacggccgcggtgtcggtgctgctggcgctgaccggtgtgctcagtctggccaagggctatggcctgccgcgctacagcgaggcttgggacaatgaggtgcagcaggtgcaggcggcactggaaaagagtcaggctgcagtcgatagcgaggacccctgggaccatacggcggcatacgcctttctcgatgaggttcactgcggactgctgtacggcgtaccggacggcatgggaatccagtttgacgagaacagctatctggaggatgcagctaatccggtccatgcccggtatgtctttacaagcgcgggcagcaatacagccgcccgcctgactgcagacggctggtcggttttgtatgaaagtgaaaagtgcgtgctgtatgagcgcacaagatagcaggataaaggacacactatggatgtaaaaaatctcccggttctggagggcgcggctgtccggctgcggcctattgccgatgcggacaccgatctgatcgtgaaatggcgcaatacgccgtcggtcgtgcagaattttatctttcgccagaccttcacgccggaaatgcaccgcagctggctggctaccaaagtcgccaccgggcaggtcgtgcagtatatcatcatcgacaaggctgatgataagcccgttggggcggtctattaccgcgatatagacaaccataaccgcagcgccgagtacggtatttttatcggcgaggaaagcgcgcgcggcaaaggcctcggcaccgagacggcaaagctctttaccgattttggctttgccgaattgcagctgcaccgcatcagtctgcgtgtgctggcggaaaacaccgccgcccgccgcagctatgaaaaggccggctttgtgcaggaaggcattttccgcgatatggagctgctggacggccaataccgcgatgtagtgttcatggcccggctggcggagaaataacgatggaaaatcgactgcaaaaaatccaaaagctgttcaaaaagacccccaacgcgctgttttgcctgttgggggcagttgtgttccttgcgggggtctactttatcagctaccgtaccgcaccgtgggaggtctggctgcccagcacaatgaacaacgatgaggctatctacaaccgcgaggtcgtcagtgtcatcacccacggtgggccgcagggatactttggctataatgagaatacggccgacatcggacgctacagcacttgggggccgtttctgatctgggcctatgctgtcccggcatttttcttcggccccagtgtcaatgtggtgctgtggtgcaatctgctgctgatcacactgggaatcgcatattacgcccgcagtgcgcggctgaatgtctggcagtgccttgccctgtgcggggtgctgctgggtgtgctgcgaccgctgcaatcctcagtcagcggtgcatcggaggccatgcagtatctgatggcctttgtcatcgtaggctcggcggctgcggtgcgccgcaccggcaagaccggctggctggtcatcggggcagcggcctgcgcgctcgaaacgatttttcgcccctatgcgctgctgttctgggtgtttccgctggcggcggtatggcagcacaaaaagcgccgctgtgtctgccttgcagcagcggcggcctcgtttgtcctgtcgattttttcgatgacaaagatggcggcagcgtatttcggcggtggcatggattttgccggtgtgcagttgcttttgcagggccacccgatagcggctgtgcgctatgaaggggagcgggctgtcagactgctggctgcagcgtggcagtatgatgttgtgcctacactgcagggcgatgtgacctacatcggcggcggcgtgctgacctttttggcggttgctctggcggcagcggcttgtctggtctgggataagcgcagaggccgccccacagcgctgaaatcctgcgctgccttctgtgcgggaattgtggtgctggtgctgctgaccatgtacagcattgacccccgccatctgatgctgctggcaatcttactgatcgccgcttttgtggcggaggatgcagcaccagcagcggtctatatgcctgtgctgctggtgctgcttttcccgatgaacttttcccgcggcagtctgcctgaaatcaacacagagatggctgctcagatggaaatcgtggagcaggtcctgcgtgaggacgcggccgacgcgggaaacgatccttggaacagcaccctggcctacgcctacgatgatacggtattccacggctacctctacgccgtgccggatggcatgggtattgagtttgacaagaactcctacctgtgggacgccgagaaccccatctactcccgctatgtgatgtgcggccacggcacccgcgtggaggaacgcctgctggccgaaagctggcaggagcttgtctccaccgaggatctggtcatctataagcgcagttgaacacatctggaaggataacgaagctatgcagaaaatttcttatgtgatcccctgctaccgttcccagcatacggtgggggaggtggtggcggagatcaccgccaccatgaagacgatgccgcagtatgactatgaggtcattctggtcaacgattgctcgcccgatgataccatcggcacgatccgtgcgctggtggccgcggatgaccatgtgaccggggtggatctggccaaaaacttcgggcagcatgccgcgctgatggcaggcttccacaaatgcagcggggacatcattgtctgtctggacgatgacggccagacccccgccgatgaggtgggcaagctgctggagaagatcgatgccggttatgatgtggtttacgccagctacgacaccaaaaggcaggccggctggcgcaatctgggcagctgggccaacagcaagatgaccgagatcatgctgggcaagccgccggagctggtcgtcaacagctactttgccgcccgccgctttgtggtggaggagatgctgcggtatgagcattgctacccgtatgtgatcggccttgtgctgcgctccaccaagcatatctgcaatgtgccggtgcatcaccgcgcccgggaggagggcagctccggctatacgctgcggaagctgctgaacctctggatgaacggctttacctcgttttcggtcaagccgctgcgtattgccacctatttcggcacgctgtttgcagcagcgggctttgtctacctgatctatatcgtcattgaccacttcacccgcggcgcagccccgatgggctgggcgtccaccacggcgctgctgctgcttttgggcggcatgatcctggtcgtgctgggcatcatcggcgagtatgtcggccgcatctacatgtgcgccaacgccgcaccgcagtatgttgagcgtgaggtcatccgccatagggaggacaacgcatgaggcagcaggcaaaatggttcctcctgctgcatgtcattttgggggtatatgcgggcagcagcgtgtgcagcaagctggcggcgcagcagccgtttttgagcgcggcgttccttctgctgtacgggttgatgctggcggcgcttgttgcctatgccatcggctggcagcaggtcatcaagcatctgccgctgacaacggcctacgctaataaggctgtaacggtcgtctggggcattctgctgggcatggccgtctttggcgaggccgttaccccacggcaggtcgtgggggccgtcatcatcattgcaggcattgtgctgtttgtgcgtgccgacaacgaagaggggggcggcaaatgaatcaggtacagttgccctatgtgctgctctacctgtgcagcacctttctgtcgtcggtgtcgcaggtcttgctgaaaaaggccgctatgcgggagcatacctcccttgtggcggagtataccgactggcgcgtgattttgggctacggcctctttgtggggtgtacgctgcttacgatgctggcatacaagggcgtgccgctgaacatcggccctgtgctggaggctaccggctatctctatgtgacgatcttcggcgtgacgatcttccatgaaaagatgaaccctaagaagatcgcggcgctggtcatgatcgtggcgggcattttagtgtatgcactgtaacagaaaagcaaaagccctctctttaccataaacaataaagcaccccctgcctgtacggcaaatacaggcagggggtgctttgctttacaaccgctccggcaggcgtctgcgcctttcgggcacgctttgcagcgctgcggcagcgtaatccagtgtcagggccagcagcaggccgaacacgacatcaatgacgctgtgctgcttgagcagcatcgtggacattgtgatggacacgcacagcaccatggcggccgggcgcatccagcggcggcgcggcgcgtcaaaaatgctgctgcggtaataggccagcatcagcgtgaccgagttgaaaacatggatggacgggcagacattcatcggtgtatcgctgcggtagatcgcacggacaagccgggcaaaaatgtcgctgcccggcacaaagcgcgggcgcagcgccagcccgttcggcacgatggcgtagaaaagcagtgccatcgtcatgccggtgaacagcggcaggcaaagccgccagaaatccccgcgcggggccttgtacagcaggtaaaacagggtgaacgggatccacgggaaccacagcagataaggcacaatggcatatttgcagaaggggatcaaatcgtccagacggcagtggacccacaggtcgggggattggatcgtgcgctccagcagcgcgaaaaaggtcagataaaacagagcatagaacgccatgaaccagaccggatggcgtgaacaccagttgcgcatacagtttgcatcctttcgttgatgtatcattatacgccccgggcggggcataaaacaagcgaaattccgcacaagatatagccgggttttcgacagaatattgtgcggctttggctgcctgcttctgtatactaatacgaacgagggggaagtgttactgcgcgcagaatgtgaaaaagttgtaaattgatgggaagcaaaaagccccgccttgacggcggggcaaaatttatgaaattactcccccagcgagacagggtggtcggtcggggtatgcgcgctctggtactgcagcgcggcggcgatgaagcccttgaacagggggtgggcgcggttcgggcggctcttgaactcggggtggaactgtgcgccgaggtggaagtcgcgccccgggatctcgaccgcctcgacaaggcggccgtcagggctggtgccggcaatgacaaggcccttctcctcaaactcggcgcggaacgcattgttgaactcatagcggtggcggtggcgctcatcaatttcggtcgtgccgtagcattcggccatcttggtgccgggggtgatggtgcaggggtacttgcccagccgcatcgtgccgcccttcgtctcaacgccctgctggtcgggcatcaggtcaatgacattgtgctggccctcgggggcaaactcgctggagttggcgtccgcgtagcccagcacattgcgggcatactccatgaccatgatctgcatacccaggcagatgccgaagtaggggacatggttctcccgcgcgtactgggcagcctggatcatcccctcaataccgcggtcgccgaagccgccgggaatgatgatgccgtccgcatcgcccagctcctcggcgcagcagctctggtccaccagatgctcgctgtccacccacttgatctcgaccttgctctcattctcaaagccggcgtggtacaggctctccataacgctgaggtaggcatcgtgcagcttgacatacttgcccaccagtgcgatggtgcaggtcttgctgcgggtggcgatgcggctgatcagctctttccactcggtcaggtcgctcggcggggtctgcaggtgcagctggcgggccacaacattggtaagccctgcggattccagcatcagcgggcactcgtaaaggctcggcatcgtcaggttctcaatcacgcagtcggggcgcacattgcagaacatgctgatcttgcgcttgatgtcattgccgaccgggccgtcggcacgcaggacgatgatgttggggcagatgcccatgccctgcagctccttgcaggagtgctgggccggcttggacttgtactcatcggagccggaaatgtagggcaccagcacgacatggatgtagcagcagttctcggggccctgctccagcccgacctgacggatggcctccagaaagggctggctctcaatgtcgccggtcgtgccgccgatctcggtgatgacaacatcagcctcggtgcttttggcaaggttgtagatgtagctcttgatctcgttggtgatgtgggggatgatctgcacggtctggcccagataggcgccctgacgctccttgttcaggacattccagtagaccttgccggtggtcaggttggagtatttgttcaggttttcatcggtaaagcgctcataatggccgaggtcgaggtcggtctcggtgccgtcgtccgtcacaaagacctcgccgtgctgcagcgggctcatcgtgcccgggtccacattgatataggggtccagcttctggctggcgaccttcagcccgcgcgttttaagcagccgccccagactggccgccgtgatgcccttgcccagaccggagacaacgccgccggtcacaaaaatatacttcgttgccataattcaccctccataccggggacgcagaaacgcccgccgtatcccaaaaaaattcctttccattatacatcggaaaaaatcgtttttgcaataaggcgggcgtaatttttaatttttgttaaaaaataatggcgcagactttagattcttcagcttcggtgggtgtacttgaggatctcgcgcatcaggacccgcatgtcgagcggcttgccgacatggctgttcatgccggactcgaggcaggcgcgcacatcatcggcaaagacattggctgtcattgcaatgatcggcgtgccctcatcggggccaacgccctcaaaggcgcggatgcagcgggtggcctcaaggccgttcatctcgggcatcatgacatccatcaggacggcatcgtaggtgtggggcgcagcgtgctggatggcatcgaccgcctcgcggccgttggtcacggccgtcaccttggcgccctctgcctccagcagggtcacagcgatctcgctgttcagctcattatcctcagccagcagcaggtgcagccccgcaagggtcggcttttcctcctgcttggcgggctgctgctcggccacagggtggggcgtggggtccactggcagcgacagccgcacgatgaaggtcgagcccttgccgggctcactctcgacatcgagcgagccgtgcatctggtcaacgagcttctttgtgatggccatgccgaggcctgtgcccttgtagtgggtgcggcttgagcgctgctcctgcgtaaagggctcaaaaatatgctgcaggaactcctcgctcatgccgatgccgttgtccgtaatctccatccgcagatggacaaggccttcctcatacagggtctccttggcgcagaagcgaatcgtgccgccgtccggcgtgtacttgacggcgttggagaggatgttgatcagtacctgccggacatgcagctcgctgccgacgagataggggtgccagaacgggccgatctgcttggtgaaggtgagattgcgctcaatgatctgcccctccacgatgtcgcagcaggcctgcagcagtacgcgcagatcaaagggattgttgagcagcttcatgctgccggactcgatcttggacatgtccagcacatcgttgacgagcgacagcaggtgggaggctgcgccccgcatcttggtaaggcagtccctgacgcgggcctgatcctcaaagttttcctcggcaatatccagcatgcccatgatgccgttgatgggggtgcggatgtcgtgggacatgttggacaaaaactcggtcttggcggcgctggcctcctcggcacggtgcagggcagcctcggtcagatcgcggaagcggcgcgcgcgcatcgaaagcaccacgcagacattggtgatgatcacgcagagcacgatgagcaccacaaagaggggatactggtaggtcaggcgcaccaacgagaattcctgctggcccagattgatatacttattggtcagcgccacgacatcggcacgggtcaggctgtccacgctcttgttcagcacgctgagcagaagtacatcatagtcagcgcgcacgccgatgcagaagctgcggcgctcatcgctgagcatcgcgcgcagctcgttatacttgtcgtcaaagacggcgcgctcggcctgataggtgtaggtgtagcaggcgtccgcatcgccgctgcgcacagccgccagacagtcgtcaaaggagtcggcgtattttacgctggaaatatcctgcaggcccggcagctcaagcgaatcagagttgaaattgtcgggcacgatcgccttgctcagcccgccgctgtgactgcgcagcatgacccatgaaaactccgccgaaaggtaggaatttgtcagctggtagccgtaatcctccgccgtggagtaatcatcggagaaatctatgacgaaatcagcaccgctgctatcaagcatcgtgcggtattcactgcggctggccggtgccaaaaagctgtagtgcagctgggcgcggtccgccacgagcttaaagaggtctaccatgatgccggtcgggcagccgtcctcgtccagataggagtaggggtagcggtccgggttgaccagaacctgaaagatggtgccgtttgcgttgtgggtggtgatgtagttttcctcagcggcggtcaggtagagcttgttgctggagtggatgttcttgttgtacttgtcaaacagggtcgtgcgccaggtggggtcatcgcggtccatcttggccagtgcgtcattgaccagctgcagggtggcgctgtcgtccttgcgcacggcaatgtagcagtcctgcaggtcaaaggtgtcaatgatccactcgttgttggtcttgcgcagccggttggaaacggccgctgtgatcaccccggtgcgcagcgccagcgaaagctcctcgtccgtgtcgaagtagatcggcgtgtaggtaaagccgtgctcctcggcgtaatggataaagctctggttgcggccgttgccgcggcggctcatgccgacgatcatgccgtcgtaggtttcgtagtcgcccgcaacgatgctgcggttgccggccttgacggtcagcatcgtggccagattggagatcggctcgctggagaaggcgaagcgctcggcgcgctccggcgtctggcgcagcgtgggcagcaggtcgatctcgccgcgctccagcatgtcagcggcctcgttggcattacagtcgtaggccacatactcaaactttacattctcatactgggcgatccgctgcagtacctcgtaggaatagccgctgcggtggccgtccttatccatgacatggtagcccgtgtaggcgtaaaagcctacgcgcagggtgcgctggggggtgtcattgctgcccgccgcgctggcgggcatggcaaagcccagtagtgcggccagcagcatactggcaagcagcaggcagcagaccgcgcgccgcagggcgggaaagctctccttattattgtacatggcaggggcactccggtttcctgtgcggcggcagaggcaccgcacatagtattctgcaggaccggcctgcaagtgggtgctttacagctcccggaccgccgccagcacttcctcatgggcggcaaggacgggcggccagaggcttgcatcctccagcggcttggggccgcgtaccgcatcgcagagggcggcggcggccttgtacaggcggtccatgccgaggttctgggccacgcccttgagggtgtggctggcgcggaaggccagctcccagtcctgcgcgtccagcgcagcccgcagctgctcaaagctggggtcgccggggtatttcagaacaaattttttgatgagcgcctcgctgggcaggcggctgagggtggcgctgtaatcgccgccgacacgggcataaaattcctgtaatgtcatggtaaatcacctttctgacaatgaaattatttttcctcagtatattggcggagcaggcagcagtttcttgtctgcttggcatcgtgcagcagtgtctcggcctgtacaatggccggctcgatcgggcaggcgccgtacacgccgccgagagagaccgtcaggcgcaggtcggggtagtcggtcagccggatcgcctcgaccgaggcgcggatctcctctgcccgctgtgcaaagatatgcggcgagatatgggggaacagcagcaggaactcgtcatcaccgtagcgcaccagcgcatcgctgctgctgcgcacacaggccgagaccgcacccaccacggtgcggatcgcaatgtcgccggcctgacggccgtaggtctcgttgattgtgccgaaatggtcgaggtcaagcagcaggacgccgtccgcctccacctgctgcagcagatggctctcaaaaaagctgcggttgtaggcgtgggtcagcacatcgcgggaaagctcgcggtggtagtcgcaaagctcctcaacgggggctgcctgccccactgcgcccagatagaaggggggatcgttctcactccagatgctgcgcagggcaatgcggtgccagcgcagctcgccgtcaacgggcagcggcatcgaaagctcggtgttggggtgggcactggtggtcgcgcgcagcgctttctggatgcggaggataccctcccgcgtgaagccggatttgtcgatgtcctcgggcagatgcagctcggcagggaccttcatatgctcgaccgcccacggcgaaaagtggaccagacccgtggtatcgttgtattccatttggatgcagcgggcgtttttgacaaaaaagtccgctttggcacgcagtaccgacagcacgcggagcatgcggtcctgcccgggcagcgcgttctcctccagcagcgtctccgagaggtgctgcgcctcggcaagggtgttgcggggggcatcggctgcggcggaggtactcagctcggcctgcaggcgcggcgcggcctcctgcaggcactgcagaagcagcgggttgaaggcaccgcactcgccgttcaggatcatctgtatggcggtgtcatggctgtaggcctttttgtagcagcgctcactcgtcagcgcgtcatagacatcggccatcgccacgacctgcgcggcaatggggatatcctcccccttcagcccgtccgggtagccgcgcccgtcataccgctcgtggtgccagcggcagatggcgtaggccgtcttgaccagatcgctctcctgctggaagggcagcttgtcgaggatctccgcaccgatcgtggtgtgggtcttcatcgtgtcaaattcttccttcgtcagcttgccgggcttgttcaggatggattcaggaatgttgatcttgccgatgtcgtgcagtgcggacgccgtgctgatcagcgatatatcggcggaggtcagcttgtagcggtcggtctgctgtaccagcgtgtgcagcaggatttcggttgcagtctggatgtgcagcacatgcaggccgctctcgccgttgcggaattccacgatatggctcaggatgttgatcatcgtggagttgcttttttctttttcgtagacctgctcggccaccagctgaaccagccgcttctgcttggcagaaagcatcagggtgttgataacgcggcggcggaccacggcggtgtcaaacgggcggctgatatagtcgcttgcgccgaggtcataggcgcgctccacaaagctggacgcattctcggcagagatcatgatgacgggaatgtcatcgatccagtgacatttcttcatcatggccagcacttcaaagccgtccatctcgggcatcatgatgtcaagcagcagcaggtcgatattctcgtccgactgcatgaccgacacggcctgcaggccgttctccgcctccagaatgtcataaccgtcacccagcatctctgtcagtatggcgcggttcatggcggaatcgtccgcaatcaggatcctctgtttcgcttcacgcatgctttcacctgtgcctttacaaaatttaacctgcacggggaagggggcgcagacccccatactgtctatattatagtatatgactatcgttaaaagcaacagatttgtgcaaaatagtcgaaaacagtcgaaaaatgaagtacaaaaaaccgggcagccctcacggcgggtaggctgcccggtataacgcaacacagcagcaagcccacggcaggcttgcgggtcagtttctttttctgcccggtgcgatggcggccgccatgctgacagcggctgccgccagagcggggtaaagcaccagacagaatgcctgataccagcttggcacaaaatactgccagaagtgcggcagcgtgtcagcggcgttcagtgtgatgctgctcatcgtcagggtcacggtcttgttttcctccgggctgcaggggtcgagccgcagcgcggccagactggtgcggggcagcgtgtagatgtaccgtccttcgcccacactccgggggaacacccggcggtcggcagagtaatcctcgccgacttttgttgtgtagtacaggcacaattcccgcgcttctccgtcaaactgcgcggtgtagctgatggtgcgcaccacgcggtcaccgacattttccaaaatcatctgcgggtcgccgtccacggtggtcagcgtgccgtcgtcgtttggggtcagccccaccagctgccagtcggtcgcggccattgtctcctcggtcaggcggccctgcgcacgggccagactgtcactgccgaggtggaacgcccccagcacgacccagacggccagcgccgccagataggcggtcagcggcagcgcaccgcgccgcccaaaccatttctgcaaggctttcatcgggcgctcacctccatctgcatcggggcaaagcccgcatcggtcacgcggtagagcagcgtctcgccgctctgggccgccgccagcttgtcggtgaacaaatcggcgtagctttgcacaaaaatatcgtccagcgtctggatatacagcaccgtgcagccgttgccgcgcacgatgctgtccagctcctcggctgtaaaggcgtggtagtaggtgtttttcacaccctcgccgggctgcagctcgggcaggcccagctcgccgccgccgccgatcatctttgtctcgccggtgtcggggtccgtggtcacggtgccggaatagtccaccaaaatcgggtagaaatcaaacacggcgctgaaccagccctcgccgttgtcgccctgcccgacataaaagacgcggtcatcgggggcaaggtagctgcacaccagctcggcctcggcacgctcggcgcggcggtcggtgaactcgctgtccgcaaagcccagcacgctaagctgcggcaaaatcagctggctctggcggaacagcattccgcaggccagcaccagcacaaacagctcaaacgcgggcgcagtctcgcggcgggtcgcagcaaaaaccgctgtcgggccatcggccccgcccttgacggtgatctgcggcagcagcgccaccgatagacaccccagcgcaaggatgaaccagccgatgtaatagctgtaaatgtagcggttgtagtcggtcagctgctcggcctgaaaggtcttgaagataaagccgtagctcagcgccagcatgaggttgtagcccaaaaagcagacgccggacagtgcaccgatgaccgcgatgcgtgccttgagccgccgcgatgctgccgccagaaccgccacggcaaacacgatggcaatcagcgcgaccacattgcggccctgcccgatcatgctcagcttgccgtcactcgtccagaactggtggcccatgtcggccatcgcagtgcggaactggacctcgcgctcggcgtaaaagccctcgaccggctggcccagcagaattttgatgccgttgacaacgaccgcagacagcggggcgctcgtctcgccgacgccggaatcgctggcgctgcggctgacgagccaaccgacatagcgcacattccacagatagtaaattgccatcggtgcggcaaaacaggccaggctgaacccggtgcgggggagcagaccggccttgaaatcgccatcgtcggcaaacagccactcgtccacagccaccagccccgccgccaccagtgccaatacaaaggtattggccttcaggttggcagacagcgccagaatcggcagcacggcccatttgggggccgaattttggcgcagcgccagccatgcggccaccgccccgccgaacacaaggcccgcgggcacatcaccgtagctggtcatgtaggtggtggtcaggtagatagtgtggttgtagtttgtgaagaagaacggcacgcaccacagcacagcggccatcggtacggccacacgccatttgctgcgcgggatagcccccacaacagcggcaaaaacggaaaaatacaaaatgtcataaccgacataaattttccaatctgcataattaccgagaaattggaagaaatacgccagcagcggcagaccggggttctgggtcgcagcccacggtgtgcccagttcggcggtcgcgtacaggtcgttattgaccttggtgatcttgacagcggtggcccaaaggctcagctcgtcaaaatcggcggccatcggctggcgcacaaaaaagtagacggtaaacgccagcgccatgccccagaacaacacactgcccggtgtgaacagcatctgcagcgcatctgtgtgttttttgcgggtgagcagcacccaaacgccgcccgccagacacagcgcgtacaccgcccatgcggcggggtacagcacgcccgccattgcggccagcgtcagcaccgccacaatcagcgacagcgccgtcagcggtgcgaccgccgccgggacgcggcatttcagcgtaagcaccgcgcagccgcagaacaacgccgccacagcgaaaagtacgcagagtagttccatagaattctcctgattttggaaaaatgagtaggggagggattcatccctcccgtgaggttttccattgccgcacacgggcacggagcggtcaagaccgctccctacagggcacccataaacattggtttgtagggagggggcttgccccctccgtggaagcctccgccatcgcgcgccacagggaggaataaatccctcccctatgactgcctttttgcaaagagagagcagaacgccgccgccaccgccggcccaaacgccagcaccagccaccagccggcggagggtacaaaccgcagataccacggccgcgcggggttcagctcgatgccggtgaacagggtcggcacgccgcccacactgtcggggtcgatgcgcagccccgtcacccacttgccgcccaaatcaaaggtgtagacgccgggggctgtcacccgggcaaagaccttctgcgcctcggtgtagtcggtctggccgggtttcaggtaatacagcgctacgccgcccgggggcagccggtgcgccgcgtccaaaaccacggtttcgatatacccctgcccctgccagtagatgcggggatcgctgtcggtcgaaagataccacgcagggtcatcgtccggcggtgtccaccactcgttggaggaatagggtgcaaagctctcggtcacaaggtccgcagcgtccagatgcgtctgcggcatcttgccctgcagctggtagttcagcatcacgccgcagccgacaaggcagcgcaccacccagaacacagccgccagcagataggccagcaccagcagctggcgcggcttgaaaagcggttttttcatttacgccaccccgctttctgccacggccgccagtgtaaacggtacggcggcgtccgcgccctcaaaatggtagagggtcgcgggcatgtcgttcgtcaggccgccctcaaacagggggctgaactcccgctgcaggtagtcgtcggcccggtcgatcaggatataatcgcagtccttctcggccatgtaggccaccagcgtgtccggcacgcagacggccttgtagtcgtacagcgtccagttttcgctctcgaccagattcataaaatcactgtcccagcggtcctttgtctcgcccagacggccgtaaaagccgccaaagccgttcacgacctgcgcggtcagctcatagcggtaatagtaccaccgtgtggcatcgtcgccctgactgatgaccagcacccggtcaggccagtccagcacggtattcatcgtgtttgcgcggctttgcacatcggcgcgcagcgtgtacaggctgtcggccccggtccagaactccgcagccgggatgccgcgccagcagaacacggcaaggatcaccgctgcagcgccgcccagcgcaaggcggcccagccgctgccgcgcgccgtttgccagcaggcagagcatcgtcagcatccacgcctgatagtagggggcaagataacggtcgtaatccttgagcatcagcccctcaaggtcggaaaaattgtagcagtagaggatcaggtggaacagatacagcgccgcaaagcagaacgcaaacccaagatgggccgcaagtacccggcggcgggccgggcccttttccgcagccagccacgcggctgcggccaccatcgtgatagccgccacggcaatgacgccgccgcccaacaggcagatgcgccgggtgaagaacgcgctgcccatggcggtcatgatctgggcaaatttctcggtgcggccgatgcccaaaagctgcttgacgccgccgatcagcaccgcgccgtagctcagcccctcactgccgacgctggcagcggtgtctgccgtgggggtgacggctgccgtatagcggccccagcttaaaaacgccgccagcacaacaacggccagcgcaccggcttggagcagggctttcgggaaggcttttttgatgggcgcatccgccgcaaacagcaggtccagcccgatcaaaaaagccgcgatcagcccgtaggcaaagcagatatctttggtcagggtcagcacagccagcggcagcgcgaccagccaataggtgtgtttatggcgccccactgcaaaatagaggcagagcgtgccgccgaaaagcattgccagcggcaggtcggccatcgcgttgacatactgcacggcgtagttgcccgcagccgtggccgaaaagaagtacggcatcagaaacccggcggcaaacaccagaatgccctcggcccacttcgcgcgcggcagcgcggcggcagcggccaggcaggccagcgccagtgtgtcgatggcggccagacacgcccactcagcccagaggccgaacggctggaacaggaaggcgagcaggctcgtggcagggtaggtaaagctggccttcaggttgacggggtcggccacataaaacgcgccgcgctccacgaccatcttgggtgcaaggccccatgccgtgaactcgtcccactgggtgaacatcggctcttgcacgcagaacagcacccagataaacgcagcaccgcccaaaaatagggcgaagcccggcgtgcacagggcgttctgccatgccttgcgcaccccggcggggtgcagctgcacaaggcccagcacccatatggcggccagtgccagcagcaccaacactgccccggcccgcaggatgcccgcaatgccgcagagatacagcacaacgaccgcgccgctcaacaccggcagcggcagcagggcgggggaaagaccggatttttcgcccaatatcgcgcaagcaccgcagagcagaagcaaaagcgcaagggcatagagaagatgcagcatgggagcctcctttcctgtaatgccttcccctttgggggaaggtggccgaaggccggatgaggggcgaagtccccgtgataacccttacatgggttatagaggcaccgccgcccctcatcagtcgccttcggcgacagcttcccccaagggggaagcccttttacttataaatcgtatacaccggccccacaaaatagtgctggaacaagagcaccgcccctgcaaaggcgtaccacccgcacaggggcacggccagcgcggcggccttttctgcggtcaagcgcggggcaagcgcacggcgggccagtgcggcagcagctaccacaaccagcagccagaccggcaggaaataccgcgtctgcagccccacgatgcgcaccatggccaccggcgtgtaggtgatgtacatcgccgtcatcgcgcccaccgcataaaccagcccgaacacgcccagccagtcggtacggcggcggcccagggcatccgcagcgggtgtgcagagcattgcggccagcagcagcaccagcggcgcagtcaggctgataaacgccacgggcatatccttccagccgaacagacccagctggccgataaaaccgtcgttctcatacagtgtgcccagcaaaaccgcgatataacgcagcggattcttcaaaacaaacaaaagctgcgcgccgccgttgacggctgcgccgccctgccgggcaatcgcgccgtagttgtggcgcaaaagcgtgccgtactgctcaacaccgaaggtcagcgccagcgcacccgccgccgtcagcacggcgtacaccgcgcggctgaaccgcaccttccactcagatctgcgcaccacaaagggcagcacgacccacagcaggttgatgtagggcttggtgccgttggcaaatacgcaggccagcgcatagcaaagcgccgtcttatcgttccatttctcctgcgtcagcagcgccagcatgagataatagcagcccagcagcgttgcgtcataacttaacgatgcgcccatgtagagcgacatcggcagcagcattatacacaaaaaagcaggcttgcacttgtgcgcagtgcgcagcgccgcatagcacatcgccgcgtaggccagcaggttgaccagccgcccgccgtacaggcagcccagtgcccccagcccaaacagccgcgccagcgccatgcccagtgccccgggcaaaaacggcaaaatcaaaaagctgatgggctcagttacggaatctgccgcagaatcgcggctttcccagttgagatactgcgtaaagctgtcccagatgctctcgacccggccgtccttgccgtattgcttcagggcatagcccgccgtgttgtaggcctgctcggcgtgggtatcggggtcggtgccgacaccggccgaggtgtgggcgttgacccacgcgccgggaaaggctgcgaccaactcgtccacatccatcggatagccgcgcgcggcgtcaaagtcgaagcggcccatcgagatcgcgtaggtgcgcaggtaatggtctgtctcatcgggggtctgcagcggcgggtttgcaaaaacgaacaacataccgcacaaaaggatgcatgccgcgccccgtttgacaaaatctttgacccggcgcagcagcagcgccgccgcgcccgccagcacagccagtcccacacaaaagccggtgacggccagcggcgcaaggccccgggcgtccagcccgtagaatacgcgccagtagtagctgaccaccacgcccagtgcggcgcacagcaccaacacgaaagcccaccgggcggcggggtgctgcacggtgggtgaaatttcacgtttgttcggtgtattttccatattacagaatatactgcccgaccttgtactgatccagattaccgcgcaggaactcgatggtcgcggcaaggccctgctcaaaggtgtactggggcgcccagcctgtcagctcgcgcagcttggtggaatcgcccagcaggcggttgacctcgctcttttcggggcgcaggcgctctgcctcgcagacgatctttgcattcgggttgatctgagcgatcagctcgttggcgaggtcgccgatggaatgctccacgccggtggcaatgttcagctcctgaccgatggcggcatcgcagtcggcaatcgtcataaagccgttggccgtatccttgacatagttgaagtcgcgggtcggggtcaggctgccgagcttgatctcggtctggccggccagcagctgggtgatgatggtcgggatgatggcgcggccgctctggcgcgggccgtaggtgttgaagggccgcacgatcgtgacgggcaaatcaaagctgcggtagaagctctcggccagacgatcggcaccgatcttggtggccgagtaggggctttgcccctggaagggatgcttctcgtcaatgggcacatactgtgccgtgccgtagacctcgctggtggaggtgacgagtacgcgctgggtgtccagctcgcgcgcggcgttcagcacattcagcgtgcccttgatgttggtgtccacatagctgtcggggctatggtaggagaaggggatcgcaatgagggcggcaaggtggaacacccgctcctgtccgcgcatggcggtgcgcacgccgttgggatcgcgcacatcacccatgaaaatgtcgatctcattgcgaatctccggcggcagggtgtcgatccagcccagcgagccgaaggaattgtacaggcagaatgcgcggaccttttcgccgcgcttgacgagttcttcggtcagatggctgccaataaagccgtctgcaccggtgaccataacggaatgtgccattgtatgctcctttattcaagggggcagtgccccatacttcactttattacaaaacagtataaccgatttcggggaagatttcaactgtaagttacgaatagtgaatgggcggctgcgtggaaagcccctcaggcctcgcaggctcggccagctccccgcacagcggggcgccttttctcgcgggcttcgcccgcgcaaacggcctcccctctcaggggaggtggccgagcgtcagcgatggccggaaggactctggtcgtgcccggcacagcgcatcattcaaaatttgcggcaaaaaatccctacaaccctattgacattcggtaaattccgtgttacgatatagtcaacctacaaagcacataggtttatcacgaaaaagaggaggtgcaaagcacaatggctcatgtcttcggcagtctgctgcgtcagaatttccgctgcggccgaatgcccatctcccgggcggcagcagtccgggcgcggggcattgctttgcactgcctgtaaaatttcgcgccgcactgtatattctgcccgggagttgcgccaagcagcccccggcttttcttttatacaaaatcaaacagaataaaaacagaaatgaggattctatcatgagcgagcgtaaactgcactttgagacccttcagctgcatgtcggccaggagcaggccgatcccgtcaccgattcccgcgcggtgccgatctaccagaccacctcctatgtgttccccaattcccagaatgccgctgaccgctttgccctgagggccgagggcaacatctacggccgcctgaccaactccaccgaggatgtttttgaaaagcgcatcgcggctctggagggcggcgttgccgcgctggccgttgcctccggcgccgctgccatcgactacacccttcaggcactggcccagaacggcgggcacattgtggcgcaaaaaaccatctacggcggcacctccaacctgctggcccacacgctgcccgcgttcggtgtgcagacgacctttgtcaacgcccatgatctggccgaggtcgaggctgccattcaggacaacacccgcgctgtctatattgaaacgcttggcaaccccaacgccgacatccccgacattgacgccattgccgctatcgcccacaagcacagcattccgcttgtcatcgacaacaccttcggcacgccctacctgatccgcccgatcgagcatggtgccgacatcgttgtccattccgccaccaagttcatcggcggccacggcacctctctgggcggcatcatcgttgactccggcaagttcgactggaaggccagcggcaaattccccgccttctcggagccgaaccccagctaccacggcgtctgctttgccgaggctgccggccccgccgcctttgtgacctatgtgcgcgccgtgatcctgcgcgatctgggcggctgcatcagcccgttcaacgcatgggtgctgctgcagggtactgagacgctctccctgcgtctggaccgccacaatgaaaacaccaaaaaggtcgtcgagttcctgacccaccaccccaaggtggagaaggtcaaccaccccagcctgcccgaccaccccgaccacgctctgtatgagaagtacttccccaacggcggcgcgtcgatcttcaccttcaacatcaagggcggccagaaggaggccttcgagttcatcgatcatctgcagatcttctctctgctggccaatgtcgccgatgtcaagagccttgtaatccacccggccaccacgacccacggccaactctccgatgcggagcttgccgatgtgggcatcggccgcaacacgatccgcctgtccatcggcactgagcatgtcgatgacatcatcgccgatctcgatcaggcgctgaacgcagtcgagtgatgccgctgcgccgctaaataataagacccggccgccgcccgtgggttgcaagccccatgggcggcgggctttgtttacgcagagagccttccccccaggggggaaggtgtctgcggctctgcccgcagacggatgaggggcgacctgccgcaattgcccgtttacggatagttcccccacatacccgcccctcatccggccctgcggggccaccttcccccaagggggaaggcttagggcttgcactgcgtcaatgtttgttgtatcatttatatacaaattctcccacaaaggagctatccccatgccccatatcatcgaaatcacagatttatccgcccccgagctggctccttacaccaagctgaccgaatcccagctgcgcaataagctggagccggaaaagggcatcttcatcgccgaaagccccaaggtcattggcacggcgctggatgccgggtgcgagccgctctcctttttgatggagcgccgccagatcgacggcccggccgccggggtgctggcccgctgccccggggctgtggtctacaccgcagaccgcagcgttctgcagacgctgaccggctacgcgctgacccggggcgtgctgtgcgccatgcgccgccccgcaccgcgccgggcggaggaactgtgccgcagcgccagccgggtggccgtgctggagggcatcgtggactccacgaacatcggcgcgatcttccgcagcgccacagcgctcggtgtagacgccgtgctgctgtcgccctcctgctgcgacccgctgtgccgccgcgcggtgcgggtcagcatgggcacagtgtttcaggtgccgtgggccacgctgggggacacccccgccgactggcccgaaaagggcatggaccgcctgcacgcgatgggctttaaaacggccgctatggcgctggatgaccgcgccgtcagcattgacgacccggcgctgcaggcggagaaaaagctggccattgtcctcggcacagagggggacggtctggcgcacagcacgatcgcccgctgcgactacacggtcatgatcccgatgcagcacggcgtggattcgctgaatgtggcggccgccggtgcggtggcattctgggagctgcgcaagcggtaagctgccgaaaaaatgacggaaattttacaccccgctgaccaaaagagcagcggggtgtgttgtttttaggcgcggagggtgctacaatagaaaaaacggtgcaaaaatgtgcggcatctggggcgcaccgcccaacgaacggaggagctttttacatgggattcctgaaaaaattcacgaagcaggaaatcagctggatgatgtacgactgggccaacagtgcccactcggtcattgttgtgacgatcctgccgatctttttcgacacggtggcaggctacaccgccgacagtgtctccagcatgtccacatggggctttgccaccagtctggctatggccatcgtggcgctgagcgcgccgttcctcggcgtgttcggcgacatacgcggcatgcgcaaaaagctgttcaccgtgtttatgctgctgggcgtggtctcggtcgcagggctggcgtttaccccgctcatggacttcaccgcctcgaccgccgcagcgggccgggtggcggcgatggtgctggtgctgtacattttgagcactatcggctttgacgcatcctgcatttactatgacgccttcctcaccgatgtgacgaccgaggagcggatggactcggtatcaacgctggggtacggcctcggctatatcggcggctccacgatcccgctgctgatcttcctgatcatgaatgcggtcggcgtgccgatgctgacctgccttgcctttatcttcgccctgacggcggtgtggtggctggtgttcagccttccgctgctgaaaaactgcgagcagactaccggcaagccttatcaaaggggcgaccttggcgccagcgtcaaaaatgtctttgttactctcaaggagatcggcgcggacaagccgatgctcatctacatcctctcctacttcttttacattgacggcgtgcataccatcatcagcatgtccaccagctacggcaccaatctggggctggactccgccggcatgctgctggcgctgctgctggtgcaggtgctgggcctgccgttctgcctgctgtacatgaaactggcgtcaaaattcggcgcccgcacgatggtcggtgtcggcatctgcgtctatatgttcatctgcgtgtttgcctttttcatgaacagcctgtggcagttctggatgctggccgtgctttgcgccaccagtcagggtggtattcaggcgctgagccgctcaatgttcggcaagctcatccctgacaaggcacgcagcggtgagttcttcggcttctttgacatcttcggtaagttttcttctatcatcgggccggcgctggtgggcaccgtcagcgcccttgccgcaaaccggatgctggctgcgcaggggctgaccgctgccaccgccaccgctgaacaggtggacgccatcaacaaggcggcagggccctacggtatcctgtcggtcatccttatcatcatcgttggcgcggtgctgtactttgccgttctgccccgcaccatgacaaaggacgagcgaaagatctgaggcagaacagaatataataagaggggagccgatgcggccttgtgccgcaccggctccctgttttttatccggctgttttgctgaaaagcgctgtcattccggcgctttcatgctttctaccatcgagatacgcttgagcagccgccgcatgacaaggttgacaagggcgctgaacagcagcgtcagcgcaacagagtatacaaagctcataccgctgacctcccgcccaaacatgacggcatcgacctcgaccgtgcgtattataaagctgtgcagcacaatgccgcccgccagaccgaacaatgtgccgatcagcgtcagaacaacgctctcgcggttgacataagcgtagacctcggggtcgtagaagcccagcaccttgatggtggcgatctccttgacgcgctcggcaatgttgatattggagaggttgtacagcaccacgaacgccagcgaggccgcgcagacgatgatcaacacgaccaccgcatcgatcgagttcagcatgttcagcacctgcgccacgctgtcctgcgtaaagctcaggctggccacctgctccatcgccagcagatcggccgagatggcatcgcgggccggttcatcatcgctgggcaaaatgctcaaaatggcgttgtagcgcggtgcctcgccaaagccggcctcgtagacggccgggctgatatagacatagttgctgacataatgctcgcaaacgccgctgacggtgaagtcggcggtgcggtcatcgctgttcgtcagggtcagggtatcgcccgcagcaatgcccagcgttttagccatcttctcggtcacgaccacgccctgctgccccagcggaacctctttgcgggagatccgctcatgcaggtcggcaaaatcggcaaagcggtccacatcctcggggatcatcaggtaaacatccatctcgccgtccgggctgtcctgccgggtggattccatcgcaacggtcagcgattcaacggcgttgtcggtgttataaaggtaatcgtggacggggccgctctcggtggcctcctgtttggtgacgatcgtcagcaggtcatagtggtaaatttcgccgtactgcttggtgatgatggagttcagcgaatcagagatgccaaagccagccaccagcagcgaggtgcagccggttacgccgatgacggtcatccagaaccgctttttgtagcgcagcaggttgcggcaggtgaccttccagctgaagggcagccgccgccacagcggggtgatgcgctccagcaggatgcgcttgccggccttgggggcgcggggcagcatcagggcggcgggattctcctgcagggtggtgcggcaggtcagcgctgtgatgccgaccgtcagcacgatgagggtgccgcctgcaaaaagtgcctgccccagccgccatggtgtggcgatggacggcatgtagtacatcatcgaataggcggaccagatgatggacgggaacgccttgaacccgaccgtcagcccgaacaccgtgcccgctgccgccgccgtaaaggcgtagagcagatacttttgcatgatggctgcatcagaatagccaagcgccttcaaggtgccgatctgcaggcgctcctcctcgaccatgcgggtcatcgtcgttgaaacaaccagcgctgcaacaaggaagaaaaacaccgggaagatcgtggtgatggcggtaagcttatccacattggcggtaaaggacgcatagctgacatttttgctgcggtcccagacataccaggtcgggtactccacctcgcgcagcgcggtctcgccatcctcaatctgggcgcgggcatcggccagctggcggtcggcctccgccttggcgtcctcgtactcgatctcgccgtcacgcagcttctgcaggttttcagcaatcgttgccttggcatcgtccagctggctgcgggcatcgcgcaggcggcccttggcgtcattgatctggcggcgcgcatcggccatctgcagctttttgtcctgcagggtggcccagccgtcctcgatctgggcgcgggcaccggccagctgctgtttgccggcctcatactgggcaaggccctcgttgtactgctgccagccctcgtccagctgggccttggcttcggccagcttgggggcattggcctccagctcggcgcggcctgcggccagctgggcggtgcccttttcgtactgcagcagccccagacggtactgggtcagctgccccacaccggccacaaacgcatccagctgctttttgctgtcctccggcaggctggcccaccatgcctcgatggcggcattcagcctgtcgcggatctcatcgggcagctccggggcggactgctgcacccagtcagcggcgctctgcagcgccgtctgcatggcggccgggtcggcggcatcggctatcgcggcgatatgcgcccgtgcctcctgcaggcgctgcttctgctcctcaggcagggtgtcggtcgggatggcatcgatcacggtcagcagatcaccggcctgtgtgcggatggcatcgacctgctcctgcgtcatgttggcggggatgatggtcagatcgccgtactcctgcagggcctgccacagctcctcggcattctggggcggctgcgtgccgtttgcatcgcagctttgggccagccagccgatgaaagcatccagctgctctgcatccacacccattgcatcggccatcgtccggatgccgtcctcgtaggcagcagcgttggcgtccagctgggccttggcctcggccagctgcttttcggcggcatccagttgcgccagcccgtcattgtactgcctgagcccggcctcgtactgggcctgaccgtcctccagctgcctgcgggcagcctccagccggggggcgttggcggcaagctcctcctcgcctgcctgcagctgtgcctcggcggcccgcagctgcgcttcggcctcggccagctgggccgcgccgtcgttgagcagtgcttcgttggacgccagctcgttcaggccgtccgcatactgccgctcaccgtcatcgacctcgcgctggccgtcggccagctgctgcctgccatcggccagctctgcggcggcatctgccagctgctggtcagcctcggccttggcatcgttgtattcagcccaggcatcgtccagctcggcgcgggcctcgtcaacgatgccgctgtaccgcgcctcgcaccgggcatcggcaatgccctcgacccgggccttgacggcgtccaccgtgtcgcggtaatcatcgccgaggctgtcctgcgcaagggcaccctcggcggtcaggtagatctcggtgtaggcctcaaaggcaaaatcctgctgcgggatgtagaataccagcttgactgtgccgttgcccacgctggcaggctcgcgctcaaagctgaaatagtttgcgttatgcacaatgcctacaacggtgtagacggtggtgtccagcttcgtgtccagcgcctcgttggcgctgcttaccacaagccgggtgccgatggggtaggtggggttcagctccatggcaccggcctcgaccacgcactcgccggaggctgcaggcaggcggccgtccacaaggcgcagacggttgatcgtgttgttgtccggcgcgggcagactgtgggcgcggctgacgatggtgtcgccgtctgcctcgaccagcagatcggccgagtagcccggctgtacctcgcgcacgccgtccacctgcccgagtgcggcaacatcctcatcggtcaggcccagggtggagacaacgcgcagatcgtagaaatcggcatcgtccatatagcgctccatcgactccttcatgtcgatgggggtgccgctcagcccggccagaaagccgacgcccagcgccacgatggcaaacacggcagcaaaccggctcagggtatttttaaatgtccgcagggtgtttttacgatagctgcgtgtcatttaccattcaatcctttccacaggggtgggggcagggttcaccgtctggtctaccacgcggccgctgttgatgcggatgacccggtctgccatggcggccagcgcgctgttgtgggtgatgacgatgaccgtgcggccctgcctgcggcaggtggcctgcagcagcgccagcacctgcttgccggtcttgtagtccagtgcgccggtgggctcatcgcagagcaggatcttcgggtttttggccagcgcgcgggcaatcgaaacacgctgctgctcaccgcccgaaagctgcgccgggaagttgttctttcggtcagccagccccacctcgtccagcacggtgtcggcgtccagcgggtcgcggcagatctcagcggccagctcgacattttcccgcgcggtcaggttctgcaccagattgtagaactgaaagacaaagcctacatcataccggcggtaggtcgtcagccgctttttatcaaagctgctgaccttttcgccgtccagcaggatcgtgccctcatcgcaggtgtccatgccgcccagcatattcagcacggtggtcttgcctgcgcccgaggggccgaggatgacgcagaactcacccttttcgatttcaaagctgacatggtcggacgcggcgatccgcgtttcacccatctgataatatttacacacattgtcaaacaacacaaacggctgcggcatgctgaaattccccctgtaaggctatagatacattttattatatcagatttgcgtaaaaatgtcgagatgacggcacccgcgcggtgttttccaatttgactttttccctgcagcgcggtacaattactgataagctcatccatggaaaggggacactttatgccggaaggctatacccatgtgcgcaccgcccataaggcggcggaggcgatccattataagatccagtgcccggcggcgtttgcggccggggccaacggcccggacagctttttttgctacgaggtctggaaaaagcgcgcaaagcgccactacgacctgccggggctgggcaaccgtatgcatgaggaaaagacgggcgcgttcctgcgcagcctttgcgccaatgtcaagacccgcccgcaggtggagtacgcgctcggctttttaagccactatgccgccgacaccgtggtgcatcccttcatttatgccatgtgcaagcccggctgcccctatgccggcaagggtgggcacggctatttggagatcgcgctcgactctaccctccatgccgaggacaccggctccagtctggtcccggtcgaggatgtcagcccgctgcccaccggcgcagagctggccgatgtcacggcgctgctgcacacctgcctgctggaaacctacggcgaggatattcccgtggaatatctggcggacgcattctggcacacctaccggctgcgcgggcttttccccagccgccacggcgtgcgcagggtgctgttctggctcatcgagccgctgttcggcgggcgcggcttcatcacgggccatgtgtcgccccggcagctggatgcccgcctgccggacgaatggaccgaccccttcaccggcacggtgcgggacggcggcctgtttgccctgctgccacgcgcgaccctgcgcagtgagcagtttatgggggcggcgctgctttactggatggataagctgacccccgctgaatttgccgagaagctcggcagcatgagctataccaagggcatcgccaccccggagagtgacccggaaacacaaaatcaaccaacggaaaaggagaccatcgtatgattcgtatcaccatgcaaaacggcaagaccatcgaccttgagctggaccacagcgcagcccccatcacctgcgagaactttgagaagctcgtcaagcagggcttctacaacggcctgaccttccaccgcgttatctcgggctttatgattcagggcggcgacccgcagggcaccggcatgggcggccccggctggcacatcaagggcgagttcctgcagaacggcgttgccaaccccatcaagcacacccgcggcgtcatcagcatggcccgctcgatagaccccaactcggccggcagccagttcttcatcatgcatcaggatgccccgcatctggacggcagctacgccgccttcggccatgtcgtgaacggcattgaggtcgtggacgagatcgcagccgttgcgaccgactggaacgacaagcccaagacccccgttgtcatggagaaggtcgagatcgtctgatttcataaaatcaaaaaggcgcagctgagttttcctcggctgcgtcttttatgttggtgcttataagatcgtgccgccgccgacaacgacatccccatcgtagagcacaacggcctgaccgcgggtgatggcgcgctgcggctcgtcaaacacgacctgcacaaggccgttgtccagcgggcgcacggtggcgggctgctcggtctggcggtagcgggccttggccttgatgtgcatcgggccggtcagcgcagggatcgagatccagttgaaatcccccgctacaagcgtggtcgtaaagagcgcgctctcggggccgactgtgacggtgtttttctccatatccttgccgcagacatagaccggtgcgcccagcgccagccccagtcccttgcgctggccgcaggtgtagcgcaccgcgccgtgatggcggcccacgaccctgccgtcaaggtcaacaaaatcgccgtccgggtaatatttgccggtgtagcgctccataaagccgacataatcgccgtccggcacaaagcagatgtcctgactgtcatgcttgcgggcgttgcagaagccctgctcctcggcaattttgcggatggaaggcttgtccatgccgccaagcgggaactttgtgtgggcaagctggtcctgtgtcagcgcatacagcacatagctctggtccttgtcggtgtacagtgcttttttcagcagccagcggccggtatcggggtcctgctcaatgcgggcatagtggccggtgaccacatgatccagcccgtgcgcccgggcaaaatccagcatcttgtcaaatttcatcgtgcggttgcagtcgatgcaggggttcggcgtgccgccggcctcataggtcgcaatgaacttttcgatgaccttctcgcggaaatcctcggtgtagttcacgacctcgaagggaatgtcgagctggaacgcgacctcggcggcgtcctcaacgtccttggccgagcagcaggtgtgaaagccgctctgccccaaatcctcgttctggtacaggcgcatcgtcgcgcccatgcagcggtagcccgcctgcttcatcaggtaggcagcgacggtgctgtccacgccgccgctcatggcgatcaatacgccgggggtgtttgacataggaagcctcccattaaaaatccaaaaaacgcggcagacaaacatctgccgcgcttattatagcaaaatttcagcccgtatgcaatcaatctgcgaacagcggggtggacagatagcggtcgccggtgtcgggcagcagcgccacgatggtcttgcccttgttctcggggcgcttggccagctcgatggcggcccagacggccgcgccggaggagatgccgaccagcacgccctcgcggtggccgaccagcttgccggcggcaaaggcgtcctcgttggcaacggggatgacctcgtcatagaccttggtgttcagtacatcgggtacaaagcctgcgccgatgccctgaatcttgtgtgcaccggccacgcccttgctcagcacgggggaggtggcaggctcgacagccacgaccttgacggcggggttctggctcttgaggtactcgcccacaccggtcacggtgccgccggtgccgacaccggccacaaaaatatcgacctttccatcggtgtcctcccagatctcagggccggtggtgcgcttgtgtgcatcggggttggccgggttcacaaactggccgggcacaaagctgttggggatctccttggccagctcgtccgccttggcaatggcacccttcatgcccttggcaccgtcagtcagcaccagctcggcgccgtaggccttcatcagctggcggcgctcaacgctcatcgtctcgggcatgacgatgatgatgcggtagccgcgggcagccgccacgctggccagaccgatgccggtgttgccggaggtcggctcaataatgaccgagccgggcttcagcttgccggaggcctcggcatcgtcgatcatcgccttggcgatacggtccttgacggagccggcggggttgaaatactccagcttgccaaggatcttggcctgcaggccctcggcggcctcgatatgcgtaagctccagcaggggcgtgcggccgatcagctggtcagcggaagtgtagatcttgctcatgataggttcctccatcgtcatttctgtttataaatcggggcaaacatgcagtcacagcatctgacggcgacatcgcgggtacggtgcaaagccctttcgcatatctattcatacctttcttgtaggttgataggattgtacaacatattttcccgtttgtcaataggggaatagggaatttttgcaaatatttttctgcaaaacagcttgctttcccattaaccaacctatataataggaataagaaaaacaagggcagcccgccgaccctgcgcaccgcaggcggggggctgtgcccatgcccaaaggagcatccaaccatgatgatttcaacgaagggccgttatgcgctgcgtgtcatgatcgacatagcagagcatcagcacgacggctacattcccttgaaggagatcgccgcacgacaggaaatttctgaaaaatatctggaggcgatcgtgaaaagccttgtcaaggagcggtatctgcaggggctgcgcggcaagtccggcggctaccgcctgacccggtcgcccgaggagtacaccgtgggcagcattctgcgcctgacagaagggggcctggccccggtggcctgtctggagcagaacccgatcgaatgccgccgcatgagcgagtgccgcaccctgccgatgtggcgcaagctgaacacgatgatcaacgactattttgacggcattacccttgccgacttggtcaacacctcccagccgggaaatgattatgtgatttga

SEQ ID NO: 815 - DNA, 21005 bp, unidentified
  source 1..21005: mol_type = unassigned DNA
catcgtgccgcccccaactacacctgctgcgacattgtccggcatggtgattacgacgggtgtgaaaaggcgtatatccgcatcggaggcccgtcagacgtggtcgagaagtatccggtcgtggccgtgtgccgcgacctcgaagagctcaaatcacttgcgctccctgacccgacgcgagaatttaccctcatgggaattcaagggttcgagttccacgacgtgttggaaaacaagacctacgagatcggggtggacgacctgaaaattcccgtcacgacgaaagaggtgctggacttttacccggcggaacatcggctgaaagaaacggacatcgaacaatatgccgcggcttacacggcccgtatcaaggcgtacagggagtatacccgtcagctcgacgccacactcgtgcggcggcttctcgacaaagagcggctgatgaaagtcggcgagagcgacggtttccgcttgaaactccatttcgactggtttgtcattttaaagcgggagaacgaaaggatgtacgcgcctttcaaatacgctgtaaatgcttattgtctggataatatccaaactttcgaccgtcgttatgtcacgctcgaagatgccttgctccactgcctgaacggtttcaacgagaacgcgaacattcctaaccgttacaagtccatcgggcattacctgtcggggaaatcctgacgacgggcagtgtatcgacgggttaccggaggccacgggtgctttccccttgaccggaataccgtcggaacaagtaacaatgtaaccaaagaataaaaaatatgatgaatgattataaaatcaagaacattctcgaatccctgaaagaggaggtcgagaacgggaaggtatccctgcgggaagctgctgtcgaacttcataaagccggctggacgaatttcatcgacatcgacgccacgaggaacctactgaagacccggaatgtaacggggaacggaaatgtcccgggagtttccgacatgatgggaaaataccgcgagatgaaagcggcgcacccggatgccctgtacattttccgaaacggggaatcttgtgaattgtatgaggatgatgccatcgccgcttccggcattttgggcattgccaccgccgaacgcgtcgacgggcaagggaaaggcgtcaaggaactgcggttttcttttcgtgacctggacgtgtatctccccaaactgatacgcgccggaaaccgggtggctgtctgcgaaccgaatcaaaccggttcgggcaaacgagtttgataaccattaaataacaaatattcaaaacccaaagacacatgataaagataacaacgattttcggcgaggacgccgtacgggaatatgaagagaacaatgaactgccttctgaagaatggctggcggataacgggggcgtcgtggacgagaaagagttcgagactgaggcggagtacaatgcctacatcgccggggtaaacgatgccgacggatggagtgattatcatatcatacgccaccggtcggaagaggcggacacctcgagagaggaaaatctctggctacgtctcggaattagcgtccggggcagccgggaggacatcgaaaggattctaaacggggacaccgaaacccttcggaaactgctcgatgccggacgttatgggattggcggagagacctatgtccctggttcgaccgtcgaggggtacaacgaggaccacgacacggagttcgaggaggaagacgtggagttccatttataataaaaccacaccatctgcaataatgataacagtaaaagttctactcggtaaggatactgtaagcatatacaggaaaaccggggatatctcgtcggtggagagcacggccgaatccgggggatatgtgataacccgacatttcgagaccgaagctgaatacaaagcctacgcaatggctgtggaagacctggacggacatgaagactggcagatgctgactcctgccgttacgccggaagctccgttccgcaaaggggaatttgtccggctgacagacgatgcaattaagcggatacgtgaaagtttcggggacggaccggctgactacagaaaggaaatgattttggaggtgattgcctggtgccgctatgaaggcacatggatcattgaagtccgagatatccgtgaagacgatactcaggagttcgatgccgtttttctgcgccccttgacggcacgggatctcgtggctatttccgcaccccgacacccgctatccactgcgatatatcctattcacatccgataacttaaatgatgcatgatggaaaatatattcatactgcccggaaacgaacaggaactgtttaaccggtatttagataacaacgaatacggccctctgaaagaacggctggaactggtcaggaaagccttgagcaacaagctttccccggatgaacgcaataagcacgggctgaacgtgggtgtgcatgaactgtccatggaacgtaaggaactggaaagaaagatattccaaatggcactcaaatcctttgcagaacgggtttgtgacgagcaacgcgctctttgcgaacaggggttctggcaggcaccgtgcggcaaagaggcggaatatatctcctccgctccggttccggaccttgtaacggacgtgaagcagtacaagaccatttgccgctggtgggagaagctgtccgataccaggaggctgaaggtagcggcgatgtttgcaaacgaactgggaccgatatacgggcacgacaccgaaacgctggaacggatttatagccgctggtttctactctccttagatggcaaacaacgcatctaccattcatggaccacaaacgaaaaacagacttcaccatgccatacaaaagctcgggaataatcatcagcgggacacaatatgaccgcaggcagaagctcactccttttcagaaggctgaaattttccaccgttacatgacagaagctgtcagccagcgccagcttgcccgggaatacggtgtcagccgcaggctgataaccttcattgtgaacccagaaagcgaagagcggaacaaggaactgctgagagagaacaaggcaaaaggcttgtataaatatgaccggaagaaacataccgaaaatatacgcaaccaccgtcgttacaaacagagattatttcaagaaggtaaaatcatactaaaagatggatagacaatgagaatacaggagaaacaaaaagcgttggaacaggaagttatagccaacctgtgtgcgataccgaaaatgccggaaaatatgttgccccatacggtatatgtcgaggaggaaggggaagacgggtatggccacgggataccggtatacaccatgtaccggttggaggagatacgcacggacggaagctgcacgctttacaacgcggaaagccgggagcgtttcacctgccgccacctgcatgagattaacatggactggctggtgacagtctgggaacgttatctggaactctgtgtcgagcaggatatctggaaagggaatgccgttgcattcctgaaagaccgtaccggcaaaccggaagaggaaatcatttcattcgtggaaacctcgtgggacaaatgccaggcttatacagacaacctcaaggcgtttcttggggaagataaagaccgggaaatatggatattctctttcccgctggacgaatttgaacgtgacgttccggccgggaaaatcatcgttgattacgaaaataaccccgcaacgcgggttgagaagatgacaccgctggaatttacggccaacatcaatgatgaatgttttgatgaccggaacaattgggtaagagccattgaacttcccaagcaggaataataaactatttgaatcaataaatatgattacaaaagaaaacattggcaacgagacctttgagtctatgaccatcaatgacacgcctgcattgtttacggatatgcggattgaccggaatgccgttccggagggactgtacgcatacgatatccgggagtcggatgacggggaccgtctggcgaccatcgaaccgacggtgatggtaaatcatggcggaaccatcctgaccaggaaagagtttatcacggaaaaggacggctatgtacagattgacgaatacggtttcgaggcctccatgacactggaagagtggcttgaggaaaacaattaaatgtataaaggatatggatattaaggaactgacagaaaggtatcaggatcgtttcgatgcccattacctgcaagacgataacggaaccggcagaaaaggtcggaaacggaaaaaggaagttgagaccccgaattttctcaaggatgttatccggccgatcctggacactttgccggacttgttgccggagtacgggttcaccaaaactacggatgattacgccatgtacggcgagtattaccgtatcaaggcgggtatcgtcctcgtgggaggtttttccatcgatgaggattttaacctgtacttcacgccattgttccatggcaaagcctgcggtaagagtcacaaaatcgacagcatcggacaactcgttgaaatcatccgcgaacaatttgaaagaagggaggtgaagatgaaaggatagtttcatgcaatagacatgggtcgttccgtaatttattgtatatttgtcagatgaagaaagtctgtatatgtatttcggacgaaagcccggcagttgaacggattacaggcactttcatgtttggctgacatcaaacctaatatatctatttgatatgaaaaaggaagagattattcgccgctgttacggcggcatgaaggaaaggcatggcgtggaaaccatcatccttttccatgtcggagattcattcgaggcgtattttgatgatgccgaaacgattacccggatcacggaagtgccccggttcaagatgacggcggcaggtatacctgccatcaggatttccgacgccgccttggaagaatgtagaaaccggttgctggatgcaggatgcaaggtatgcgtgtccgaggtccggggggtatccggccgccacattctcaaaatcaatgaaacaaatacggaaacgggccgatgaattgatattgatagcggcagcaataggtccttggacactgttggtggtagcggtattaatcatcggaacgctgaaatgctgtctgaccacggactcggacagcattgacgaaagtatcaacaaatcaccggggatagtcgcgcatgtcatggtactggacagtacggataatggttttcgggtggtttatgcgacggctgcgccggtaacggatgaaaggtttgccgagatatgcgacaggccgggtattttggaggggttcgagaacctgaaacggaaagctcccgaacactttggcggcaacctgctggaaaccgacatctgtgacttcgcgttgtacgcctaccggtttcctatcgataaggacgtacggatacacaatatctttgtcgccggtaaagagaaaatggacttctatgtccggaacaacccggacctgcccgggtgcgctacatggatgcaccacggtacggaacaagggaaccaatatctgaatgctgacgatataaatcactgtatacccaacggaaggcggatttaccgttattggaaatgccgttatctactgcaaacttctgatactgacgagcgtttcagtcattttacagaggaggaaaggctgtactgaatgcagccttttctctatatatattacacataaccatctgaaaattaataactaaaacgttttgttggcgtgaaaaattggcatatatttgtatggaaaagtgacccattgaaaacagattgtcaattgaaagcaatagattgaatatgaaagaacagtaatatgacatcggaaaaatcgcaactgaagtttgcgagatcggaagagacgggcgaactgatagggttcgtttcgcgccattccaagacacgtaaattgatgggagtccgtgaagactcaagattcggcaagcagatttgtgtcctttcggaagacctgaaaggaactctcgagccaaacatactatactcggtagagttgaaacccatgcacaaagccaacgggtatgtagtcgttgccgctacccccgtgttatttcaggcgcatgtggaaacagtgatcgtcccgaagacattgtatcaagtaactgtgacgttcggcaacaaaaagattttcttcgacccgaaagacggcaagagcgtaatgagccgcacaatagacggtgtgctggaaatcctcaagggacgcaaggatatcaagtacaaggaaggtgtcatcaccgactatctgaatcaggcgcgtgctctggtacgacgtatggaatccgacgggttcatctatacgggagacagacatcagggaggaattcaatgaaagaaaaaccggtcgtgggtattgcgaccgacggtgcccattctgcaaaagagaggttgacacgcttccgggctgtcgacctctcttcaggaaaagaactcttttccaaagctatcggtaactggacgaacaatatcggggagtttctcggcattgtcgaggcggtcagatatgtcatggaacatccggaaagtccgcgaacaatctactcggacagcattacagccatcacgtggtatcgtaacaaacagacagcctcttcacgcagatgcccggcattgcagaaagcggagatattcctcaaagtgatggaggcaagaatcaaggacatcgaagtgctgcactgggacaaccgcctgtggggtgagattcctgccgacttcggaaacaaataacaacatcaatatggcaaaattaaaatcacagtcacagaaatatgttgagctgaaggaggaagactacctgttgctcatcgagaataccatcaagatggaagccctgaagattgccggtatcgaaaagatgcccatatacaaggctatggaacatatccttgaacacgagcacatcgacctgctcgtcaaacccgtttcaaggagatattcttgatttttttaggtggacaataatacaccccacaagcaaaatcaatgcttatcagtaccaaatgatagtatataataacaattaatgtaaatcaatgcaaatcagatgattaagaaagtggcgcatgtacggaattatctataccatacatgcgccactttgctctatacactttttgatttccttgattgataaaagaaggttcttttccagtgttttacaatccgacttttttatatacttttgtcttcagtatcagttggttattgaaaccctctatgtatgcttataagtagagattagcttttttaagcgaaactaactactggttatcaatcaattatcaaacaaaaaaagtttgccagcgatggtttcctcttttctttatatcggcttccgggtcggtcgggagcctattttttcgaatcgacccgcatttcgaccgaggcgcccgaccattggttgatctcccgcttttcggtgcgcaggcggcgtccggcataggagatcctcacctcgatcccgaagggcctggtcgcgtcgatttcgttgtccgcgggcagcgtgtgggggattatatataggtagagcacgaggtggtcgcacggcatggtttgcagcgcggccgtgcggtcggcggcgatgtctgcggggcgttcggcaaggttcgagccgacgtcggccacggtcgatgccgacgaggcgaatccgatgcgccggccggcggcgtcgaaacagccgcacatcagcgccgcattgtaccgccaccacccttcgtagcggctcgtgacttcgattgtaaatcctttttcgtccatgttctgtcggggccgcgcgggccggatacggcgccggatcgattcggcgggccgtgcgcggactatttttccgtaaaaataatacaactgtcgtgcaacgccaaatttatttgcgccccgccgggccgggagtgctaaaactcgcggttttctttgcaaatgtcttattttttcgtaactttgcgcactaaatgtgcgtaaatggaggtagctcaacgatattcgattgcctggaaagggctgaaaaacggtcgtcacgacttccgtttcgaggtcgacaaggcgttgttcgaagccttcgaaagcacggagatcaaggacggacggtgtgaggtctcggtcggtgtggaccgctcggagaagcagctcacgctcgatgtcgggatcacgggccatgtcgtcgtcgaatgcgaccgatgcctggaggactgccgtgtgcccattgatttcgaggggcagctggtggtgaaattctccgacgaggtgcacgaatacgacggcgaggtgatgtggatgctgccgggcgaggaccgcgtggagcttgcgcagtacatctacgaaagcatcgtgctgtcgctgccctaccagcgggtgcatcccgagggggagtgcaaccccgagatgctcgaacgcttccggatcgtttccgaccgggagttcgcgtcgatcgaggctgcggccgaaggcgccggggagcgcggcgggggcgaatgggccaagctggccgccctgcgcgagcggatggaggccgaaggcgcggacggcggagaaggcggtgaggaacccggcggcgcgaaataaacacggataaagatacgtttaaacttataaattatatttaaaaatggcacatcctaaacacaaagtctcgtcgacgcgacgcgataagcgcagaaccaactacaaggctaccgttccgacggtggttacctgctcgaactgcggcgcagcggtgctctatcaccgtgtatgccccgagtgcggcttctatcgcggaaagctcgccatcgagaagaaagctgccgaataattccggcgctcaaaagagtgcatccccgcggggagtgcctcttttttaatttatgaaggttcccttccggccgcctgaatccccggtcgtgtatgttttccggggcgggtcgggagcgggacaggatatcaaccaacactcgtacgagtatgataaagattggcgtagatgccatgggcggcgattatgcacccgaagcggctgtcaagggagccgtcatggcgctcgatgcgatcgggtcggacagccgtatcgtgctgttcggcgacgaagagaaaattaagtccgtgctcgcttcggagggatgtcccgccgagcggttcggaatcgtagcgaccaccgaggtgatcgagatgggcgaccatccggccaaggctttccaggccaaggcggattcgagcatcacggtcgggtttggctacctggccaagggagctgtcgacggttttgcgagcgcaggttcgaccggcgccatgatggtcggttcgatgtatgccgtcaaaccgatcgagggtgtcgtgcgtcccacgatttcatccatcgttcccaccatcgcagggcgtcctgcgctgctgctggacgtgggcctgaatgtggactgcaagcccgaggtgctggcgcagtacggcctgatcggctcgatttacgccgaggcggtgctgggcatcgagcgtccgcgcgtggcggtgctcaacatcggcgaggaggagaccaagggcaacgcccagaccaaagccacctacgaactgctgaaggcggagagccggatcaatttcgtgggcaatgtcgagggttcctatctcttttcgggcaaggtcgccgatgtgatcgtctgcgacggattcgtcggcaacacggcgctgaaaatggccgagggcctctaccgcatcaacacggccttgggctgccgcaatgccttctgggacgccatgaattacgaaaacgtgggcggaacacccgtcctgggcgtcaacgcgcccgttatcatcggtcacggatgctcttcgccccaggcgatccggagcatgatcctttcgaccgaacaggtcatcaaggccgatctgacagcgaaactgcaacgtgcgtttcaaaattaaccaaaacacgaaaagccaaagctaatgggtaagataacagcagctattacgggtgtgggacagtaccttccggaatatatcctcaccaacgacgaattgagccggatggtcgacaccaacgacgagtggatcatgtcgcatacgggtatcaagacgcgccatatcctcaagggcgagggtatcggcagctcctacatgggcgcccgtgcggtcatcaatttgttggataagacgggggtggaccccatggagatcgacgtggtgatctgcgccacggtgacccccgacatgttcttcccctcgacgggtaacctgatcgccgaccaggctggttgcaagaacgcctttgcgttcgatgtttcggcagcttgcagcggctttctgttcgccctgaccaccggcgcgaagttcatcgaggccggcacgagcaagaaggtcatcgtcgtgggcgccgacaagatgtcgtcgatcgtcgactataccgaccgttcgacctgcccgctcttcggcgacgccgccgccgccgtgctgctggaagccaataccgaaggtctcggaatcgtggattcgatcctgcattccgacggctcgggcgagatgcagctctacatgaaggcgggcggttcgcgctacccggcttcggtcgaaaccgtgcagaacaactggcacacgatcatgtgggacggccacgccgtgttcaaggctgccgtgtcgaagatgtccgacgtttcggtggagatgatggagcgtcacaacctcaagggcgaggatatccgtttcctggttccccatcaggccaacctgcgcatcatcgacgccacggcgcgccgtatgggcatcacgcaggacaagtgcatgatcaacatcgatcgcaacggtaataccacggccgccacgattccttcgtgtctttgcgactacgagagccagttgcgcaagggcgacaacctcattctgtcggctttcggcggcggatatacctggggtgcgacctatgtgaagtgggcctacgacggcctgaaggcataagcggggcgatccccggcaaaaggcggaaaccgatgtttccgcctttttttgttcgttttcgcggaatttttttatctttggagccgtaacgccccttttatatcagtaggcggtttgacggaatcttgtacgattccgttttgcaacccattcgactttttcgtatctttgttgagctaaacccattgccgatgaaccgtctgaaccgtatttttcacaacaaacagatcaaactgttttggttcctgcggagtttcgcgcgttaccttacgccgaaacggttgttgcagtcccgtctggaccgggtactcgccgagacggaacgccgccccgactgggagtacatctgtcggcgggcggattattacaacaaactgtcgcctgcgcctgcgacccccccccgcgaagggctgcgtccgttaggcgaccacaagttccgtcggggcgtcaagacggcctatttcttcgatacctacgagttcacccgctggttcagcgaccgcctgctgtggaataccgttcccggggacgtgacgacggttcccgacgtgccgtcgatcgtcaagagcaggccgatctgcggcgacaacgccaattcggtgctgctgaacctcgacaaggttcgccatttcatcttcctgcgggacgacattccgttccggaagaagtcggacaaggcgattttccggctggcgatcacgcggcgtccccaccgcgaacgtttcatgcgcatgtatttcggttcggagtgctgcgatgccggcatctcgacgccccgtcccgaatatcccccggagtggaccaaaccccatatttcgatgtacgaccacctgaactacaagttcattctggcgatcgagggctacgacgtggcgacgaacctcaagtggatcatgtcgtcgaactcgctggccgtgatgccccgtccgacctacgagacgtggttcatggagggcacgctcatccccggttaccactacgtcgagatccggcccgactattccgacctcgaagagcggatgcgctactacatcgagcatccggacgaggccgaggcgatcatcgcgcatgcgcacgaatacgtcgcgcagttccgcgaccgccggcgcgaaaagatcatttcactgctggtcttgcagaattatttccggcgcaccgggcagcgctgattcccggcatttcagtttcctttcggattcgggccgtaatttcgcccgtctgaaagacgggtttcggagggcggtggcgggccgcgggtttcaagaccggattttcgcccctccccctgtcccgagaaacgagaaaaaggagtgtattatgaagatactcattgttgaagacgaaccctccctgcgggagatcatggtccggacgctgacccgggagcagtacgtcgtcgagcaggccgccgattacgccgcggcgctcgacaagatcgccgcatacgactacgactgcatcctgctggacatcatgctgcccggcggcagcggcctgcggctgctcgaagagctgaagaggcgtcgcagcccggctgcggtgatcatcatttcggcccgcgattccctcgacgacaagatcgaggggttggaactcggcgccgacgactacctttccaagccgttccacctggcggaattgagcgcccgcatccgcagcgtcctgcgccgtcaccagcgcggcggttacgagagcctcgacgcgggcaacgtgcgcctgtggcccgacagccgccgggtcgaggtggcgggccgcgaggtggagctgctgcgcaaggagtacgacatcctccactacttcatgtcccgccccaaccacacggtcgacaagaccgcgctggccgaaggggtctggggcgaccatatcgaccaggccgacaatttcgatttcgtctatgcgcagatgaagaacctgcgccgcaagctccacgatgcgggcgccgacatcgagatccgcgcagtctacggcttcggctataaactcgtacagccgtgaaactggtttaccgcatcctgctgcacctttcgtgggcgctgtcgctgcttctggcggcatgggccgtgttgttttacttcacgctgatcgacgagatcaacgacgaggtggacgacgcgctcgaagctcgtgccgaagtgatcgtcaagcgggttctggccggacgggagcttcccgttccggcggacgagggcaacaacggctatttcctgcacgaagtgtcgccccaatatgccgccgcacagcatcacgaacgctattccgacgaggagattttcattcccgaacgcgacgacaaggagccggcccgcgtgctgcgcaaggtgttccgcgacggcgcggggcaatggcgcgaactgacggtgatgactccgaccatcgagaaggacgacctccgggagtcgatcctccggtggatggtctgcctctacctcttcctgctgctgatgatcctgctggtcacggtcatcgtgctctaccgcacgatgcggccgctctacgccctgctgcggtggctcgacggttacaccgtgggggcgcggaatgcgccgctggccgtcgagacctccgtcacggagttccggaaactcaacgatgccgcgcgccgctatgccgagcgggccgagtcgtcgttcgagcggcagaaacagttcatcggcaacgcctcgcacgagatgcagactccgctggcggtctgccgcaaccggttggaaatgctggtcgacgatgcgcatgcgctcaccggggagcagttgggcgagatcgccaaggtgcagcggacgctggactacctcgtgcggctcaaccgttcgctgctgctgctgtcgaagatcgacaacggccagttccccgaggccgaagaggtcgacgtgaacgcactggtgcgccgcacggccgaggacatggaggagatttacgcctaccgcagcatgcgctttgcgctcgtggacgaggggccgctcacggcgcggatgaatccgtcgctggccgggagcgtggtcgccaacctgctgaaaaacgcattcgttcacggcgacgagggcggcgaggtgacggtgcgcgtcgctccgcgtcgcttcacggtctgcaacagcggcgcgggcggtccgctcgacgccgggcgtatcttcgaccggttctatcagggaacgaagaaggagggttctacggggctgggccttgccgtggtcgacgcagtctgccgtctctacgggttgaaggtgtcctattcttataaggaggggcggcattgcttcgcggtcgatttcccggcgtgaaaaaaaatgcaggaaatccgcttttttcagattcgtttcagtttcgggccgcaactttgcagtacgaaattcaattaaaacactacgattatgaaaaagttcacgattcttctcgcttcgctggccgtcatggcctcttcggttcccgctttcgccggtaaagaccggatcatcaccgtcggcgaacttcccgccgttgcgcaacagttcgtccagacccacttcaaggctgtcgaggtctcctacgccaaagtcgacgaggaactgttcgacaaggattacaaggtggtcttcgtcaacggctcgaaggtcgagttcgccaaggacggagcgtggaaggaggtcgactgcaagtacggcgaggttcccgcagccatcgttccgcagcagatccgcgactatgtcgccaagaacttcgcaggccgcaagatcgtctcgatcgaccgcgacaagcgcgactgggaggtgaagctcgacaacggtctcgacctgaaattcgaccttcacttccgcctgatcgagatcgacgactgatccgcattccgctgaaaaccatccgacggcgcccgaatacgtattcggacgccgtctattttgttttataatgtctcgccatttcgatataaaataatttgatgactattttgatacaaatcacgaaaaactattgtatatttgtatcacgaacgatgataaaccgcaaacttaaaacaatacagttatgttaagcaagaaattacacgaagcgatgaacgcgcagatcaatgccgagctttggtcggcctatctctatctttcgatgtcgatggacgccgaggccaaggggctgaagggtgtcgccaactggttctacgtacagtttcaggaggagcaggaccatgcgcggatctttatgaactacattctctcgcgcgacgccgaggtgaagctgctcccgatcgaggaggtgcgcactgcttggacttcgccgctggagatgttccaggacacgctggtccatgagaaggaggttacggccatgatcaacaatctggccgccatcgccgccgaggacaaggattacgcttcgtcgaacatgctcgtctggttcgtcgacgagcaggtcgaggaggaggagtcggcacgcgagatgatcaccgcctgcgaggccgtcgaaggcaacaagttcgggctgtacatgctcgacaaggagctggccgcccgcacctacacgcaggcttcgccgctggcgaccgccaacgcataaacgaaagtttttgtcatagttatttatagtgggtccggcctccgaaagggggccggattttttggttagtcggattatttgactatcttcgcaatagaaaatagaaacaaaggttaagacaaacctttatacctacagtaaaccgttacctgttgtagaaatacggcagtttttatgatggtgtaatatttgtctgaaacttgagccttgtccctgcccgttcgggtgggggacaggcttgggcgtaagggcaactaccatcataaggctgtaacgggccgactgtaggggttgtacctgcgtccttgcttttttataggaggactgccctgcgggcggcggcgtgagaacggaccaggtacatgactggaaataaccgtcacccggcaaaaatgcaccggaacaatacggctgtcgtctttttcagccgccatatttggagtttcccgacatttttccgaaatttaaccgatcggaccgcgccggacatccggcacagcggaaaccgcttcggcagactatgcctaaaccttaaaaacagagataaccgatgaagaaaatcctcttatgctggctggccgcggcgacggcgctgacggccggcgcgcagagcaacgaatggcaggacgccggcgtgaatgccgtgaaccgaatgccgatgcatggctcctggttcgcgtacgaatcgccggaagccgcacaaacgggcgacaagaccctctcggagcggttcgtcacgctgaacggaaactggaaattcaactgggtgcgcgacgccgaccagcgaccgacggactttttccgcgtcggctacaacgacaaaggctggaacgacatgcccgtgccgggactctgggagctgaacggatacggcgatccggtctacctcaacgtcggttacgcctggcggggctggttcaaaaacgatccgccgcacgttcccgtcgagcagaaccacgtgggttcctaccgccgtacggtcgacatccccgcggcatgggccggcaggcagatcgtcgcgcatttcggctcggtgacgtcgaacatctacctctgggtcaacggccgctatgtgggttacagcgaggacagcaagctggaggccgagttcgacctgacgccctacgtgaaacccggccggaatctcatcgcgttccaggtcttccgctggtgcgacggcacatacctcgaagatcaggacttcttccgcctttcgggcgtgggccgcgactgctacctctacgcgcgcgacaaacggcaaattacggacattcaggtcgacgccgcgccttcggccaactacaccgcgggaacggtagccgtcaaagccttcttccccaggcaggcgcggggatgcagcgtcgaactggcgctcaccgacgcccaagggcgcagcgtcgcgtcgcagcagctgcgcgtcacgaaggacgaggagcgctgcacgctcgacgccgggaaagtcgccctgtggagcgccgagacgcccgtgctgtacggactgacggcgacgctccgcgcgccggcgggcgaagtgatcgaggtcattccgctccggatcggattccgcgacgtgaagatcgagggcgggcagctgctcgtcaacggccggccggtgctgatcaagggcgccaaccggcatgagatggaccccgactacggctattacgtctccgaggggcgcatgctggaggacatccgcatcatgaaggagaacaacatcaacgccgtgcgcacgtgccactaccccgacgacgcccgctggtactcgctctgcgaccaatacggactctacgtcgtggccgaggccaatatcgagtcgcacggcatgggttacggcgaaaagacgctggccaagaatccgctctacgccaaggcgcatctggagcgcaacgaacgcaacgtgcagcgcagcatcaaccatccgtcggtcatcatctggtcgctgggcaacgaagcgggcgacgggccgaacttcgacgcctgctacgactggatcaaggcttacgacccctcgcggccgattcaccacgaacgggccgtctattcgcccggcagccgcaacacggacattatctgcccgatgtactggggctacgagcggtgtgagaaatacctcgccgagaatcccgccaaaccgctgatccagtgcgaatacgcccacgctatgggcaactcgatgggcggattcagggagtactgggagctgatccgccgcgaaccgaaataccagggcggattcatctgggatttcgtggaccagtcgctgcgcaagaaaggccgcaacggcgtgacggtctacggctacggaggcgactggaatccctacgatccctcggaccagaacttctgcgacaacggcctgatcggtcccgaccgcattccgaacccccacatggaggaggtgcgctactactaccagtcggtctggacctcgtgggccggcgatgcggggaatacggtcgaggtcctcaacgaaaatttcttccgcggcctcgaaaactacgacctccattgggaggtgctctgcgacgggacgcccctccgccggggcgtcgtcgacggactgaaagccgcgccgcagcagcgcgtgcgcatcacgctcccctacgatccggccacgctgcccgcggcgggcgaactgctgctcgacgtggcctacaaactcaagacggccgaaggcatcctgcccgcgggccacaccgcggcgcgcgcccagctgccgatccgcgaatacgtcttcacggctcccgcggcgaaatccgcagccgaaggtgaatcgctcttcgttgcggacaaccacaaaggcttcctgatcgtcgcgggcaacggcctgcggctcgacttcagccgcaagacgggcttcatcacccgttacgaagtccgcgggctcgacttcctggccgacggctccacgctgcgccccaacttttggcgcgcgccgaccgacaacgacttcggcgccggactgcaacacaaaatggccgtctggaaacagccggagatgaaactcaagacgctcacccatgccgaggccgacggcatcgtcacggtgaaggccggctatgaaatgcccggggtgcaggccacgctggagatcgaatacgccgtcgacaacacgggcgccgtcacgatcgcacagtcgctgcacgccacgccgggggcccaagttcccgacatgttccgcttcggcatgcgcttcgagatgcccgaggcgttcgaccgcctgcaatactacggccgcggaccgggcgagaactacgccgaccgcaaatcgtcggccttcgtgggactttaccgtcagagcgtcgacgagcagttccacccctacatccgcccgcaggagaccggcacgaagagcgacctgcgctggtggcacctcgcggacatcggcggacggggtcttacggtgacctccgacgctccgttctccgcctcggcgcttcactacccgcaggagtcgctcgacgaaggccccgcaaaacgacagggacactcgcccgaggtcgaaaagcagaagaacgtttcggtatgcctcgacaaggtgcagtacggactggcgtgcgtcaactcgtggggcgcgctgccgctgcccgaataccggattccctacgccgactacacgttccgcctgaagatcgcgcctgcgacccgcttataagccgcgccacacgcccgaaggccggagtcccccgcggattccggcctttttatcggccgcaggacttgccggggagacaaaaaatgcgcatctttgtcgtccgttaaacgatcccgaacatgttatacaccgaagatacgcgcatcgaagcgctggccgtacacgtcgtcggcaacaaatcgaaggacgaacccctgacggtctcgcccgaactctcggcacaggtcgccgacgaagggctgatgcgcacgctcacggcctatttcctcggcggcttcaagagcgaggagtgctacaacctccaccacgagaccgacctcgggtgcaacgaggtctggaacttcgcatgcagaatcttcgacgatccggaggcgctcctcgaacattcggtgagcctggccaagcacctctacgagagcggcatgcacccgcagatcaagggcggcgaattttacacggcctacttttcggactgcaatttcggcggcgaacgctgcgacgcgctggggctgttcaagtccgagacgcgcgacacgttcctcgacgtcgaacagcaggccggaggggtgcacatcgcggcccgcgaaggcatcgacatcaaacggctggacaagggagccgtcattttcaacacggaacgcgaggaggggtttgcggtcttcgtcgtcgacaacaccaaccgcaccgaagcacgctactggatcgacgacttcctgcgcgtgcgccagcggcaggacaactaccacaatacgcacaacacgctggcgatgtgcaagaaatacgtcacgaaacacctctcgaaggagttcgaggtgtcgaaggccgaccaggccgagctgctcaacgagacgatgaagtatttccaggagcaggagagcttttcgatggatgatttttcggagaaggtgatccgccagccggaggtcgtggagagcttcacgcgcttccgccaggagtacgaacaggaccgcgacatccgcatcgaggacgaattcggcatctcggattcagccgtcaagaagcaggcgcggtcgtacaagagcgtcatcaagctcgaccgcaatttccacatctacgtccacggcaaccgcaacctgctggagcagggcgaggacgagaagggcaagttctacaaagtctattacgaagaggaggagtaggactacccgagcatgccgcccagcaccaaaccgaacagcacgaggaacaacgcccagtggcacagccggaggtaatgacgccctccggctttttcacacagcagcgacaccagccagaagacgcaccagccgccgaacaccagcagcagcaggagttcgagcgcgaaattgcgcggcaggacgctcgtccccagcagcaaaagaaaagccgtgcagaggaacaggtccactgaaatcatctgaacgccgcagcggcccatcagccacgcctcgtaagctccggaaggggccgttgccgtatcagggcgcgccgccgagtagaagcggttgcctgaaaacacgtgtacgaagaatgcggcggcgagcaacgctccggccgccagaaaccatccgttcatcatcatcccattttacggtaaatacactccggcatgtgccggatcagccacgcaggcagccgccagcggcgtgtgacgaccgccacgctacggcggcggcggatggcccgcacgatcccctccacgacccggtcgacgggcatcacccagaacagcccctcgcccttggccatctccgtcgcgacgaatcccggacggatgtcggtcaccgggaggggcagtccggacttcgcagcccgctgccgcaggccctcggcatagttgat

SEQ ID NO: 816 - DNA, 23975 bp, unidentified
  source 1..23975: mol_type = unassigned DNA
taccggaagcattaccggcagcaataaactttcgggtagccacatgatagatataatactttccccctccggtcccgtcagttgcaagattgggttccaccgtcacaatcgtagggtcgtcatactcggcggcccacagaggcatcgttgaagaagtagcgcagcacaatgccatagctgcaaggattcggttcttcatttttctacgtttttaaagattaatgtatagtctttctttgagtctttatgcagattacgaacgaaggactgaaaaagcacaaagaaaagggactttttttcgttttacctttaaaaagaactatctttgcctgcaaaaacaatttaatttgacgaatatgattatagccgtagacttcgacggaactatcgtggaacaccgttatcctgaaatcggacatgagattccttttgctgtagaaacattgaaaaagctcattgaagaccgccaccaactcatcttatggagcgtacgggaagggcgcttgctggatgaggccgtggaatggtgccgccagagaggagtagagttttatgccgtaaacaaggactttccggaagaggacaccgacaaaaaccgtcattacagccgcaagctgaaagccgacctgttcatcgacgaccgtaacgtgggtggacttccggattggggtaccatctaccggatgattaaggaaaagaaaagtatggcgcaactgttacaggaagaatgggaagaagaccagcccgtaacacaaaagaagaaaaagagatggtggttctgaccaccatctctttttctttccatgccctatatatataaaaggtatcaatccttatcatcgaaatggtcctcacggaggtaacgactgcttccgtgccgggacttcgacttaccggtgtgcgtctccttaccgtagcctccgtaattaccataaccgccatagctaccgtaagaaccgtagcggccgtagcggccataattaccgtaaccgtagtaataaccatacttgcgctgttgcaagtccaccccgttaagcacgaggttcatcttcggcaattttccttcctgatgaatcgtattcacgatattaaaattacgtttgagcgaataatcacaccggcacacaataagagtggcatcggccagacgccctaataataaagtatcgctcaccagaccgacaggcggagtatcgacaatcaccatgtcataccattcacggaaacgtgcaaaagcatcgtccaaacgttccgaagtaatcagttcaccaggattaggcggaaccaaacccgcaggcaatacatccagattggcatgcatgccggaattgaatatctgttcacgcaaaaattcgtccgaactgtcttccccggccaaataagtcgtcaacccatgatgtcctgtgaccagaccgaacaacttggccaatcgcggcttacggatatccaatccgaccaccaagactttacgccccatcaaagccatactcatggccagattggttgacacgaaagtttttccttcaccgggtatcaccgacgtacataagagcaccttttcgctcttcttcatgacaaagcccaaattggtacgcagactacggaacgtttcttccattatatcgttggtattctcccgcacgacaatcgcccgttttccgtctttcaattctccggccacgaaaatatcgctcaagaccgccaagtcggtcagcttttcaatatcattacgcccttcgatgcgatagcgcaacaagttcagcacgtatatcagtccggccggaatggctacccccatcaccaaggcgataagcgctaccagcttctttttcggcgaaataggacggatagtgctttccggagcatcgataacctgagccttgtccacggtggaggccaaagaaatggcgttctcctcgcgcttctgcaacaaaatctgataaagtgccgccttcacagactgctgacggcctatatcggaaagcacgcgttcctgcgtcggtgcattggaaagtcgtccgacgaacaaatcatactgttcgtccacattgcgtttctgtacccgcaaattgtcatacacagtagacagagaatgacgtatgcccggataaagggaagcaatggcattcgtagccgagaccactacgggcgaagattccggtgccgttttcagcaagcgtttacggtctaccaccttagcattatactctgcgataatgctattcagcccctggtcggtcagtccgagattcgccggaatgacctccatataattggtcggattttcaacatattcctttaacgatttcaccagaagcatctgtgtctgcaactcaatctgctgcgtctgataattctctatacctttataagcagcctcggcatccgacatcaaatctaccaactggttcctttttttgtacatttccaaatccgactcggtcgtacccagttccgcatcgataatcttgatacgtttgttgacaaaggcttccgtcttgagagccacctcattcttcacctcgttggcatcctcattatacacgcgaatcaactcgttcatataatcttccgcccgctgacgttgcgtatcgttcttcgtgatacgggctattgtcgtcatcttgctgataggttcaatggaagtagcctccagaaaagcctccgccataagcgtcggacgataaatgtaaatccgcaaggcacggtcgtcaaacacacaggtcggatcgggattaggccgtaaagacacccatccggacaaggtcttcaccctcaccggaagcgtcttgacatcggcttcaaaacgttcttccaacgcctcgccttctatatgataccccccctcctgcaaaggtttgatttccagaaataccggcatggccagcgtgtccaagtccaccgaagacatatcggccaaaatgggagacgtacggtaaagctcctcatcacgcaccgtgccgtcgaacgcataacggacataaagcttcaggttggtcacggctctccgggccaacgtcttgctgctcaagatttccacttcattgtcgaaaccattactgttcgtcagaattcccaattgcgaaaagtcggctaatccgttcccgctcatacgacttttataagggtcatcctcctttatcaagacctctgccccggttgaatagaccggagctttatatctcagatacaaaaaggcaatgaaaagacaaccgataatggatatggcaaaccaatgccaatgcaaaatgaccgcatccaatatctcacgataattaaaatcggaaccttgttcttctacagcatcgtttgtttgaaaagttttgttgggcatactattcctaattattctctgattattttcattcaagccacaaaattagaaatctttgacatacattccaaataaataaacgaaatagttctttatttcgggcttttttagttttcaattaatttaagaacaatatattattgtaggattccctaaaaatatatacattcgcagtcacgtaaccaacctttcgaagagataatatatgaaaattaagaatctggaagaatctggcattgtaaaatccgccatcatctgcaacgatatcatattgctgatggtcagttattggtttgcctttgcgttgacccacagtttcgcattggctttcaactttccatacgccctgaaaacggaattgctcatcggtgctctgacgatattccctaccttttatatagctccgcccgtattcctgaaacgtatggtttacggcaacgacattctgggacgttcggtttataccgtatgtctgcaaacactgttcatgatagcagctatcagtctgatacggcggatgaacgtggccggcgaagaactgctcatgggggcctcttttttcttctgcctgctgtatgcggagcgaactatcgtgcacaatatcctgaaacacagccgttcaaaagggcataaccaacgctacgtcatattggtgggacatccgtggaacttagaagatatttaccatacgctgaacgaccatagtcttggattcaagattttaggcatcttcacccgtaaagaactgccggaagacatgcaactgaaaaatctgggagaccggcggatggtgatgagttacttgcgtcaacaccaggaggtgacagacttatacatggtgcccgacaccgactatacagcagaaacggacgagatattccgttattgcgaagaccacatgattcgtttctacgccctgcccgtattcatggagttcctgaccaaacgcatggaattgtcgcatttaggcagtaccatgctgctgagcgtacgaaacgagccgctgcaagacccggtgaaccgcggggtcaaacgacttttcgatattttgacatccggactatttctgctcaccgtatttccgattgtgtacctcattgcaggtatcatcatcaaaatacaaagtccggggccgattctctttaaacaaaagcggaacggactggacggaaaagagttctattgcctgaagttcagaagcatgcacgtcaacaaagacagcgaccgcatacaagccaccaagaacgacccgcgcaaattcaaattcggcaacctgatgcgtaaaaccaacatcgacgagttgccgcaattcatcaatgtgttcaaaggcgacatgagcctcgtagggccgcgcccgcacatgctgctccatacgcaggaatactcgcgcctgatccgccgttacatggtgcgccatctggtaaaacccggcatcacgggatgggcacaggtgcagggcttccgcggcgagacgaaaacactggaccagatggagaaccgcgtgaaggccgacatctggtacgtggaaaactggagtttcgggctcgacctccgcatcatgtggcgcacgctcctgaacatgctgaggcacaatgaggaaaatgcttattaatcacatatacatataatattatgaaaggtatcgtattggccggcgggtcgggcacacgtctctaccccatcacaaaaggcgtaagcaaacaaatgcttcccattttcgacaaaccgatgatttattatcccgtatcggtcttgatgttggccggcatccgcgacatattgatcatatccacacctcacgacctgccgggattccgtcggctgttgggagacggcagcgactttggcgtacgcttcgagtatgcagaacagccctctcccgacggactggctcaggctttcctcatcggccgcgagttcatcggaagcgacagtgtctgcctggtattgggtgacaatattttccatggagcgggattcaccggtatgctgcgtgaagccgtggccaatgccgaacgcgaaggaaaagccaccgtattcggttattgggtgaacgacccggaacgctacggcgtggccgaattcgacaaggccggcaactgtctgagcatagaggaaaaaccggctttgccgaagagcaactatgccgtggtgggcttgtatttctaccccaacagtgtggtggacgtagcggcacatatcaaaccatcggcccggggcgaactggaaatcaccacggtgaaccaagtctacctgaatgaaaggaaactgaaagtaaaaaccctcggaaggggattcgcctggttggacaccggcacacacgacagcctctccgaagcctctactttcatcgaagtcatcgagaagcggcaagggctgaaagtggcctgcctggaaggtatcgcctaccgtcagggttggatcagcgcggagaaattgcgtgaagtggcacagcccatgctgaagaaccaatacggacaataccttatgcgactgagcgaggaggttttcgagcaagaataaactgatgacagaaaactgagttttcgcttgcctctgcacctacctttttgtatatttgtaccctgaatttaaccgaataaaaaatacaatgggtataatagcaaaattattgggcaaagctccccaagaagaaacctcgcgagtgggaggaatggaggacttcatgaccctcatccgtgtatattaccaagccgtaatggccatgcaaatgggaatcagcaatctggccgtactaccggacctgcgcatctttaaacaaacgctgcacgtccccacggtaaacaacaagctaggcatcggcgagaggaaacgttgccgcaccatgctgatggatgtctacggcatggaagaaaactttttcaaggagatagatgccagcatcaagcgtaactgccgcaatgtgaacgacatcaagaactatctgcttatgttccagggattcagccaagacctgatgatgctcatgggtaacctgatgcaatggaagttccgcatgccttcgatgttccacaaggcactgcggggtatgacagccaaaaccatacaccagatcatgaccaaaaacgactggcgcgacgacaacgtacggcgcacttgcgtcaacatccgtcaatatcaaatgcgtttaggctacagcgaagcgtggatgaccgaatatgtccaccgtatcgtccttttggccaagaaagagcctaaacccaaagacgtggacgagaaaaaataaaaaaacgcttgggacgttaaacgttttttcttaattttgtaacgagaaggcaaaaatgacagcagaagaagatgcattattacggacattagaggctcgtgtcactcaggtgacgctggaatacaaagccttgaaagaccgttatgccgcgttgtcgcgcaccatggaagaaaaagatgccaccatcgccgcgctacattcgcaaatcgaccgcctgcaaacagattatgccaacttgaaaacggccaagatgatcgacatcagtagcgaagacatgaaaaacgctaagtcgagattatcaaagttagtgcgtgaagtagacaagtgtatcgcacttttaaatgtgtaaaacatcatggaagtaagcgaggactttaccataaccctgagattggggcagcaacctctgtccatcaccatacggcgggaagacgaggaagcctatcgggcagccgaaaagctgatcaaccaaaaatacaacagctacgcagcccagtatccggatcagggcaatgaaatttatttgtgcatggcggcgttgagcattgcgctctcgttgaaaaaaaacgaattccgcaacgatacacagccattcgttgacagcatgaaacgcatgttggacactttggatgaaaccttagggacgaaagcacaataaaaacattcattctacaggaaaaaccacacgcactgtttccctttctccgcgccatgcggacggggtgagcggtgcgtgattttttatattattcattataaacaaaaaagatatggtatttataatctccgtagcttgccttatcgtcggatgtatagcgggattcgctttattccgctatgtggcaacgggtaaatatcggcaaattatcgaagaagcgagcaaagaagccgaagtcatcaaagagaaaaaactgctcgaagtgaaagaaaagttcctgaacaagaagtcggaactggaaaaggaagtgcagcaacgcaaccaacaaatacagcagcacgaaaaccgcctgaaacaacgcgaactgagcctgaaccaacgtcaggacgacctgaaccgcaaaaagggagaaatagaaaccgaccgtaaacggctggaaaaccaacagcagggattggcgcgtcgcgaagaagagttgaaggaactggaagccaaagaacgcgaaaaactggaagccatcagcgggctgagtgccgacgaagcacgcgaacgcttggtagaatccctgaaagacgaagccaagaccaacgcggcaagctacatcaatgaaatcatggatgaagccaaattgacagccaacaaggaagccaaacgcatcgtcatacaaagcatacagcgcgtagcaacggaaacggctattgaaaatagcgtgaccgtattccacatcgacaacgacgaagtgaaaggacgtatcatcggccgtgaaggacgcaacatccgtgcattggaggctgccacgggcgtggaaatcgtcgtggacgacactcccgaagccatcgtcatttcggcattcgaccccgtacgtcgggaaatctgccgcctggccctgcatcagctcgtagccgacggacgtatccatccagcacgtatcgaagaagtggtagccaaagtgaccaagcaagtggaagaagaaatcatcgaaacgggaaaacgtacggccatcgacttgggtattcacggcctgcatccggaactggtacgcatcgtgggtaagatgaaataccgcagcagctacggacagaacctgttgcagcatgcccgtgaaacagctaatctctgtgccgtaatggcttcggagctgggactgaatccgaaaaaagccaagcgtgccggtctgttgcacgacatcggtaaggtgcccgacgaggaaccggaattgccgcacgccatctacggtgccaaattggccgagaaatataaagagaaaccggatatctgcaacgctatcggggctcaccatgacgaaatggaaatgacttcattgctcgctcccatcgtacaagtgtgcgacgccatcagtggagcgcgtccgggagcacgtcgcgaaatcgtggaagcctacatcaagcgactgaacgatttggaaaatatagccatgagctatccgggcgtaacgaagacctacgccatccaagccggccgtgagttacgcgtcatcgtaggtgcggacaagatagacgacaagcagacggaaagcctgagcggagagatagccaagaaaatccaagatgaaatgacctatccgggacaggtgaagatcacggtcatccgcgaaacccgctcggtaagttatgcgaaataaaacaaaagctttatagacgtatgcctttccctatttcagaaaaagcatacgtctatttttattagacagtcataggttaaaccgaacaatgcaaagtaaaaacatcaagtggatcaatactgcccgtgcactctgcatgatttctgtttacttactccatagcgaattctactatggagatgcaggtttttcatacggttatgctctgacaccgttttatgtcaacgctttcttttttatcagcggttatctgcttttcaaaaaatacatgaaagttccgggaacggtttgtttccccaaaaacaaataccataagatgattgccaatgtggctttcaggttgatcataccactctcatcttttcaaccttgatctacatccccaaaatgatattccacgggaatcccctatcttttggacaatacttctatgatgtatggggtggagtcagttattggtttacttccgctttatccgtcgcacaaatcttattggcggcattattcctgagccaacgtgaccgtatgacgttctatgtaggtacatgcactcttttgtcacttttgggaatatacctccgtaacaccttaccctccccttttccttggtactatcaaacgggaatggtttctaccttattgatgagtttgggaggcgtatatttgagatacgaatcacgaattaacaaattggtatcaaaaccctatgttttcggaatagctgcttttgtgtacctttcctatgtcatgattacgaatcctgcacatccccaaggaacaacaccagacatctgcatgtatttatggaagtatctgaccatcctatgcagcattatttgtatcatcgccctctcacacctgctccctcaggcaaaatggttggaatacatcggaaaaaactccctcatattttatttcttttccgggacaatgctagctttattcggcagcatcacttcgctgctcgctcccgatacctcgtacatcctcaccttaactgtaacttccattgccctattagccgcaacaggaataaactaggttatccaacgacatttcccctaccttacaaacttgcgaaaaatcctatttcccaccccacaagctttgcataagaaatcaaattaatttcttatgcaaagccctacatgcataattaatataataatatgcagactttataatccctattttttccacattcatataaatattccactgccaagagagcactgccaacttccgtgaagacacggaagctttccgtacacggtataaagccgttaccgtattcgtattacgagctataaaccctttctttaaaatagataaccataaggcgtagtcttcatgatgaataggcctaaacaacactttccctactttcgcgacatcataaatacctgtcaagttaccaattacatttcctttaagtaaacattcataagaagccgtatccggtgcttttataatccgacctgcccgcaacccttcttcattcattttttcataattagaaaaaactatagccgtttttttatgattaaacagcctaacctgttgctccaatttagtagggaaccaaatgtcatcactatctaaaaaagcgatgaagcgtcccttagcctgttgtattcctatattcctcggaattgcaggaatccctaaaggcttatagttctgcaacaaatgtatacgggagtcctttttcacatattgttctacaatatctttggaattgtctgttgaaccatcatccacgacaatcaattcccaacacgaataagtctgtgaaatcacagaaagtatagaatcttctataaaacgcccggaattataaaccggcatgattacagataccatatccatcgccatagacacgtcatttagaaaacaagtaatgttttaacttcccaaatgcttttatagacctcttcaaatcagaaggattcgccaacccgaccctcaatctatgaaggatataactaaagcgcaaataatatttcttacgcgcctcgttacaaaaatctaccatatcttgtgacgaaagccccggcaaagaaagtactgtgttatgagtaccgtcggctaaacaatattttgcatagtccaactctatataaccatttgatttagcccacgtatatgcctctgttccaggataaggtattaaagggaaaaactgtgccgtatctgtattcaattttaaagctaactttaaagtctcgttcattgtttctttagtttccccacaattacctaccatgtaacaagcatgaataagcaaaccagccctttttgcatcagagacataccgataaaattgttctacctttgtcccctttttgatattgtctaatatctgttggcttccggactcaattcccggaataatcaatcgacagcctgcctttttcatcgcacacatggtttcatagtccaaatttacccgtgcattgcaaagccacttcaaacgtttattgattcccttgcttaccaataaattacagatttccaaaacccgctttttattaaccgtaaaagtatcatcctctattacgacttctttcacgtctggaaagttctctgcaatatactcaaattcatccacgacattctctgcagaacgtgcccggaagatatgcccatgcatagtctgtggatacacacaaaaattgcaatgaaacggacatcccctccctgtaaaaatctgaatagatggataagtagctgccgcaaaaaaataatccctctcattcaggttatccttaataaaagcagaagcaaacggaatatcatccaaattctttatagaaggcatgattcctgtgcgtataaaagtttcttcccgccttaaacacagtcctcttacttgcataagttccctccgattctcaatagcattggccagttcttttatagtctcatcatattcccctatcgctacagcatccacagccttagaatagcccaatgtctcttctgcacatgccgacgggtgagtcccaaccaaaacaagataggcatgcggatagatttgtttgatatgttctgcaaaattcacatcactttttatggaaggagtactcgtatctaagacaaacaaagtgtggtcatctgctttatcggtaagcaaagctaacgtttcatcctcatttaaaggttttgccggtgcatccaaaaaatatacttcatgaccgttcttctgtacataagcagcggcatatatcaaccataacggataatacaaagcaccactttttgttactgccggacttctggattcccttgagaacttaccatattctgccttaaaaggcgggtttataaaataaactttcatactcaatcattcaataaaaaagcacacttaccctttatttgttttggcataatgcatgcgtttcagcatatctatgccaaagatacaaataattaatctttttacgcaatcaaaagcccaaaaataaaaataacaaaacttggctaaccatcttcctccaccgttattcaatacaatgtgctcaatgtcatatctctttgcagatataggagcaactgaaactccacccaacctaaactcggccaaatctgccggaacgtatttgaaacgcgccccaccctgataagcccgtgccagaaaatcatgatccatcatataacggaacttcacatcgtatcctccccagcggcgataagcggcagccgtcacaaaagtgccttgatggtctacattcacaaaaaaaggcattagcggaaatttcatagacggaatgtcacgtccggtaaagcctgtatccttgttacgtataatcacgttccccctatatatatctataccgggttcatagtatcttgcaacctcctccaacgcattaggcaacaaaatatcatcactgttgataatcacaatcaaatctcctttagcatgcagaatccccctattgaaagcatcactgatgccttcgtccggttcggaatggaaatatcccaaatattcctgatatcgttccaccacatccaaagtcccatccgtagaccctccatctataatcacataatccaaataaggatatttctgactaatgacactttgcagcgtctcttcaatagttctcacactattataacaaattgtcaccacagaaattacaggttttcccatcgttagtattaaaatagattgaacaaaatagataattttcccatccaagccaccatgcgattaccacaattcaaatcacccgacaccaataaatgcactttatttagcccattgcgataattcatcaccttacgagtcagattacggttttctggtagcatctggtctgcataaccattccacaattcttcagctaaacgggaacggatcctttcatgccgtctcagccgacccatgcgttcacgccacctgaatgtcacagaatccaattgccccacggcattggaagaatgctgcctgtataaaatatgcggcacagcatcaaagcaaacttgcgcccctatcgccaaagccacatcatacacccaaacatcgtgcattcgcatgtatgtcggcgtataagccaataatttttcacggagggcatgattgaacaccattgtgcaccctcccacaaattgcgacatcaacgcttccccataagtgagacgtgggtgaatcactacacttttcagaggatttaattcttcatcaaccaactgcgtctgaccaaaatacaaacaaggcatacactgttccttatccatacgggatatggcactttccaacttgtcctccaaccaaacatcatcctgatcggcaaaagcataccactcggattgaggtgcatgaagcagcaaatcccaaaaacttcctgccggacccaagttacgccctgcataccatttcaaagccccacgctcctgctcccattccaaaagattgcatgtaccatctgacgagccgtcgtcacgtacatatacagaacaaacgacatccttttgacgatatatcgaatccagttgctcctgaaggtaacgttgcccattataagtggacatcaaaaccatgaccttacacggtgcctccaactcattccctaattccatcgtatcttcttaccagttaaaacacaaaggtactgctttatttctgaacgccagccaatggtacataaaattctatggaagaatagttttttagtcccaaaaagattaactttgcaagacgaaaatgataaaataggaacaggaatgaggagcagagcataccatcaaaaggtgtctttcgtatccttgtcatatccccaaaaaacttataacgtataaataataacatgaacgtttttatctccaccttacggaaacttttttcagaaagattgcgagtgtttttctacaaccaaattactgtttttttcagaaacaccaaccccaaacaatatgcaacttgcggtaagcacgtagatcttaacgggccactgtacttagatgcacgtcgagtctatttagaagattatacccgactccaacccggcatcagggtaatttcgaaccaaggaacattgcacgttaaaaaatactccgccataggagcaggatgcgtcatcatccccggcacccatatcccgacagtaggacagccccaatatctaagtacttaccatatcaacgacaaggacggagatgtcatcatagaagaagactgttggataggagctggctcctacttattatcacacggaaaaattggaagaggagccattgtagccgccgcagcagtagtaaccaaacccatccccccttatgcggtagttgccggcgcccccgccaaaatcatagcctgtaggtttaccatagaacaaatcttgctgcatgaagcaagcctttatccaccagaagaacgcatgagcaaagaatcattagaggaactttttaaaaatcattatgaggggaagcgacacattggaacccacgaaatagaagaaatcaaagttttaaatatcaaaaaaataaaagaacaaaacaaaatacctgtatatgatgaataacagcggaagagtcattcttaacacaggctttttatatgccaatatgctggtcacattggcagtacaacttatcgcggtcagactggtattacaagcattaggtcccgttgattacgggatttactctattatagcaggacttgtggccatgtttgcttttatgaatgtggccatgtctgccgccacacaacgctttttatcttataccatcggaattggcaaccttaaagaactcaaagaaattttctaccatagcgttcttttgcacttgcttatcggcatcataatacttatcttattagaaattggaggcaactactatataatccacatactccaagcaccaaaggccaggatggaggcagcgcacattctgctacactgcatcactttcagtacccttgccaatatcatcactgttccttatgaagccgacatcaacgccaacgagaatttaggtgccattgcactgattaatattttagactcactcatgaaattaggaacagctatttatatcggtttttcatcacaagacaaacttgtcgtatatggattgctgaccgcaaccaccatcagcctgaccctactaatcaaaatactatattgcagaaaacactatcctgagtcacacatccattttcacccgataaaacaatggaaaaaaatcaaggacattgcatcctttgccatatggaacttcattggttcgggctgttctatcgtacgttaccaaggcacagccatcctattaaacgctttctttggtatcctaattaatacagcctatggcattgcccagcaagtaaacagtttactgatattttttgccaacaccatcgtcagagccatccggccccaaatcataaagagcgaaggaagaggagacagaacgcggatgttgcaattatcttatacaacctgcaaaataacctcacttatggtagcaatattagccatacctctttatatagaaatggatttcatactcaatatatggttgcaccacccccctactacggaatgcgccatgttttgccgcgcatttctcatcattgtattcatcaaccaacttaccattggattacagattgccattgaaagtgtaggcaaaatacgaaacctgcaaatcatagttggatccatgcatttcctgtcactcccctttggatatatgtgcatgaaaattggacttcctgcaaattccatcatgatttgtatcattatagaagaaattatttgtatcggcttacgtacccttattgcctataaacaaacaggattagcatacaaaactttcgttatgaaaaatgtccttcccactactggtttagccattatcacatggggaatattacaaagcctacatgagttactacaacatacaccttggataagctgtatttttgtcagtgctttttctataataataatatcaacggtaacatacaaatatatattaacatttgaagagcaacgagccatcaatggttttggaaaacttatacttaataaaataaaaagcagacaataaaaatatgaatcaatatggccttacttgcccctcatcctgttctttcaatatcctttcatacgaataggctgacaaaaccatcagcatgccagtagaagagatcaataaaggattcgttcctgccacaaacaaataagcaaggtaagaaaccatcatgacaaatgtcaaattatctctcctgtattgataaaaagtatataagggttttaatattacggctaaaattcctatacaccatatcccataattacggatcaattcgacatatgtccattccgtaattgtagtaaaacggccaaaaccagaagaataaaacgatgtaccaggaccttgccccaataagaaataaattggatgccggtcaaatagttttatatatgactctaaatgtgcatatttaatcatatttgaagattctgtagtttctgttgccaataaaacaagaaaaaataaaaacataaaggcaaacaagaccaatagtggataaaataaatacttaacatacttggtataacgtacccgctgataaaaaatcaatccgattataaaaaaaggtaacatcatggagctacgggttccactgactaaaaaagcaaaagagcccaataaaaagggcaaaaacataagataccttttacgccccttacaattaataaatatataatagaagtatcctaaagcaaaggtaaggcaaaccatggacttgtaatacattccaaaaatctctataccgtaaaagctacgatgtgacatcatgattacattatcatgctctaacataaaattccatatcaaaccctcaattaccggatctgaagacgccaacatatataataccgtcaatatcaaacaaatcaaaaaggcaggaatcaaagataatttaatgacgttataatatttaacccacaataaaagaaccaaaggagaaaaaccttttaaaacatctgccaaaacctctaaatcaacgcgattctgctggatttccgcaaaaatataccctaacaggactaccgatacaactataaccaaatgaggcaaataccgaacatcgggcctaaaaaaaacaatattataagctacgaataaaacaaaaaagagattcttcatgttcagaatcatgttattcggatcgaacatgatgataaaaatcaataaggaaaataagaaattacctccccactgaataattttacgattccaactcacgatgtcacgctcattcatgacggaaaaataaaagccgcacgtataaccatgctattgtaccaacaaaggacaaaaacacgaatgccaagaggatgaacagtttcttaggagaatccgccattattggtacactagccccttctatttcagtaaatgccggtgtacgttcctgcaccttggcttcagccatttgcacttgctgcttcatttgggaatatgcagtatacaccaattgcaattcgttctccaaactttcttgttcactgatataagtctgcaggatagttcctttgtgcgtgtcacaaaagtccgcatattccttttgggcatgcaaatatttttttcgggcatccatctccaacttacgataataatccaaatccacacgtgctttactggtatgatactccgtaataaagtcttgcaaatgggcacatacggaatccaccatagtggctgccaccaaaggatcttgagcacgtacacgcaaagtaataacttgtgtttcatcatcaacttggcaacttatcaaaaaacgcatacgctccaacacacctgcgtcttctgcactcatacaaaatggattgattttaccattccctaaaacagtaaagttttccattatatcctctggaggaaatataacattctttaccttatccacccaaccaaacatctgagtccaccaagggttacgagtatgactcttcaaataagaaaaataatctgtatcaatatccccttgcaagcttttcactcgcacatccgacaaccttaccaagaatttattggaatataccacatccggatataatataggaacaatcgcccccccccctgaattgaagttaatacctgccatcgaagccaaagaacctaaccctccggctatattttcttctccctgcaattcggaagcaagactgacactcgcggaatattccttgggaatactaaacgctacgactatagccagtcccattgcaatacaacaattgattataatccacttttttgatttaacaattatcctgacaaacgttttcaaatcaaattcatacataagacaagccgctttatttaaatatattcactaacgtagcaatcatcgtagcaatcgaagccgttgaggtcccgatagtcatcatctccgcagtactcatttttgtcttttgaggtttagaaggcactactatctcacaaccaggctgaatagccttagcagaacgacgaccaagctgctccaccgcaccattcatataaaccgcatagacacgggacttgtgtgcacggtccgcatagccgccggcacgcttgatgtaatacttcaaagacttacccttctcatagtttatggaaatcggatacatcacatcaccactgatttttaccgtattggagaactgtggaatttgcaactcatctccttcacgcaaaagaacgtcgtccacacttccgggatttctcatcgccttttcaagattgatggccacgggataagtatctcccaaatccaatttcagattctggatggaatcagcccgtgccatgtcaaatgtcttctccgagcgcatactctcctcatataattggatctgtgcagccttcatggctacctcccgttgttttttctcttcatccgtcaatttacgttgcaaccgcgcaccttttgcataagccaaagaagacagacctccggccgctttcaccaagtcgctcaaacgatagtttttgttatccatcgcataactaccggaaaagttcacctctccgcttatctttacattgcgctgttccgaataagccggacttttacgcacaaacacctcatcgtacggctggagatgaaagtcttggccgtcacccatcaccaaaccatcacgaagagaaaagctataggtctcagacagtttctcatcatcggtcaccgcatccggattcttaattcggcggaacacatcgacttttgccgtggaagccgcttccgtaagccccccggcctgaagcacaagatcttctatcgtcgtattgtccgcatactggtatactccggggaagttaacctcgccgtcaatggtcaacgtacgctcccctttcatatccaacgaactcgggataaataaaatatcattcttacgcaaagggatatcggccaccgtcccgtccataataccttccacatccacagacaaagcttccatcgtcaggtcttccttttgacggtgcattacagcccgtttaaggaaagcatcttcacgcaacccgtcggccgctttaatcaactgacgtactgtcttgatactcccgtccatctgatattgtccgggatgaaacacggctccgcgtatttctgccatattggaaaaacggggaataatcgaatcgacatacaaagaatctccgtctttcaacaagaagccattcatctcgaactcacccaccgtgtacacggaatactcacgtccgcttttacgtatcagccgcacattatccgtataagcgtccccggcaaatcctccggcataatccaaaatacgggaaacgctttcgtcttctttcatttcataaaacataggacgcttcaccttacctcgtatattcaccaagcattcgtacggccctaccacaatcacatcgttatccgccaaacggatatcgccctttgtatttccgttcaggatgtaatcataaacgtcgatggttgaaaccacacgtccctgacggaatacttttatatcgcgaagtgttcctatctcgctaattcccccggccgcatataaggcattgaaagccgacgaaagcgcactcaatgtgtaagttccgggcaccatcacctcacccatcacttgcacctgtatcgaacgagtttctccgacagtcagggtaatattcgaattagaataaaaacgtcctaactgcttttttacatagtcattggcttccttcacagtcattccggctaatgtcaaaggcccgactccctctattgtcaccgttccgtcgggcgacaccgtcccctcgaaagtagtctgtgaagccccccagacgtctataattacagcatcaccggctcccaggcgatagtttgccggagtcggtatattcatgctcggttcgaaagtcaacatttcattattgaaaatattgcgcccgaacacctgacggtcgtcttccttaaaataattacgataataaatcaacgagtctatatccataaaccctatctcttcgttgagttgttgattcttcaacgttttatcctctccgtcctttatttcacgttgcgaacgaatcatataaccattctgtttctggcgttcatcccgtgtcttttctttgttggtcctcaaacgagaagtaccgcttttagcttgcgtcgtccccgtcaaatccaaggcaccgggctgattttgttctgcttcatattttttccggatacgtcgcaactggtctaccgtcacacccttttgaagcaattgggaaacaatatactgttggtctttccccttctcttgctgttccatgacataacgtacgacctgatcgtccgacatggactgggaaaaaataaattgaaaccaaaaacacgccaaacatgccagcaatatcctccttgccatatacatcagaatttctttcctttcaaaataaagacaatagtagttaaaacaatcttcacatctaaaaacaacgaacgttgttgtaaatattccaaatccatctgcaaacgaatcaacattttttgcatcgaatccgtatatccattgtataaagtagccatagaggtcaatccaggccgcatcaaataaatataatcgtaatcaggattttcttttctaatcaaatcaataaaataacgtcgctcaggacgaggccccacaaacgccatatctccccgaaaaacattccataattgaggtagttcatccaaatgatgttcacgcaagaatttacccacaggagtcaatcgttcatctcctttttttgccaaacaaggtttcccgtctttctctgaatcaattctcattgttcgaaatttcaatatataaaaaggttttcctttgtaccctattcgttcctgtctaaacaagacaggtccatctccttgtttttttaataaaatataaactaacaaaaaaactggagataatatgcctaaacccaataaagcaaatatggtatcaaggccttttttaatggcccgttctaccaaattcattccatcacaaatctccatattgacagacatctgactcattttccaattcattaaatctaatttatctaagtataaaactctataagagtgaaattattgcaaaataaagatatttttttttctctcacaaataaaggcatgaccgtgtataaaaaataaagaatagaatcaaaaataacactctgtttatacctttattcaaaagaaagccttatctttgcatttcaaacatccggggttgacatggatttgacagcaggatggaatggtacgtaagcacgcagagggtcggtgatttcctctataatctcagttaccaagaatttatctggcgaaaacaactacgctctcgctgcgtgatcgaagtatagtagattacctttatttcggcaccaggtgctgaaacgagacatcactcggaaactgtggctccgaagcattccggaaaagtggtgcagctaaatcggagatagtcgtccgcggccttgcacggacggtgaaatcttaaaggataaggcgtaaatgggtggctcgggtcttgtttgcgcacgaaaaccgaaggccgggataagcgtgtagaaagcgtatggtttccctgtttggacgagggttcgattccctccagctccacaaatttgaaagcagcccgtcatgcagtatgcgtgtcgggctgcttctgtattaatcactcgatatgaaagaattagctttaaagtacggatgcaatccgaatcagaaaccctcgcgtatttacatgaccgaaggcgaactgccgattgaagtgctcaacggccgtccggggtatatcaacttcttggatgccctcaacggttggcaactggtcaaggaactgaaagaagccaccggcatgcctgccgccacatctttcaaacacgtgtctcccgccggggctgccataggcctcccgttgagcgacacattgaaaaaaatatactttgtggacgacgtgcagattcctctctcccccgttgcctgtgcatacgcccgtgcacgcggtgccgaccgtatgtcgagctacggtgacttcatcgcactgagcgacacttgcgatgccgccaccgccaccctcatcaaacgcgaagtcagcgacggggtgattgctccggattacacggaagaggcgctccaaatcctgcgtgagaaacgcaaaggtacttacaacgtcatcaagatagaccccgactatgttcccgaaccgatagaacgcaaacaggtgttcggcatcacattcgagcaaggacgcaatgaaatcaaattgaacgacccggctttgttcgaaaacatccccacggccagcaagacgtttaccgacgaggccaaacgcgatttgatgatcgccctcatcaccctgaagtacacgcaaagcaactccgtatgctacgtgaaagacggacaggccatcggcatcggagccgggcaacaaagccgtatccactgtacgcgtctggcgggcaacaaggccgacatctggtggttgcgccaacatccgaaggtgatgaacctgccgttcgtggagaaaatccgccgtgcagaccgagacaataccatcgacatttatatcagcgacgactatatggacgtgttggctgacggagaatggcagaaattcttctctgaaaagccggaaccgctcacacgcgaggaaaaacaagcctggattgcacaaaacaccggagtggccttagggtcggacgcattcttccccttcggcgacaacatcgaacgggcacacaaaagcggcgtgcagttcgtggcacaagccggtggcagcgtgcgcgacgaccatgtaatcgagacttgcgacaagtatggcatcacgatggctttcaccggcgtccgcctgttccaccattaatcctacggcacacttatggcgaacttcggaggagacgacatcgacaaggttatcacgggaggcatcgtgttttcaggaggcgctaaaaagacttccggaaactcgaacgccaaagtgaaaaccaaagccaaaaagaaagcttatatcacgggggcgcacggttccgggtcggccaaaatgaaagctgaaatccgccgccgcagagccaaccggcataaaaagta

SEQ ID NO: 817 - DNA, 44639 bp, unidentified
  source 1..44639: mol_type = unassigned DNA
actgcgcggcagcctttttctcggcaatgcgcttctggacgttgaccatttcctccttggtcagcgggcagctgcgcatggcaatcaaggtgatgacccagccgatgataggcagaccgaacttgagcaccatggtcatccagaagatggccggggtggaaggatccgtgggctgaggcatcgtggtggtgtagcccagcagcgcaacagcgccggtagcaatcacagcagcaaaagaggtgatgagcttatcgaccaggctgtaggtgccggagacaacggcggggatataacgcccgctgcgatccagctcaaagtcaatggcatccgccatatacgaggtgttggaggtggtgatgcacatattggaaccgttctgcaaaagggtcagcagcacatagatgatcatggccgggctgcccatgacgccgatctgcttggggtcaatgacaatgaagaacacgaccagaacagcggtgatgaccatgctgatgcaggtaaagttgacaatgccctttttgctgccgtgcttgccgacatacttggcaccgaacgcggcaaagaagatggacgggatcatgctgataacagtcagaatcgtggcaagacccatgttgccgatgataatgccgctgagaagtgtgccgatgatggcctggctgccgacctgctgggccagcttatcagaagcgttggaggcaatgaagcactgcaggggtctgttgtgcttgagaacctcgacaatgtcggacattttcagcggttcggactttttggtgccgacaaaggtttccggcttatcgtaggcagaaacgcccagacagaccaaaacggtgccgatacccgcggcaagcagcgtcatattgcaggcagcggacaggaatgcctggttgtaggtgccgccgcatttgggcagcagcacgacattgaaaaccatagacatgatcatcggcaccagatagttgaaggcggtcgtccagacgccgatggtcgggcgctggcgcggatcattcgtcatgatggcggggatggtctgcgcagtcatgttggtgatggtgtagccgatgatgtagacaatgtacagcagggtgaataccggcagccccagccccttggacgagaagccggtgaacattccgtacagggcgagcgcctcaatcagatagcccgcaaccagcaaaatgcgcagcttgccgaacttggtgttgacacggtcatacacaaaggcgagcaggggatcggtgatgccgtccagaatacgggagcaggtcaggataatgccgacggcagcggtcgtgatgccgtagccgatgctggcggaataactcgccatgccgatgagggaatagacgctcataccgacaaggccgttgcaggcatagcagatgatttgccaaagcttagcgcggcgatattgtacgccgtcaacttctgaagctgtgggtttctttttgaacattttgttttcctcctagaataattccgcagtagtttttctcactaacaccactataccaaaagcaaaacggcagcaggggataaaaatcataagtcgaggaacaaaaattcgcgtgcttttacaatatacatgaaatattaccccactttactaaataatatcctcacggcttgcgcttgttatgctatgatacaggtacagaagtttcttgatttgctttagacagcacaggtaaggaggaaatcatgcagaaatttgaaaaaggattcttcgtgggcgcggccactgccgcccatcaggtcgagggcaacaacattcattccgactactgggcacaagagcagctgccccacaccagctttaccgagccgagcggcattgcctgcgaccattataatcggtatgaggaagatattcgcctgctggcagatgcagggctgaacgcctaccgcttttccattgagtgggcgcgcatcgagccggaggagggcaagtttgaccctgccgagatcgagcattaccgtaaggtcattgcctgctgcaaggcgcacggcgttgaacccgttgttacgctgctgcacttcaccagccccaaatggctgattgccaagggcggctgggaggcagaatccacggtcgaatacttcaagcgctatgtcagctatgtgatggagcagctgggcagcgaactttcttatgtctgcaccatcaatgaggcaaatatgggcctgcagctggcggcaatctccaagcggttccgcttgatggcagagcaggccgccaaggctgccgccaacgcgggcaaatccgccgagggcagtgtgcaggtgggtatgaacttccagaagatgatggaaaacatgaagtacgccgccgccgaaaacgccgccgtgttcggtacgccgcagccgaaaattttcgtcagcgagcgcacgccggagggtgatctgctggttctgcgcgcccatgccgccgcgcgggaggccatcaaggcaatctgccctgaggtcaaggtcggtctgaccctctcgctgcatgacctgcaggcccagccgggcggtgaagcctttgccgccgccgcatgggaggaggagttcacccactatcttccttatattaaagaggatgacttcctcggcgtgcagaactacacccgcacgctgtacggtgcgcaggggcagctgcccgccccgcagggtgccgagctgacccagatggactacgagttttatccgcaggcactggaaaatgtcatccgcaaggtggcgcaggatttccacggtgatctgatcgtgaccgaaaacggcattgctaccgccgatgatacccgccgcgtggcgtttatcgaggccgcgctggcgggcgtacaaaactgcatcgccgacggcattcccgtcaagggctacttccattggagcctgatggataactttgagtggcagaagggctatgccatgaactttggcctgattgctgtgaaccgcgaaacgatggaacgcaccccgaagtccagccttgcggtactgggcggatacgccaacgcataaaaatagtagtggctgtctgtacggcagccacttttttgtggtatactggtataaaatgaggttgatgcgatggatgtttttcaaaatatggagctgttttctgaactgatccagtgcggcggcaacatttatacatggtgctataatgccgatggcagcctgctgcagagcaactgcccggaggcggggttcctctccggcgcatttgacttattcggctgtaagaaaaaaatgctggactacggcagccggcacacaacgccggtcacactcggcacggccattggcatgacatgggcggctgcctttgaaaaggacggcagtgtgctgaaacgcgtctgggtcatcgggccggtgttttatcaggatgtttcgctgcgcgggattgagcaggggctgcaatattataaccgtttggaaacgagcgtggcatggaccatgcagctgtacgaggtgctgaaaaccgtccccgtgctgcaatgcacggtcttgcaccgctatgccctgatgatgcactattgtctgaccggcaaccaccttacaatcagcgacatcaacagcgagtctttggcacagggacaaagtacagtgcagcagcccgctcacgaccgctataaggtctacatggcagagcaagggcttttgcagatggtgcgcaccggagacttgaactacaagcaggcgctttccgccagcatggggatcagcgcgggtgtgccggtgcgcagcgatgatgcactgcgccagggcaagacgagtatcatcgtgtttacctcgctggtatgccgtgccgccatcgagggcgggctttcgccggaggaagcctatgcactgggggacagctatatccaatccgctgaaaatgcaaaaacattggatgatcttgaaccgctcggccttatgatgtatgacgactttgtccggcgcgtgcataaatgccgcaccaacccgcatctcagccagcaggtgcaaaagtgcgtggactatattgagatgaatctcgataaaaaaatacgcgctgcagatattgcagcgctggtgggctatacggaatattatctgacccacaaatttaaagaggagacgggcttgagcgtgacagattacataaaatttgccaagattgagcgcgccaaggttttgctgaaaagcaccgaccagaccgtgcaggacattgccgctgcactttcttttagcacacgcaactatttcagccggatttttcaggaggtcacaggccaaaccccgatggagtaccgcgaaaagtaaatgcttatccaaaaacctctgtcaggcaaacatcaagtctggcagaggtttttttgttttattcttgtgtcagcgcccggactgttctgaccacgcgggaggcattgatttttacctgctccagcgttactgcgccgctgtcgataccctgcagcagattgtcataatcaccctcgttgccgggcataaacaaatcaccgcctgccgcagccacatactgtgcctgcgagtcgcggttggcagagcgtgcatccccggtcatcggcgtgacccagccggtcatgatgatgacctcatagccgaactcggcacggagaatgtccatgatcagaccgcgattttccgccgtgtgggtgccgttgagcagattgtaggacgtcataacggccttgggctgggactcccgcacgcagatgccgaagccctttaagtagaattcacgcagggcacgctcggaaacgatgctgttgttgcgggtgcggttgtactctttattgttggcggcataatgcttgatggttgtgccgcagcccttgtgtgcctgtacaccgcgcgtcatggccgctgccatcttgccggacaccagcggatcctcggagtaatactcaaaattgcgcccgcaacggatcgaatggtggatgttcagcgttggggcaagccacagatgcacgccgaagcgctccatctcctcgccgacaatgtcgccgcactgcttcacaaatgcagggtcaaagctctgcgccagcgcagtgccgatggggatggccgtgcagtattgggtcttgatttcgcagtcggccttcggcttgccgctgccgcccatcaggctcatcacaagcttcatcgggccggacagcatttccgtaatcgaatccggcatcgaggaatcgtacatctggtaaaaactgaccatgaccttgagcggcgcgctgtccgtgaaaacgccactctccatggccgaagaggatgcagcagaggcaccgcagccgcccagcatggcggcgcacagggcaatgggcaggatgcgatagcaaaaacagttggattttttcatctggaaatacctccgggaaacaaaagacaaaatgcgaacgccgacgggagtggtcatcagcgtttgccattgtatgtcgaccacactcagcttgtaaaaatcacactgcttgcgcgggataaagagctggcactcatcgtcagcaacaccgtgcgcccggatgccaaacccggcacaggtctgggcttgcagaactgcgcccagatgctccgcttacacggcggccggtttgaacacagcctgtccgagggggtgtttacagcggcggcatatttcccgatggagtgagtactgcctgaaatttcaaaatgcccttattatacaaagctttctattttgtatccaagcgcaaaacaatataccctataccattgcaaaacagacgaaagagcagtataataaaagtgaagaaggccgcagagatgcggcttttccaaagcccataagttagctatatctaacttatgggcaaaaatacaagtcccaatgagcgcttcctacgaaagatcgaaggtattggaggaaaaagcatggatcggaaacaagctattggcagcgcgtatcatctgacaggcgggaacaatttttatgacggcatgattacctgttccaccctgagcgggaaagcggtgtgccgtttggtgtgggatatgaacaaggcggaaaacgacgcctatctggaaaaagcgctgtccgggattccggagaatttctccggtaagctgctggaagtgccggtgggaaccggcattctgaccatgccgctttacaagacgctgcccgaagcggaaattacctgcctcgattattcggcggatatgatggggcgggcacaggaaaaagcaaaccgactgaatctgaacaatgtaacctttcagcagggggatgtgggtgcgctaccctttacggacgttgcatttgacattgttttgtcgctgaacggctttcacgcattcccggacaaggaggctgcttatcgggaagtgtttcgggtcttaaaacccggaggcatcttttgcggctgcttctatgtaaagggcgagcagaagcggacggattggttcgtccggcacgtttatgaaaagacggggttcttcacgccgccctacgaaacgaccgtcagtttgaagaaacgattggaaaaacggtacgcagccgtaacacttggaacagtgaagagcatggcatggttcgtctgccggaaagcagaatgaggagaacagggatggttttacaaacgattctggagggccttggactgggggcgctgctggcgcttgtctgcgctgtgggcatctgcaaaggggctgttgggatggtgcatctttatagcccggcggtgcagcagcggtgcgtgacgctgggacttacaacacacgagaaaatcaagcgcgattctctacttttcaaagccgtttgcattcccggctatattggctatgtgctggtttgcgtctatgggataaacggtgcgcacggctttgcggcgagcttctggcagctgcttgtcatcttgtccgttatgaatctcattgaccgctttttgattgatggctactgggtggagcacacgaacgcgtggacgatccccggaacagaggatctgaagccctacattactgcaaaagacaagcagaaaaaatggctttttggcacggtaggcatggcggtcatagcggcggtgctggcggcgattatgacgatttttattcactgagggaggaacccatgaaatacaaaattgagaaaaacaccgtgcaggagacgctggttctcccgctgtattcccgaaagctgtgttcggaattgtatcccaatctctacagggatgaaacagcggtgcgcttgattgatgaaattgactacgacttttcagaggcagagaaaaattcccgcagcctgatgcagcgtttcggtgcgctggaggtcgccatgcggcagtgcgaccttgcttgggaggtgcgggagtatctgaaaacgcacccctgcgcggcggtggtcaatctgggctgcgggctggacaacaccggcagagcctgcgacaacggcagctgcaagatctacaatttggactttccggatgtgatcgccttgcggcagcagctgttgcccgccggggagcgggaggaaaatatcccctgcaatctgaacgatgcggcatggtttgacagaatcgatgcctccggcggggcggtgttctttgcctccggggtgttctattacttcctgacggagcaggttcgggaactggtgcaaaaaatggcggatgccttccccggcggggtgctggtgtttgatgccgccaatcggacggcggtgaagatgatcgccaaaacgtggctcagaacggcaaaaatcaaggatgtgggcgcgtatttcgcggtttccgacgctcccaaagagatcggtgcgtgggacagccgtttacgggtttcgagccggggctatatgctgggctacaacgatttgaaagacccgtccgtcagcgaattttttcgttttcttgcaaaggtcggggataacgggatgaaaatgcaaattgtgaagatcagatttggagacagacaatgaaatatgcagggatgcccatggggatgtgggcactgtttgccgattcctttcaaaagcagctgacggcagtgctgggctatgatgcagacactgcaagagccatggacatcgacgaaaatagttttttacataacgtaaggagttgatttcattgcagaggtattcctttgcgcaatgattttatttggtgacacaggtgctcaacctgccacttgcaaaacttacgattttacgctgttatttcaatccataaacacaaaggctgaaatgtaaataacacatcggctatgccgtataaattcagtaagggggaaggccgattaacactgcgcagaaggctgtgctgcatccggcacaaaatatttccgcaggggaaagtggtcgtagaaggtccagtgcttttcataaagcgcggagaattggccgatgatccagccgttgaggagtgcgcagaggatcgtgccccattttacgcccacaaaatgccaagggccgaaggcaagaaagctcatcgcaacgccgagaaggcagcttgcacagtcgtatccggttttaaaacggttaatatcaacaccgaaatgggtagatacctccttcacgaacagctcatagacctccggcgatatataggtgtggaacattgcagaaacacctgcggcgcagaaaagcatccccgccgcatagtagataccccgcagtgcaaggccgccggatgggagcatcgtcccaagaaacataagcgcgtccagcacaatgccgtagacgaccgcagtaacaaaggaaaacagatacgatatgcgaaaacgccgcagcaataaactcatggcgagcagcagcacggcctgcaggcagtattctgccatgccaaaggtgaaaaagtgccatgcgggtgacaaccaccggtacagcaggtaggcgggtgcaaccaccatagagacgccgaaatcagccttctccatcaaaacaacgccccacgctaccaatacaatgcccagaacataggcaagctcggtgctgaattttctcttcataagaacctcctaaacaaaaaatgagccttttccgtttgataaagaaacggaaaaagctcttttttaattataacatgtctgtcaagccgcggtaataaacggcccgcgatgcctcaggtcttgagctcgggcagcgggatctccggcatcagctcattagaaacgatgcgcagcatatcctccagccgggcaagatcctcgggggcaaagcgctttttggtgcgttccatgacgagatgcagataggaatagctgatattgtagtaatccagatatttctgggtcggccgcaggtgatattcccgcttgtcggcggtggaacggatacgctccacataacccttcttgacaagggaattgattttataggcggcgttgggggtggacagattcatcatgtggctgaactgggcgatggtcggttcccccaaagccgtaatgacctccatgcaaaaggactccacggtcgtaagggtggcctcgcggtcctcaaaccggctgaagatctgcttataaaaatgcagcttgaattttgtgtacacctgaccgaaagcctgatccagcatggcgcgtatcctcctgttggttaatggctttattataccacaatgcgccgcgcaaaaccagtcctcaggcatctgcaatcacaaaagtcagctcagcattcgcggcacgctcattgcctacccatgcggtggccttgcctatgccgatcggcccatgctgctccaccagctcacattccagtgtcagtacatcgccgggcacgacctgacggcggaaccgggcgtttttaacaccgccgaacaaagcaagcttgccctgattttcgggcaggctcagcgctgctacggcaccggtttgggctaaagcctccaggatcagcacgccgggcatgatcggccggccgggaaaatgcccctgaaagaacggctcggtgcgcgtcacgcatttaatgccgcacgcccactggccgggggtgtaatcggtgatcttatccaccagcgcaaaaggggagcggtgcggcagaatcgcttcgatttccgctgccgtcagcgtgcgcggcgggtcattgggggtgatcttcatggttatcctcccagcgttttaagacgatgcaggcgttatgcccgccaaagccaaggctgtcactgatggcgtagtccacctgcacatttcggctcgtgttggggatataatcaagatccagcgcagggtcgggcgtctgcaggtttacagtggccggcaaaaagccatcgtacagagccagcgcggtgaaaacaccctccacaccgccggcaccgcccagtagatgcccggtcatggatttggtggaggatatggccagccggtaggcatggtcaccgaacaccgacttgatagcagcggtctcgcagctgtcattcaggtgggtggaggtgccgtgagcgttgatatacccgatctgttcgggggccacaccgccgtccgccaatgccagccgcatgcaggcggcaccgccgacaccgtccggcgcgggcgccgtgaagtggtaggcatcgcagttggtgccgtagcctacgatctcggcgtagattttggcaccgcgcgcccgggcagcctccagctcctcaagcagcagcacaccgctgccctcgcccatcacaaagccgctgcgctctgcgtcgaacgggatcgaggcgcgagccggatcctctgccgtgctgagggccttcatgctggcaaagccgccgacacccagcgggctgatgcagctttctgtgccgccgcagagcatacggtcctcataaccgtcccggatacggtggaaggcatcgccgatggcgttggtgccgccggcacaggcggtcgtggggcagctgcagatgccctgcaaaccgaacaggatggctgtctgtccggcggccatattgccgatggacatcggcacaaaataggggctgacacgctcaaagcccttttgcaggccgcgggtatgctcggcctcgatggtgggcaagccgccgatgccgctggagaggatcacgccgaaccgtgtgcggtcgatgttttccaagacaaggccgctgtcctgaatagcttcgatggcggcggccacggcaaactgggtgaagcgagccatcttgcgggcttcgcggcggtcaagacgagtgttcggatcaaagtccttgacctcggcagccagcttgaccttgaaatccgccgtgtcaaaggccgtgatcggccccacggcgcagcggccagccttgacggcggcccagctttccgccacagtgttgccggtcgggttgactgtgccaagaccggttatgacgactctgcgtttgttattgctgttcatagctaacctcacattcccataccgccgtctatgcagagcagctgtccggtgatgtacccggcgctttctcctgccagaaaggcaatggcggcagcaacatcctcggggcggccgggcttgcccatcgggatggcggcgtttgcggcggcgcgggcagcctccggcatggctgccgtcatgtcggtcgtgataaagcccggcgcaacggtgttggccgtcacgccgcgggaggcgtattccttcgcaacgctcttcatcaggccgataagccctgccttgctggcggcgtagtttgcctgacccgcgttgccgtgcaggcccactacgctgctgacgctgataatgcggccgtaccgctggcgcatcatcaggcgggcggcggcctttgtgcagaagaaggcgccctttaaattggtctcgatgacagcatcaaaatcggcctctgtcatctgcagcagcagtttgtcggcggtgacgcctgcattgttgaccagtacatccagccgcccgaaggcggcggctgcatcctcaacgagctgcttgcaggcctcggggcggcgcacatctgcctgcagggccactgcctgtacgccgagcgcgcggcagtcagcggcggtctgttcggctgctgcggcgctgccggcatagttgacggcaatatccatgccctcggcagccagtgccagacaggcggcgcggccaataccgcgcgccccgccggtcaccagtgcggcacggcgcggtgtttcgctttgtaccatgggctcacgctccttgtaatgtgcggataagctgctgcagttgggcagcgttctccacgggataacaggcaatcgcgctgccgactgtctttttcacaaagccggtcagtgctttgccgggaccgatctcgatggccgtatctacgcccagatcagccagacggcggacggtatcctcccagcggacggcggaatgtacctgcttttccagcagggaagggatcgagtcagcagcatccttttcgcggcccagacagttgaaaagcaccggacactgcatcggtgcaaaggacaccgtcttgaatttttcctgcagggcatccccggccggctgcatcagggcggtatggaagggcccgctcaccttcagcggcaggcagcgcttcgcaccggcctgtgcggccaatgcagcggccttgtcgacagcggcctgatcgccgccgatgaccaactggccggggcagttgtagttgcagatctgtacaacgcctgcatcggcagcggcgtcgcagcagcgctgcagggcggcgcagtccaggcccagcacagcggtcatgccgcagctgcgcccagctgcggctgcagccatggctttcccgcgaaaagccgtcagtgcaacggcggtacgggcatcaaatacacccgcgcaggccagcgccgagtattcaccgagcgaaagaccggcagcgtagtcgggtgtgatgccggcagcgcgcagcacggcggtgacgccgcctgcaaaggcggtcatgcagggctgggtgtactgggtttcgttcagcacacccgctgcatcggtaaagcagacctcttgtaagtcaaaatcaacagctgcagccgcctcatcaaaggccgcgcggaactcgggacaggcatcgtagagatccgcacccatgccggggtgctggctgccctgacctgcgtataaaaaagcaagcttcatgcaaaaacctccttagagcgtgagggctgcaatgcactgacgcgcaccggacaccatctcgtccagaatctgtgcaacggggcggacctcatgcaaaagacccgccgcctgcccggccatcaggcttccgttgaccgtatcaccgtcaaaaactgcctttcgcaggctgccgagcgtgaactgctccagcgctgccttgtcagcaccggccttttcctgacggacatattcgcggctcatgcggtttttcagcacacggacaggtgtgccgccaaggcggcccgtcacgatggtatcgctgtcacgcgccttgaggagcgcgtccttataattttcgtggatagggcattcggtgctggtcagcagacaggtgccgacctgaacgccgcaggcacccagcgccagcgccgccgcaaggccgcgtccgtctgcgatgccgcctgcggcaatgaccggcagatccacggcatccacgacctgcggtaccaaggccatcgtggtcatctcgcccacatggccgccgctttcagtgccctcggcgatgacggcatcaatgccgaggggcgcaagatgtctggccagcacggcggctgccacgaccggaatcacagtgatgccggccgctttccatgcagccatgtacttgccgggattgccggcccccgtggtcacgattttgacaccctcgtcgatgacgatttgggcaaattcatccgcctgcgggtgcatcagcataatgttgacgccaaacggcttatcggtcaggtggcggcattggcggatgttctcccgcagtgtttcagggttcatgccgcccgcaccgatcaaccccagcgcaccggcgttggagcaggccgctgcaaactcaccggtcgcaatgttggccatgccgccttgtatgatcggatattttgtgcccagaatttcattcagcagtttcattttctctacctttataagtaagcagcatgccgccccatgtaagcccgccgccaaagccgatgcaggccagctgctggccgggctgcagcagaccgctctcgctcatctcatgcagggccagcgggatgctggcggcgcttgtgttgccgtagcggtcgatgtttttgtaaaacttggcggggtcggcgttcagctgttttatgcagtgatcaaggatacggctgttggcctgatggcagaccacccagtccaaatcatcgagcgtctggtttgtctggtcaagcaccgtgcgcaggcagtgcggcagggcctccaccgcaaagcgaaagacggcgcggccgtccatcgtgatgggtgcggtatcgcgggcggacacaccgccgacgcggatcgcgtcactgccgcgcgcgcccagcataacggcaaacggtgcggtatcaatcagctccagaatagcggcaccggcaccgtcaccgaacagcacgcaggtggagcggtcagcagggtctgtcagccgggagagtgcctcgcagccgatgacaagcgcgtaccgcccgcccagtgtagccagcagcccatgggctgccgcagcagcgtacagaaaaccggtgcaggccgcgttcacatcaaaggccggacggttttccggcaggtgcagcgccgcctgtacacggcatgccacgctcggcgcggcagtgggggaggagagggtggcagcaacgcagcaggcaatatcctccggggcaaggccgctgcgcgcaagcgcctgacgggctgcggcgatagccagtgtggccgcgtcctcctcgtccgtgcagtagcggcgctgccggatgcctgtgcgggtggtgatccatgcatcgctggtgtccacctgatggctcagttcctcatttgtcacaacgcggccgggcttggccccgccggtcgcaatcagctgcagacctctcatgcgcccctcatttctccgatgcggcgatattttttgtaccgctgatcggccaatgccttaccgctcatgcggcagagctttgccagatgtgcctgaatggcggtatccatccgggcaaacaatgcctgccgcccgcgctgtgcgccacccagcggctcgggaatgatctcctccacgatgccgtcatcgtacagatcctgcgcagtcagccgcatcatggtgcaggcctcgccgctgcgggcggcatccttccagagaatgctggcaaagccctcagggctgagcacagaatagacggcattttccagcatcaaaatatggttggcaacgccaaggcccagtgcgccgccgcttgagccctcgccggtaacgactgccagcacaggcacgctcaggccgctcatctccatcaggcagcgggcaatcgcctcgccctgaccgcgctcctcggcatccttgccggggtaggcaccgggcgtatcaataaaggtgatgatcgggcggttgaacttttccgcctgcttcatgacgcgcagggccttgcggtagccctctggccccggcataccgaagttgcagcgcaggttttcctccagtgagccacccttgtggtgccccagcactgtgaccggcatcccgtggaaccgggcaataccgcagagaatggcggcatcctccttgcattgccggtcaccgcattgctcaaaaaagtcagtgaacaggttgtcgatgatctcatcaatgtgcggccggtcaggccggcgggccagaaacacacgatcctccggcgtcaataccgtgcagcgctgcagaagagcgtcctcctgcgcggcaagctctgccagctcggctgcgtgggcagtcaaatcaagcatctcgccgtcatctgcaccgcttagcgcgtcgatctgtgcgtccagcggttcaagctgctgcaaaacctctttgatcaactgtacttcctcctttggatgtgcaggcgcagaatacgctccagcgtttccttcatcgcagcgcgcggaacgacctgatcgagaaagccatgctccagctgaaactcactgcgctgaaagccgtggggcagcttttcgccgatggtctgctcgatgacgcgcggcccggcaaagccgatgagcgcccccggctctgcaagcatgatgtcacccagactcgcaaagctggcggtcacaccgccggtggtggggtgggtcagtacgctgatatacagtccgccgcggcggctgaaccgctccaacgcggcgctggttttggccatctgcatcaggctgaagatgccctcctgcatgcgcgcgccgccgctggcggaaaagatgacgagcggcagatgcttgtccgccgcatattcaacggcgcgggtgatcttctcgcccacggcggtgctcatgctgcccatgaaaaaccggctgtccagcacggcaaccaccgcctgcacaccgccgattttgcctgtggccgtgaccgccgcctccttcagcccggtcttggcggcggctgccgtcagcttgtccgggtattgcggaaaatgcagcacatcctgcggggtcagatcagcgttcagctccttgaaggtgccgtggtccagcacaaggcttaaccggtaataggcaccgatgggcagatgcacgccgcagtttgggcagacatacaggcttttggcccagacctgccgtgtggcgcggcgcccgcacttttcacagtccacaaactggggcggtgtccagttgggggctgctgtaccggcatcgcggcgtgccttcagctgaaagcagcgctcctgcggcgtgaccgggaacagcttttcgatggtgctcatggctttcggctccctcaggcggcgcgggcggccagatagtcaaagatgtcgcccacggttttgagattcacaagatcctcatcggcaatcgaaacaccgaatttatcctcaaatgccatattcagctccacagcgtccagactgtccgcctgcagatcctccgtcaggcttgcctccggggtgaccttatcggcatcgcagctcagggtgtcaacaaatacttccttcagttcctcaaagcacatggtatgtacctcctgtatatttacctaaatttattgatgcaaatttgcaacgaggtcattataccacgaattgttgacatgtcaatagaattagctaaaataatttacctataatttttgcagtaaaaataaattcacagccgggcttgattttccgcagttttcagcgaaaattataatagatagatcagcatgtcaaaaaatcacattcttgtcctattgaatgtgtaggggcgaccattggtcgcccgctaacctggtgcagcaacgcgtttttcgggaaagcattttcacagagaaacgggcacgggcgagcaatgctcgcccctacaagagtttttggcagcctgatagatgtattgtggcggtggctgactatgtggacagccaccgcaggcgtggtgagagcgaggaaaagatccgccgccagctgagtgaccagagcggcacacggtttgaccctgtgtttgtgcaggcaatgctcgaaattatgtaaaaaaactgccttgccgtcaaatgcggcaaggcagttttttgtcaggattcttgatcagggttatattttttcacgccgaacacaaaatacaaaatatgcgccagccagatgccggccagaatgcagcaggggagaacgagccccgcgcgcagcatcatacaaaagccgaacgccatcaaaagcgtgaccgtgcccatgattttcagctttgcacgccgcgtcatgccctgcccccgtacaaaggattccaaattatcccggtagagctttgtgccggtaaaccagctgtgcagtttttcggagcttttaccaaagctgaacagcgccagcatcaaaaacggcacagacggcagaagaggcagcactgcacccagtgcgccaagccccagcccgaccaaaccgagcagcagccatacgatctttttaatcttcattgttttctctctccaagcgtttcttttcacgaatactttctataccgtgccgaacgaccagtaccgggtggctgaacagcatacgcggtccggaataccgcataacagcacgaattttttcccgcatggcgggcttatagcaatgcacccggcagttggagcaaaaggtctttgtttcgataaacgggcagcggtcggcgcgcagcagcgcgtactcctgcaggatctgacattccggacaaagcccctgccttgtgccgtggtgccccctgcagtaggtgcgtatcatcagtgaaacgatgcgtttttcctgctcgcgcttggcggcgatgttgttttgattcatagcttcctcatcaaatttcggtcattctgccgtcctttacgcggtaaatgcggtcggcaatggccatggtggattcgcggtgtgagacaagcaaaatgctctttttgcgcttctgctcctgcagggccttcagaatgataccctcgttgatgctgtccacattgctggtcggctcatcgagcaggatccattcacttccccgcaggaaggctctcgccaagccgatgcgctgcttttcgccggcagacagattatcgcccagcgccccgacccgcgtcttgtagccatcgggcagagagagtatgaactcatgcaccgaggccatccggcaggctgcctcgatttcctcctgcgtggcgtcaggcttggcgatgcgcagattgtcctcaatggtttcgtcaaacaggtaggttgtctggctgaccatcgttacatttttcaaaagctcgtcggtgttgatactgtcaacatcaacgccgccgaatttgatttcaccgctgtctttttgccagaaacgaagcagcaatttgaggaaggtcgattttccgcagccggattcgccgactatgccgatgatctcgcccttctcggcgtgcatcgtaatagcctgcaaaacctcggcgttttcattgtaggagaaggaaaggttgtttacggcaaggctttcaaaatcggtccgcctgccgttggttacgggtgttaccgcaggcttttccgccaaaaggttcagcacacgatcacccgaggcaaaggtctgggtcaggttaccgggcagggcggagatggcgatgaccggaccgaatgagccaaacacgccgacaacgccaatgatcatgcgcccggcggaaagacgaccgtttgccacaagaaggatgccggctgcaagcgttgccagaataaaaacagacacgcacagctcagtcgcggcggtggttttggtgatgtcgtgcttcatctttttggtctcggtgagaagtgcctcagaacgcgcgttgacctccgtttcccgctgctgaccggcgttattgagcacgatgtccttgatgcctttaatgctgtccagaaaaaaggcgttgaagcttgcaaattccgcacggtatcgcacgccggaggtttttaagcggcccgatgcgatgacagggacaacgataccgatggtgagatagcccagcaatgcgaccagagcgatcgcccacgaggagaccgcgcccacaaagcagaaaacacaggcggacacgaggacagcaatgcagacgggggagatggtgtgggcgtagaatacctccagcgtttcaatgtcggaggtaatcatggcgatgatcgcacccttttgcttgctctccagctttgcggggcagagcgcgcgcagtgcgccgaagattttatcgcgcagcaccgccagcagccggaatgcaatgtagtggttgctgtactgctcaaaaaagcgcagaataccgcgcaaaacgccgcagccgatggcaagggaaatgattgtgccataggacagggcgatgctctcacccaaggctttggcaacgccgaccgcaccgcacagcgttacgcccatggcgcagagaaagccaacggagccgtttatgactgccaaaagcataatgtaggcaaggctgcccaaaagcaaaataaggttcgccataattacggcgccgcttctgcgaagcttggaatcctgtttcatttcagcacctccgcatagccttcctcaagatttttctgtgtggcgtagagtcgggcatatccgccgctttgcgccataagcgcggcgtgcgtgccgctttcgatcaggcggcctgcctccatataataaataagatctgccgggaccacattggccagccggtgggagatcacgatgacgcttttggtcttagacaactcacggatattctccataatgacggcttcgctctcaatatcaatgttgctcgttgcctcgtcaaaaatgtaaatgtccttgtcggcaacaaggctcacggccagcgccagacgctgcttctgcccgccagagatgttggccgcatcctcggtaataattttgtcaagcccgccgttctcctgcaggaaggtgagcaggttgaccttttcaagcgcggcacagatttcctcatcggtgacctgcggcttggcaagccggaagtttgcccgcaccgtttcgttgaagatataggtgttgtagctgacaacggcgaggtgcgaatagtaagatgcgcgggaaaggctctccaattttttcccgccgactgtgataacaccggtattcgggcggaacgcgccgaacaaaaggttcacaacggtggatttgccgcagccggactcgcccacaagggcggtcatgccgtggcgagggaaggtcatcgtcacattttcaaggacatcccgcttgccatcgtaggagaaggtgacaccctcaagcttcagctcggtatccgtcacagcctcctgcccccagacagggtcgtcctgcccgagaagggagaggattttctgccccgcagagacaccgttcatggcaatatggaacgctgaaccgaacgcgcgcagcggcaggaaaaagtccacggcaaccagaatcaggaacagtgccgcaatgggggaaagcccccaccttgtcacggagagcagtgccattgcgatgccaagccctgcaccgccgtaggcaaccagatccataatggtcgtgctggcaagctgcatcacaaggaccttcattgtgattttgcggaattcctcgcttgtttcgttcatcttgcggtgctgtgcggcatcggcaccgaaaattttcagctccttcaagccctgcacgctgtccaaaaaggagtcgcccatcgaggtgtatttgccccaatacttggcaaaaatctttttcgcccatttggaaaccgcaataatggataaggggatcagcggcacacagcacaaaagcaccaatgccacgcgccacgaaatgcccacggtaatggcaaacaacaaaagtggtgcaagcatggcgtaaaagaactgcggcaggtagctggaatagtacagatctaactgttccacaccctccagagcgatctgggtcagacccgccatgctcatatcatcggtagaacgcacgccaagccgaacgattttgttgtagacgcgttcgcgcagatctttcttgacgctgcgccccagcgtatccttcaaatccccgacaaggcgagtggtggcatagcgaaccgccaatccgatacaagcacagaccgccggtgccagaaaaacacccgcgccgccgttgtaccggacggcaagcgcaatggcccagcacagggatgcagtgatgccgacattcgcaaacagccccagcaccatcaagcctacacagaaggcgatatactttttgtttccgccgagcaggcggagaagatccttgtctatcatgcgatactcccttatagcttgtttgcgccgtagcaagagcgcagatttacggattagtgttatctaacctgattgtaaaaattatcagcctgcaagcacgcgcagcgcgcggcgttcatcacatacataagaatgaaatgattttgcaagctgacaaggatgcgattatggcagccacaatgcgattgttgcagccacttttggtgcgcaatgaaatcaaaacgggggttaggaaaggctaacaatctattattttacagattttttcacatttgtcaagcggaaatatttgcacttgccgcataatagaccagacagcgggaaagaatcgttggatatgacaaaatagtgggtgggtgacaaagagatataaaacgatagtataaagaagaaacgaagcaagagaaaaatattcggcgccatgaaagtagttctaaccccgccgctatggctataaaaattagggctgcagcatgaacaaatgctttgtaagtgtcttaaaataagcggaagcaaaaatcgacataaaaatagagatgatatatcgagcataaaacgaggtgcaaaaattgtcacatcaaatagaagctgtctgtttacattgacacatcggggtgataggatgagggtgcagtgaaaaacttcccccaaatggagaagatgaacggcaaagaggagtgagcagaaaatggagcaggcagtggtaaagattctgctgctgggaatctgcgggtatggcagcaactatatcaaggagatatcggagcgcgacattcccggtataaagatcgagggtatctgtgaggtcgttcccaacgccgcagatttgtatcccatcattaaagaacagaacattccgatttatcaaacgcctgaggacttttataaagagcataccgccgatctggccgttgtctcaacgcccattcatctgcattattcgcagatcgtcacctgcctgacgcatgggtcgaatgtgctgaccgaaaagcccgtctgcacctcggtagagggcgcacgcaagctggaacagctggaaaagaagacgggtaagttcatttcggtagggtatcagcttaactattcccgcgatgtactggccctgaagcaagacattctggatggtcgctttggtaagcccatctacatgaaagcactgcacgcgatgcggcggggtgataaatactacgcccgcaacggctgggctgggcacattgatgtaaagggctgtgctgtgaacgacagtccgttcaacaacgcctgcgcccaccaatttcaagtgatgactttccttctgggggagcgtctggagcgtgcggccgagttggccgatgtacaggccgaaccctataaaggaaaccccaatgtcgaaaatttcgacacgattacagttcaggcgcatacgacatcaggtgtgccgctgtggtacggaacaggccacgccattgtagacaagaagctgggccctatagctgaataccgttttgagaagggcacggtttacttcggtaaagacttcggcagtgggccaatcgctgaatatgtctacatcggcgatactggcgagcaaatcgactatggccgcatccccaaaggggagcgcctgcagaaattctacgatgccattgaagctgtgcgcacaggaaagcatcctgtctgcactgtgcagtgcgcaatccctcatttggaggcagtcgaaaaaatagcgaagctgccgattgtacccattccggccgaaggtgtgaaggacatcagggaagatgatgacacattccacgccattgtagggctgcacgacatttttatcacttgttacaaaaaccgggaaatgctttcccaagaaggattacccgggaataaataagaaggagaaacaccatgaaaagacaaagcaccctcaagcgcgcactggcgcttggtatgtcagccacaatggtcggcgctacgctggcaggctgcggcggttctgcctcctctacggcagcaacctctacagaaactgcatcgtctgcagccactgaggcggaagcgaccacggacagcgacaaaccctttgcgggcactacgctgacttggtataccggattgaacggcaacgtctctgacaacttcgcaaacctcggcgacacgccgtgggcaaagtatgtgcaggagcagaccggcatcaccatcgaattccagcacccgacgcagggctccgaagccgaagaattcgccgttatgctggcctccggcgagtatcccgacatcatcgagtacacttggacgaagtactccggcggtgcaggcgcggctgttaatgacggcgtcatcatctcgctggatgactacatgaaggacgccccgaacctgagcaagattttggaagaaaatcccgaaatcagcaagatgatcaagtcttccggcggcaactattattgcttcccctgcttgcgtggtctggagtcccccaacaagaccgaattttcctcaggtttcctgtatcgagccgatgcgctggcggatctgggctttgaaaaagtgcctgagacaatggatgagtgggaagaagtcctgcgtgccgccaaggctgccggcttcagtaagccgttcacgacccgtaaagagtgggtcaaggacgtctggtcctccgcttacgacaactggggcagcttctacgtcgaggacggcgttgtgaagaacggtttgattgaggacagccgcaaggatttcatccagaagctggccgactggtatgctgaaggcctgttggacaacgactggatgcaggctgacaagaagtccacccagaccgacttcgtctccggcaactgcattctgggctatgctccgttcggtcagggcctcggcaactacaccaaggctatgatggacgccgaccccaactttaaggaagaatacatccgcgcggtcgcacctgtcagctctaccaagggccagaacgccaagttctccaagatgaacaacatctatgaccagtccgcttcttccgcagcaatttcttctcagtgcaaaaatgttgaggccgccgtttggctgctcgactggctgtacagcgaagaaggacagatctgctacaacttcggcatcgagggcgtcagctacgagatgaaggacggcaagcctgtctacaccgatcttattatgaataacccagatggttggagtgttgcgcaggcattggctgcttatactcgtgcttcttgctctggtgttggtgtccaaagtgaagactatattgatcagtattactctcaggacaaccagaaggaagcgcttgaactttccatgaagaccgacatgggtgagcatatgttcccgccgacatccgtttctgaagaaaatcaggaccgctactccgagatcatgagtcaggtcagcacactggccgatgagatggaagccagcttcatctgcggcaccaccccgatgagcgagtgggattcctaccagcagaagctgaaggatgccggcattgaagaggcagtccagatgatgcaggaagcatacgacacctacatggcaaactgagttccgatgcgataaagcaacaatactatgttaaaaatggcatccggaggaatgctctttcggatgccatttctataaggaaacactacggggtgctgacaagattatgaacagaatgacagagctgctggaacggatcaattatgatctgcccggactggaaaaagcaaagatgtgctatgcacagggggatgcgaatggcgcaatggatgcggttgttgagcatttccgcacacgcacaacgccgaagtatctctttaccgctaaggagatggagcagtgtaaggtcgatggcatcctcgaggatgcgcaggagacgctggatcattatatctatggccacaagtttgacggcgagatcgactggttcttcaacccgacggagcatacctcccacgataacgagtggacatggtcgctgtaccgccacatttattggcagccgttggcccgtgcctacgcgttgacaaaggatgaaaagtacacgaaagagttcctgcatgaaatgaccgagtggggcaaggcgtggcctgtgggccccttcatggagaatgaagaggacgctgcggccaagtacaaattccccggccactcctggcgcaccatcgaaacggccatgcgcatctacacggtctggctgccctgtatggaggcgttccgcacctcgcctgcgtgggatcgagagggatgggtaacattcctgacgctgctgtgcgatcatgccgactttttgatgactcattacagcaaccacaagaaatcatccaactggctgacgatggaaagcggtacgctgctggaatgcggcattctgttcccggaaatcaaatccgattggtttatgacaggctaccgccgggtcatgcaggaggtaaagtactccttcgacaatgacggcattcacatggaacgcacccccatctaccacatggtggctgcgggcgtctacttccagtgctaccgtctgtgcaagctgaatagcatccctgtgccgccctacatggagccaacgctggaaaaatccgcacagtttatcatgagtctggtcaagcccgacctgtcaacgccgatgatcggcgatgccgatcgggatgatctgacgacccgccgctgcgatacctcgctgtacgaggggatgaacctgacattcgatccctacgatttgaacgagatgcgcgcgtacttccgtacatggtacgaggaaacgggccgcgaggacttccggtttatggccacggctggcaaggagggcacaccccctgcacagcgcaactacaagtacatcccggcgggcatttatgtcatgcgcacaggctgggacccggaggacagctacttccatgtacacggcatccagcttgagcgtggtgaggtcagctcgcactcccacaatgacacgggccatgtggagattcacgccaagggcgaggacatcctgacagactcgggccgctacatttacaacagctcctgctggaaagattggcgccactacttcctgtccgccaaggctcacaacacgctctatgtggatgaccacgagatgggtaccgtgcccggtgttacccgcacccgcggtgtgcgcacctatctgcatgcctttgaggaaaacgagcagtatcagcttatcgatatttcccataacggctatgacttcatggatgacccgatgttccaccgccgccgcgttgtgcgcctgcccgatgatgtctatgtcattgaggatcgcgtcaccggcatctgcagggaagaacatgacatccgcctgtattacaattttgcgtttggccatctggatggagaaaacggcaagtttgactatacctcccaaaagggacgcaggtatacgatgaccgtgcaggctgacaagaagctcgattttgaaatccttgagggcagtgaggatcccatcggtgggtggatcagctacggctacgcatggcgtaagcccatcccgcagctgatcgccaagcatagcggtaaagcacccattcactttattacggtgctggccccggcgggaaccagagccgaagctgccatcaatggtgatgccgccacggtcacgctggctggcggcaaggtattgacactgacagagaatgcggtagaactgcgctgagaaaggagcctgcaagatgagatacggtatctgtaccggcatcgaaaatgccgggcttgtaaaaaaattgggctatgactacattgagctttcggtgacaaagaccatgggccttgaccctgcggcgtacgctgcaggcaagaaggcgctggaggagagcggaatcgaggctgagtgcttcaacattctgtttcccaaaacgatgaatttcgttgatggtaagacaacgagccttgatgagttggaaatttatctggaaaaggcaatggcaatgattgccgatttgaatggtaaagtggtcgtgttcggcagtggcaagtgccgtacatgcccgccggaggtcaagtatctggacgcttacgagaaccttgacaaagcctgccgactgacgggtgaaatcgcaggaaggtacggcatcaaggtggttattgaaccgttaagccgaaaagaaactaatatggtctgtaccgtggccgagggcgcattgctgcagagggatgtggccaacgagaatgtagggctgctggccgactacttccatatttgcgccaaccacgatgaccttaacagcatcgcagtcatcaaggactttgggcacatccatattgcgtccggcaatggccggcgctatccgctgcccggcgatggcgaaaactatggcgagctttttgctgctctgcacacggcgggttaccacggacgcatgagtatcgagggcaaaacagagaacatcgagcaggacggtgcggccgcccttgcttacttaaaacagttggaggcgcaaaacaatggctgataaagtaaaactcggtatcatcggctacggtcatattggcagccagcatggccgcgcgattcgggacggaaagtgtccgcaggtcgatctgactgcggtctgcgacattgaccccgcccgccttgaactggcaaaaaagacgaacggtgagggcattcagacatttaccgatgcatccgagctgatccactccggcgtgtgtcaggctgtcatcattgcagtgccgcattacctgcacccctcgatggccatagaggctatggagactggcctgcatgtcattgtagaaaagcccgcgggcgtctacaccaagcaggtcgaggaaatgaacgctgttgcggccaaacacccggagcttgtctactgtatggatttcaatcagcgcacgaacccgctgtacaaaaaggtcaaggatctcatcgacagcggtgatttgggtgagatgacccgcgttatttggatcgttacggattggtaccgctcgcagagctactatgatcagggcggctggcgtgctacctgggatggcgaaggcggcggcgtgctgctgaaccagaatccccacaatcttgatttgtggcagtggatgtgcggcatccctaagcgcgtaaaatcacaggtatactacggaaagcaccgcaatatcgaggtcgaggacgacctatatgcccttgtcgaatacgaaaacggtgcgacaggctgctacattacgacagtaggggatgcccccggtacaaatcgtttggaaattgacgggacaaatggtaaaattgtagttgaaaataacgagcttaccttctaccgtctgcgtattccggaaccggaattcaatgccacctacaagggtggtcttggcaagccggaagtgtgggagtgcaagattcccatcaagggcacctacacctcccaccccggtattatcaacaatttctgtgactgcatcctgaaaggtgcaaagcccattgcccccggcgccgagggcatccgtggtttgcagatctccaacgctattcacctttcgagttggctgaacggcgaatgggtcgacatccctgtgaacggagatttgttccttgagaaactgcaggagcattgcaaggaaccggtcacaaaataacagctgcccgcagcagaagctaagccgaagaaacggagtatacaaacgtggctgaaaagaaaaagtgggcccctacaaagatgtttttgcagtggtgcctttcctatctgctgatttctgttattgccctgacgctgcttttggcatccgggtacagatatcttgatgtgctgcgggacaatttggaatacacgaacggcatccagctggatatgacgcgggtctggctggatcagaaggttaagctgctgcgcaacatcacggcaaaggagagcagcacagcggccattgaggccgtacgtcaggcggatgactatgatgatattccacggtatgattactacatgcttacgaggaaaatctctacagatgtcatcaactacggtattggggatgcatactttctctattttccgtccacggatgcgatagtatccaacacgaaatacgggcaaagccgtcgattttatgaccttgtgctggaggcttatggcatcagctatgaggattggatggaaatattaaagcaggacttagtgacaacgcgggtatttcaacctgttgtacagggcaaggatagcaaaaactatctggttctgatgcgtccgctgaacatcacaagccgagagcctgataaggcagtggcggttatgatcgtcgatttggaggatctgttcaaggcctctgattggctgaataacgatacactgtgtatcaatgaccgcaacaacggtgtgctggttgctaaccatgaactccctgaggcaacggaaaatgctgtcacagagctgattaaaagcagcggaagccgtaagtttgacgaagcggcccatataacgagcaaggaagaatacatttcaatcatttcttccacttacgaaaactgggatattgcggtcattctgaaggaacaggcttttgcatcgaaaatcattgatatacagaagcttttggctgttgttgtcatcatctatctgctgttgacggtagcagttattgccaatagcgcagccaagcgttatttgaagctgcgcaatattgtgcaggtgctgcacagcggcaatgcggctgacccggaggagaatctgaccgatgccttcgcctatattgacagccgcgtacagaagcttgtgcaggataatgtcgaaagctccgatctcattgagcagcagcgcaccgcgatgctatgtgagcagtttcacgcgatgataacgaacgcagatgcggcaaacgagaccgatacagaccggctggaaaatctcggcttcccgatccacagggcaaaacagtattatctcttggcctaccggctgcagaagcaggatcttgcaaatgagaaggatcctgacaaaatatacgagatgcagtggttcatactccagaatgtaaccagagagaatcttgcgagccgcagtcttgagaacctttgcttccgtgagggcggcacgcagctttacattatctggaccgagaaggaagacccggagatgcttgaaagcattttgtggagctatgaatactgccgcagctttttggcccagcattttgagttccgctacgacattgccgtcagcggtgagcacaccggcattgatggggtgtataaagcttaccgtgaggtgtgccgtgtataccaataccagcagcgcacgcaggataccggaacgatattctacagcgacctgaaggtacagcccggcgacacgacagtacgctatccggttgaaacggagaataaactgcatctggctgtacgcagcggcgatgaaggcgaggcctgtacacagattcaagcgttgatgcgccaaaatcaggagaactacttgagccccgcaggcatgcagttcctggtgggtaagattatgtcgaccatcgtgcgtgcaggcgaacagagaagcgatgaaaccgagctggccgaaaatcaaaatcgcgtcatggaggcagcccgccgtggtaacgccgaggcaatggagcaggcgctttgccggttggcgggcaccgtctgccatgcggtacgcgcctctgaacaggaggcggcagcggatgaaaaaggccgcctgtatctggagatgcgggactacattgaagccaactattcggatgctacgctgaatgtaaatgcactctcggagcatttcgaccgtcctgctccgttcgtctcccgctacttcaaagagatgaacggtacgaacctgacccagtatattcacaaagtgcgcttagagcatgtgaaagaaaagctgctgcaggacgaaaaattagagacgatcgccgtcacctgcgggtttggcagtctgcgcagcttcctgcgtatcttcaaacaatatgagggtgtaactcctacccaatatagggagctgcacggcaaaaaggaagaaacaaccaatgaaaacatttaaaacggcagttatcggctgtggtatgatttccaaaaatcatttcaaagccctgaaaaatgtcgagaatgccgactgtgttgtcgcctgcgacattcgcccggagcgtgccgcagccgccgcagaagcctacggcatcccacacacggagacagagtatcacaaggtgctggataacccggaaatcgatgttgtacacatctgcctgccgcactatctgcacgcgcaggttgccatagaagcaatggagcatggtaagcatgtactttgcgaaaagccaatggcgctggaccccgccgatgccgagaagatgatcgaagtccgcgaccgcacgggcaggacgcttggcatctgctttcagaaccgttacaacgattcgtccagatatatgcgcagcctgatggactccggcaggatgggcaaggttttgggggcgcggggggccgtgttctggaaccgcaaccccgaatactacaccgaatccgactggcgcggcaccttggacaaagagggcggcagcgcattggaaaatcaggctatccacacctttgatctgatgcagtggctcacagtaccgatcaagaccgtggaggcaagctgctccaccaagcgccataagggcgtcattgagacagaggatacctgcgatgtctttatgaccggccccaacggcgagcgattcgtctttttctgcacgaactgttatgtgaaaaatgcccccgtggagttagaaatcgtctgcgagaatggcagtatccgcatggtcggcaaccttgtcactactgaactggacggcaagaccgagacgaaggacttctcctccggcacggtgttcggcaaggattattggggcagcggccatgggttccttattgaggactactacaccaagctggcggcaggggagaggttccccgtcagtggtgaggaagctatcgtcagtaccaggcttctccacgcgatttattcttccgctaaaaatcacgaggtcatccgccttgacacaaaggagaatcaagcatgagcacaaagagtaaagctgcggcggccgaagaaaaaaagccgatcaccttaagctcagagcatgtgcctctgagctaccgcatcaaaaaagatttgcagcgcaacggcatgatctatgcgatgcttattccggtgctggtctactatgccgtctttaagttcggcccgatgttcggtctgtatatctctttcatcgactacaagcccgccagaggcatttttggcagcaagtttgtcggcctcaaatggttcaagtctttcttctcggactattactttggccgtctgctcatcaataccgtgcgcatagcggtggcggatctgctgaccttcccgctgcctgttattctggcgctccttatcaacgagttaaaaaacaagaaattctccaagacagcgcagacgcttctgtatgtaccgcacttcatctccacagttgttatctgcggtatcgttatcacgctgacgagctccaccggtgccattaccgaggtgctgcacaacttgttcggcatcaaagagcaggcgctgttaaatagcccctccaacttcctgccgctctacattgtgacagagctttggcagacgctgggctggaactccatcatctatttgtcagccctttccggcatagatcaggagttgtatgatgcagccaaggtcgatggcgcgaaccgctggcagcagtgcctgcatgtcacgcttcccggcattgcgccgaccatcatcattatgctgatcctgaagatgggcaagatcttcaatgttggttatgagcgcgttatgctgctgtacaaccccgcaatttataataccgccgatgtcatcaacacctatgtttaccgtaaaggtctgattgatgcacagttcagctacagtacggcggtcggcatgttcaactgccttgtcagcttcgcactggtcatgatcacaaacaagatcagccagaaggtcaatggcagcggtctgtggtaaggaggatacgatcatggcgaatacaaataccaaaaacgcaccgcgcggcaccaagatcaaggaatccttcggcagccggctgtttgatgtcgtggatatcctgatcgtctgcctgctgctggcctgcgtgctgatcccgctgatccacatcgtggcggcatccttcagcaacccgtcgctcttcgtagggcataagggcattctgctctggccggaaggattttctcttgcatcgtatcaggctgtgctcaagaatgccttcctctggaccggctacgcaaacacactgtttattgttctcgtaggtacggttctcaatgttcttctctcgatggttgctgcctactgcctgtcccgcaagcgtgtggcggcaggtcccaccattatgaagctgcttgtctttacgatgtatttcagcggcggtatgatcccgctgtacctggttgtcaagggcgttgggctttacggctcccgctgggcgctgatcctgcccaccttggtcgatacctacaacctcatcattatgcgcaccgcctttgcgggcgtgcctgactctctggaagaatccgccaagctggacggcgccaatgcgtggacgatcctgtggcgtatcatggcgccgttggtaaagcctacggttgccgtcattacgctgtactacgcggtcagccattggaactcctggttcaacgccatgctgttcctgcgcgataagacgcagtatcccctgcagctgatcctgcgccagatccttatccagaacgacacggccgatatgaccgccggcgcagattacctgataagcgaaacgatacagtacgcgacggttgtggttgccacactgcccatcctctgtatttatccgttcgttcaaaagtactttgtcaagggtgttatgatcggcgctatcaagggctaatctgcacagtaaaaaggagaaactaccatgcgcgtaccttatgaggaaatgtataacgaatttgtgcgggttctgctgaagtacggctttgataaggataaagcggagatctccgccaagctctacgcagacgccagccgtgacggtgtatacacccacgggctgaaccgcttcccgaaattcatcaagagcatccatgacggcattgtggacatccacgccgagcctgtgctgaaggagagctttggcgcatttgaacgctacaacggctgtcacggtcctggaaacctgaacgcctacgcctgcacaaagcgggctattgagttggccaagcagaacaccatcggctgtgtggcgctggccaataccaaccactggatgcgcccaggcaactacggcctgatggcggttgagcagaattgcatcggtattttttggacgaacaccgtacccaatatgccgccgtggggcgggcgtgacgcacgccttggcaacaaccccattacgctggctataccccacggggatacgcctgtattggtggatgtggccatgtcgatgttctcctacggtaagctggaagtctataagcgcagcggcagaccgctgcctgtggacgggggacttaacaaggatcagcagcccacgaagaacgctgccgagatccttgaaacacatgagagttaccccattggctattggaaaggctccggcctgagtctggcgcttgatcttatcgcggctgcgctggcgggcggccgcacgacccgtcaggtcggtgagctgccgctggaaaccgaactgagtcaggtgtttatctgcatcgacttggacagcctgcccgacaaggagaatatcgctgccaatgttgaggcaacattgcgcgatatggagacctctacccctgtggaagagggccgcccggttcatttccccggtgcgcacatggccgaggtccgcagcgacaatatggagaatggtatccttgtcgaggatgcgatctggcagcaggtgctgacactgtaaagggaggtgcgcggtatgataataccgggactggtatcggcaacatttaaagcagaaagccccgattttgtgctggcggcactgaaaaaagccgatcttcatgcggtggaatggtcggaaaactggcacatcccggcgggggataccgcgctggcccgtgacctgcgggaacggactcttgcgcagggcgccgagattgcggcctacggctcctactatcgcttggggcaaaacagcgaccctgccaaagattttttgcccacgctgcagagcgctgcggcactgggtgccccgctcattcgcatctggggcggcggtacagcatcggcagagctggatggtgacgcacgcaaggagctggcggccgaggcaaagaccgtcagtgatatggcggcatcggagggaatcaaggttgctctggaatggcacaaaaacaccgtcaccgatacgaatgaatcgggcctgtcctttttggatgaagccgccgcagataatctctactgtctgtggcaacctaccgtggcactgaatatggacgagcggtgtgcggggctggatatgctcgaagcccgcggccgtctgctcaacctgcatgtctactactggctggaaggcaagcgtcgcccgtttgcggaaggtcttgacgaatggcggcggtacttacagcatgtcaaccgcaacgaaaaacgctacggtctgctggaatttgtgttggacaacaccgaggagcagtttctggaagatgccgctcaatggaagcggcttttacaggaaacggcgatgaactgaagaggagaaaagcaaaatggcagatttatatgtaaagaagtttgatatgatcaatcccttcgttgtggcatcgagccccgcaacgcagggggcgctgaatgtcttgaagagcgccaaaatgcggcccggtgccatagtgttgcgcaactatgggcacggttcgggcggcggcagctttatcggcccggactccaaggcaatgttcggcggagaaatggccatccacagccatgctgtcggccgtcaaatcccagacagtgtcgacacgctggaaaaatattgtgaggaagtgcgcaaaattaaaaaagagatggaccccgacatcaagctgtgggtgtccgtcggtcattacagcgacatcgtcaagggcggtgactgggagaaaaactgggctcatcaggcggaggaactcgctctcgcaggtgcggacgccatcgagctgcacttcaacactcccggcgttgccgtggcaaaggaccgcacatttgcttatcatcagctgctccgccattccattgaattgatgaaaaagacagtgcccaatatgccgatcatggccaagcttgccattgagtccaccgacgctctgacctcgatgcgcattgccgaggccacaggcgctgccgccgcaggccccaccgcccgctggaaggggtactacatggatcttgactggcgcggcaccgaggcccgacccggtgcaggctacggcggcacgcaggccactccgttggtgtgctactccatcgctgaggcacgcactgcaggcgtgaaaattcctctctatggtggtggtggcgtcttcaattatgaaaacgcagcccgtatcctgatggcaggctccgagatggtgcagctgggtgctttggcctgtgccggcggcacgatggcatgtaagaagcttatcagcgacctgaaccgctggatggacgagaacggttatgccgacatggattcgcttgtcggtgacagcctgaagctgttccagatggatgctgacttcacgaaaaaacggcaaaataagctcgccgatgcctatcaggccgctgacgccgaccgagccaagtgcatcggctgcggccgctgcgaggatgtctgctggcatcagggcatcgaaatcaaagaccgcaaggcttataaaacagataaatgcatcggctgcggctactgcttccaggtctgcccaacacaggctctgtatgtagataaaaaaggcatcctgcgcgccgcctttgaagaagcggggattgagagagggaataagtaataacccgcggggcgtcagggatgccgccccctacaatgtcatgccgtaggggcggattccatatccgcccgcgtagcttcacggcgactgcaacctatcctaaaaataactaaccccggcgcagcatgtgcacgctacggctgcacggctgcgccgattttttgtaggagatgtagaatgacactctttgatactgcacttgaggccgacctgcagaccctgcagcacgcgattgaatatgagggtcagaacttccgcgagcgcgatgcggacggtaatacactgctgcactgcgccgtgcgttcgggcagccttgcaaaagtggcttacctgacagactttctcgcactggatccgctggaggcgaacctctcgggtatcacgcccttggacttggctttgcaaggaggctttgatgaaatcgctgcgtaccttgcgaataaggcaggcgttgatcccgcgcgaatcttccacaaccctgtgcgccgcggcttttatccggatccgtcgtggatccgcgtgggcgaggactattacatggtcaactcgtcgttcagctttttcccgtgtattccgatttccaagtcccacgatttagtacactggacgactgttggctacgccattacaaacccggactgggccagagtggcgcggtccgaaggcgggcgcggctactgggcacccgatatatcctacgatgcagtgtccaagcgttattttatcacggctacctaccgcggcaacgagaacaacgcagagccgcgctgtcagatggtcgtcagcgccgagcgacccgagggtccctacggtgagcctgcgtggatccatgaggacggtatagacccgtccatcctccacgatgacgatgggcggcattatatgctgttcaaccgcagcgtccgcatggcggagctgacgcccgattgccgcgccctgcgcggtcccgcacgcctgatctggggcggtgacctcaagaaaaagaccgagggtcctcagcttatgaagcatgacggatattactatctgctggccgccgaaggcggcacgggggcaggacaccgcatttcggcggcacgcagcaaaaatgtgtggggtccttatgaaaactgtccctataacccgattctgcgtcaggatgacgcgggcggttatctgcaaaactgcggccatggcaagctgctgcagactgctgatggacggtggttcctctgctttctctgtctacgccgcgatccggatggcacggctcctatgggacgggaaacttcgattgcagaagtgacatggacgcctgatggctggcctgtggctgcctatggacgccgcccgcgctctgtgctgaatatgccgctccctaaagcaactctgcctgcggttccggtaggcgtaaccgattggaaggggtgcgagtgggttacccagcgtgcgttggatgccgccaaccttaccgtggaaaatgatgcgctgacactgcgcggaaatggtcttgacctgtgcgacatgaagatgcaagggctgcttcttgttcgccagcaggaacgcgcgttcactgtggaaacggcgctggaaatccccgctgcgggtacggctggtctgacctgttactacgatgagcacagctatttgaaattcggcgttgggccggagggccttgtattggaagaatacgcaggatatgaggcggtttcaaggcaaacagcaccgttgcctgcgggcacatccaatgttcgtctgcgcgttacggcaacgggtgggcaacgacattttgctatgcaggatggaacagactggcgcacgctttggagcatcccagaaccacgctacctgaccagtgagggattacagtgcggaaagcggttcacaggggctatggtgggcctgtatgtccacggcgcatctgcagtccgctttgccgattgggtcgcagtgtggccccatcccgaagaaaagaggtaatacaatgccacaagaaaaatttcactataaatcgttagaagaagtcaagcggcgtgccgcagagctgggggttgacctgccctttgcagccgacacccacgcgctgacgcagccgctgaccgtgcgtaatattaccttcccgaaccgtctgggcatcgcgcccatggagggcgcagactcaacgcccgaaggcgcacccaccgagtatacgacccgccgctatgtcaacgaggctatcggcggcagctcggtcatctggttcgaggcaatctccattgtggaggagggacgatcctcccagacgcagctgctgctgaaccgcgacacattggacgagttcaagaagatgaccaccgccgtcaaggaggcgggcctcaaggccaacggctatgcgccgtatttgatcatgcaggccaaccacagcggccgctactctaaccccggcaacaagcctgccccgatgatcgcctaccgccacccgatgctggagcagtaccgcgccgccgatgactcctgcatcgtgacggacgattacctgaaagggctggaagaaaagttcggcgaggcgacgaagcttgccaaggaggccggtttcgacgccgttgacatcaagagctgccacggctacctgctggcagagctggcatccgcctacaaccgccccggcgagtacggcggcagctttgaaaaccgcttccgccttttgaaaaacggcatccgcgccgccaaggtgtacgaggacgacagctttatggtcacggcgcgcgtcggcatctacgatggctacgcctacccgtggggcttcggtgtcagcccggagagcggcatgacgccagatttggctgaacccatccgcttggtgcgcgatttgcacaacgaactgggtctgaatatggtcaacctgacgatgggcaacccctacgccacgacccatgtgacccgccccttcgattttggcaagtatgaaccggacgaacatccgtttgttggcctgtcccgcatgattcacggcattggcgcagtgaaaaaggccgtgccggaaatgacggtttgggcatctgcacctacttacctgcgagcctatgctgatctgttcagcgcaggcgcggtcgagcagggcctgtgcgatggtatgctgttcggccgcatggcctttgctgacccggatttcgccaacgagatcgtcaaaaatggccgcatcgaccctaagcgggtctgcctgacctgcggcaagtgcggcgatttgatccgcgcgcacaagcccacgggctgtgtcatccgcgacagtaagacgtttatgccgttctacaaggaattcttggagatcaaaaagacccagcctgcgaacttccgcggctgatggagagggtgtacttatgaaaaaaactgccatcgtcaccggttccagccgcggcatcggctttgccattgccaagcagcttgggctggatggatacaatatcgtcatggtcgccaccggcccgcaggagaaaaaccagcatgcgctggatgagctgaaagcgatgggcattgactgcgcctatgtgcaggcaaacatcggcgccaccaacgaccgcaagaagattctggacggcgcactggccgcctttggccgcgtggatgtgctggttaataatgcaggcgttgctcccaaagtccgcgccgatttgctggatatgagcgaggaaagctttgactatgttgtcggcatcaacaccaagggcaatatgttcctgacgcagctggtggccaagcagatgatttcgcaggaacctgtcgatggccgtaagggcgtcatcgtcaatgtgtcgagctgcagctcggtggtgtcctccaccaaccgcggtgaatactgtgtctccaaggcgggcatctcgatgctgacaacgctctacgccgaccgtctggctgctgagggcatccttgtcaacgaggtgcgccccggcgttatcgccaccgatatgaccagcaaggtgcagggcaagtatgatgccttgattgaaaagggcaccttccccatcgcccgctggggcacgccggaggatgtggccggggccgtcagcctgctgtgcagcgaccgtctgcgctacaccaccggcaactacattgatgtggatggcggcttccatatccagcgcctgtaagggagcaacgagatggaaaacgaaattttccgcgccggaaattacaccgccaaggtcgtccgctgcaacacggccatcgtgggcagcggcgcggcgggcttcaacgccgccgaccgcctgtggcagctgggccagcatgacatcgtcctcgtcaccgagaaccgcgtcggcggcaccagccgcaacaccggcagcgacaagcagacctactataagctgaccctgtccgggggcgaccccgacagcgtgcgcgagatggccgacacactgtttgcgggccgctgcgtggatggtgatattgccctgtgcgaggccgcgctctcgacccagtgcttcctgaagctggtcgagctgggcgtgccgttcccccgcaaccgctacggcgagtacatcggctacaagaccgaccacgacccgcgctgccgcgccaccagcgtgggaccctacaccagcaagcagatgaccgaatgtctggaagctgccgtgcaggccaagggcgtgccgatgctggacaagacccaagtcatcaaaattctgacggacggcggtacggtttgcggcctgctttgcctgaacacggctgcgcaggacgccgccgaccgctttacgctgattcgatgcaaaaacgttatctgggccaccggcggcccagctggtatgtacgccgacagcgtctatcccttcagccagtatggggccaccggccttgcgctggaagcaggcgcaaagggcaaaaacctgaccgaatggcagtacgggcttgcctccgttgcgccgcgctggaatgtttccggcacctatatgcaggtgctgccgcgggtgttttccacggcggcggacggcagcggcgagcgcgagtttttgatggactttttcaccgacgcgcacgatatgctcagcaagctgtttttgaagggctaccagtggccctttgatgtgcgcaaggtcgccaacggcagttcgatcatcgacattctggtgtatctggaaacctgcaagggacgcaaagtctatcttgattaccgcacaaaccccgcgggcggcgagtttagctatgacgccttgctgcccgaggcgcgcgagtacctgacccgcgccggtgcctgcttcggcacgccgattgagcggctggcgcagatgaaccagcctgccatcgatttttaccgtaataagggtgtggatttgtacacccagccgttggagattgccctctgcgcccagcataacaacggcggcattggcatcgactgctggtggcagaccgacgtgaaaggcctgtttgccgtgggtgaagccgctgccagccacggcgtctaccgccccggcggcacggcgctgaacgccgggcaggtgggcagcacccgcgccgcacagtacattgccgcccgctgtcagggcgatgcgtctgccggttttgacgcggcagcatctgcagctctggccgagatggctgcgctggcagatgcctgccgcgccgataccggcaatgtgcgcgatctttggcagcacgccgccgccgagatgagccgctgcggtgcggccatacgcgaccccgcgcagatacgcgcctacggcaaacaggtggaagcgcagcttgccggctttgcccaaacggtcaaggcgggcagccgcaccgagcttgccatggtctaccgcctgcgcgatatgctgctgagccagcgcgcttacctgaccgccatggcggactatactgccctcggcggtaaaagccgcggcagcgccctgtacaccgacctgacgggcggggtcaagccgtttgcccagctgccggacaccttcaccttcgccttggatgagacggaagccccgctgattcaggagctgtggttcgaggatggtacctgccgcaccggctggcgcgccccgcgccccatccccgaagatgatgacttttttgaaaacgtctggcgcagctaccgcgagacagggaacattgactgaatagatggttctgcctggcctgataaacacaacactagtatatcatgaaaacgaatatcccgggcctgattacatgcgatgcagaagcgctaaagcatagggcatatccctgttatcgacctgcttgcataccgctgcatcctgataccagcgaagcgatacggcatcatttcgatagtagggaaccagtctgatttgctcatcaacgattcgttctttcatatctgtacacccgccagtgccagaaactttttttcggactggataccctgtgtcagaaatacgccgtcccggaacagtgcgtaggtcgtgacgggtgcgggtacattctgtgcggcttctttgtcggtgatgtggatggcccggaacgggatgctatgctcctgcgcggcctgctgtacccttggcacccaatagtaggtaaagggacactgatcggtgtagtagaggacgaagccttctccctcggctttggggtgcttggcgcagtccttgaatttcggcagtgctgtatcggcattgagcgggagacacatgagggtgattccacagtccgagacatctgcgatttcaaagcccttgtgggacaaaaacttggggtcggcgagaaattcccgcttgcgtccctcggcgcacaaaatgcagatgccttttttgccctgcgcttttgcatcgctgaggcatttttccagcaggtcatttgagcagccgtgccctttcatggcaccggagacccacaggcagttgatgtacagccagccatccgctgtaatgggcacccatgcgttttctgccgggatgtactcgataaagcacttgccgcgctcaacactgcggtagaaaacaagtccctcagcaaagcgttgcttgagccattctttttttgcaaggctctgcttgccggacatcgcgcagcagatatgctccttgtcgatgttctctttggtgatttggatgtagtccaa

SEQ ID NO: 818 - DNA, 11357 bp, unidentified
  source 1..11357: mol_type = unassigned DNA
tcatttcaaaacaaccgtaaagcagctgccgctgccggggcggctgtccacagtgacagcgccgccgtgcagggcggctattttttgtgccatggcaaggcctaagccgttgccctgcgtccggtggctggtgtccccctgatagaactgctcaaagatatggcggcaggtctcggcatccataccgcagccctggtcagtgacagccacaaccgggctgccctgctcgctgtgcagtgttacgcttatgattccgctctccgggctgaatttggcggcgttgtccagcagattcagccagatctcctttaccagcgcttcgctgccgtggtaggtgcagggggccagctcggcctcaaactgcagcggcttatcgcgccacttttgccgggtcacaaggatgcactggcgcagctgctcatccagcgaaaaatctgtgcagtcggtcagaatggtctgtgcctcgatacgattcaagagcagcacactgccggaaagctgtgccagccgcttgctctcatcgcggatgatttgcagatactcgtgctgctcctcaggtgtgacatcctcgtccagcagcaggtcggcaaagccgctgatgctgacgatgggagtcttgaactcatgggaaaagttatttacaaaatccttgcgcagcagctcagtgccggaaagctcctccgccgctttgttgaaggctgctttgaactcccggatctcggtggactcatacccgtgggcagcaggctgcaggcgcacggtgaagtcccctgccgccagccggttcatcgcctgtatgatgtttttgatgggctttattaacacaaggcgaatcgaaaccacaaggctgacggccatcaaaatacagctggcatacaaaataaccagcgcaccgccgatgctgacgctgccgtcttggataaaaaagccgtggtcagccttcaataccaccagcaccgtcgcaacggtcagattcagtgtaacgatgaaaaacaggttcagcaccagcagcatcgtcaaatttacggtgcgcatgcagtcgcgcagcttatttacaaattgcgccatatcacaccttctttatagcacggtaaccgatgccgcgaatggtctgtatctcaaactccggccagtcgtaaaagcgggtgcgcagccgattgatgtgaacatttaccgttttatcgtcactttcgctgtccataccccagatctcatccagcagctccagccgggtaaaggtcctttccgggtaagccagcagcttgtacaggaggttgaactccttgggcggcagcacctgcgcatcgtggccgcgccgcacggtgtgggtgtcgtagtccagctcgacatcccctatcgtgatcctgtgttcatccacgatgcgggcgcggcgcagcagcgccttgatgcgcagcacaagctcctgccggtccggcggttttgtcatataatcatcggtaccaacgataaagcccgtgtgcttgtcctgcggcatatccttggccgtcagcattaaaatgggcagcatgctgccgctttcccggatggttctggtcagggtaaagccatccatccggggcatcatcacatcgcagagcagcaggtctatatggttgtggtcgagcatttccagtgcctgcacaccatcggcagcgatcagcggctcatagcccgctcgctttacgatggcgcaaagcagacgcgccgtgctggggtcatcctcggcaatcaaaatacgaaacatccgtgtatcctccttggttctattatagtacagcataaagataaacggaagataaaccttcccgtttaccaaaggtttattttggcggtgtatccttgggagcgttgaaacaaaaaacaccctacgggaaaacggaggatacagctatgaaaaccatctatcttgtcaccggtgctgccggatttatgggcacaaatgtctgcgcacagcttttggagcgcggcaatgccgtgcgcgcctttgtgctgaagggcgaccccgctgtaaaatttatgccgaaggccgtcgaaatttttgagggtgacctctgcagtgccgaggactgcgagaaattctttgccgtggagccggacacccagactgtctgcatccactgcgcgagtatggtgacgatcaacccgaattatagtgaaaagctgatcgccgtcaatgtgggcggcaccgaaaatatgctggatgccgccaaaaatcaccctgagtgcaaaaaattcgtctatgtttccagcaccggcgccatccctgagctgcctaagggcgagagcatccacgaggtatacagctttgttccctacgatgacgatcgcgtagtcggctggtacagccgcagcaaggcgatggcaacccagaaggttctggacgccgccgctgacgggctgaatgcctgcgtggtgcatcccagcggtattcttggccctaacgaccccgccatcgggcagacgacccgcacgctgatccagatcctgaacggtgagatgcccattggtatgcagggaacattcaatcttgtcgatgtgcgcgacctggctgccggcacgatcgccgccgctgaccgcggacgcaagggagagtgctacatcctctccaatgatgaggtttcgctgaaggagctgtgtgagatgctcaaagctgaaaccggctgccgtggctgcctgttttacctgccgttgtcgcttgcccattttgccgccaaacagatggaagcccgcgcggccaagaccggcaagcccgctgtgctgacggagtttgccgtttacaatctggagcgcaacaaccactttgactgctccaaggcaaaaaatgagcttggctttgccccgcgtccctacaaggaaacactgcatgatctcgcagtatggctcaagcaggagggaaaaatcgcatgaagaagctgtatgattctatctgcaagcttatgcaaatgaatgaccagcagtgggagtgctatctccacgcactggattccctgcactgacacagagaaaaggggttgcctattatgaaaaaggtttgcgttatcacaggcggcggcagcggtatggggctttccacagcaaagcttgtctgcgaagaagggtattacacgattttggtggggcgcacggcgtcaaagctggaaaaggcagtcaacgatctgcgccgtgcgggtggggaggctgaggcgttcagttgtgatgtttccaaccgtgaaagctgttttgcgctggccaaacacgccgccgaatgcggcgaggtaaaagcggttttgcatattgcgggccttagcccccacatgggcgatgctgaaaagattttgcgcggcaatgcgctgggcacggtgaatatcaacgatgccttttatgaggtcatggcaccgggcggctgtgtgatcgacacctccagcatgagcgcctaccttgccccgcagtttgtcatgcccaagggtgcgtacaggctggcgcgcaccgaccgtgaaaaattcatcaaaaagctggtggcgcgggcaagcattgccccgaaggacgcccgccccggtcttgcctacgccatcagcaagcattttgtgatttggtttgccaagaccgatgccgcacgctttggcgagaaaaatgtgcgttgcctgagcgtgacgcccggcaattttgacacgccgatgggtgcgctggaaagcgggcaggcggatgtattcaaaaaatactctgcccttaaacgcaacggcaagccggaggaaatcgccgccttgtttgctcttcttctggatgagcggcttggctttctgaccggagcagacattcttatggacggcggcgttgtggcaagcggcgccagcggattgagcaaataaaaaaggcagcaaagtaaaccccgattttagcttttggggtctgctttgctgccttttgcattttgaaatttcgtttggcggtactttagtgcagctcgctttcgcagcggtccagcacggcggcaataacctgatccatgtcgtaatacttgtactcacccagacggccgccgaagatgaccttcggctcggcgtcggccagcttcttgtactcggcatacagtgcgccgtttttggcatcgttgacggggtaatacggctcgtcaccgggcttccactcggaggaatactcgcggctgatgatcgttttgggcaggtcgttgccgttctcgtccttgccaaactcgaaccatttatgctcaatgatgcgcgtccacggcgtctcgcggtcggtgtagttgacggcggcgttgccctggaagctgggcttgtcgagcagctcattctcaaaccggacggagcgatactccagcgtgccgagcttgtagtcaaagtaggcatcaatggggccggtgtagacgaccttgtcagccaatgtgtccagcgcggctttattttcgaggtaatcggtgttcagtcgcacctcgatgccgtccagaaggttggcgatcatcttcgtatagccgccgatgggaatgccctgatacaaggcgttaaagtagttgttgtcaaacgtcaggcgcacgggcaggcgcttgatgataaaagcaggcaggtccttgcagtcgcgtccccactgcttctcggtgtagcccttgatgagcttttcataaatgtcacggcccacaagggagatggcctgctcctcaaggttctgcggctcgtgggtgatctcacggcgctgctcctcgatcttggcggctgcctcctccggtgtgacgacgccccacattttattaaaggtatacatgttgaagggcagcgaatacagctcacccttatagttggcaacgggagagttcgtaaagcggttaaactcggcaaagcgggtgatgtagctccagacctttttgttgttggtgtggaagatgtgcgcaccatacttatggacattgataccctcgatgttctcggtataaatgttgcccgcaatgttggggcgcttatccacgaccagcacggatttgccgtgggttttggcttcatgggcgaagatggcaccgtacagaccggagccgactaccagataatcatatttcatacaacaggtgttcccctttttaaaagttacatggatattgtgcggtaatggcattgagagccttactccactgtcaaaaagcggctgaaaggcggttcagtctctgccgaacagatcccttgtgtagaccttgtcctgcacatcgtcaaggcatgcatcgtagcggttggccagaatcgcctgactctgccgcttgaatttgtcgagatcgttgaccaccaccgagccgaagaaggtcttgccattctccagcgtaggctcatagataatgacctgtgcgcccttggccttgatgcgcttcatgacgccctgaattgagctttggcggaagttgtcgctgttgctcttcatcgtcaggcggtagacgccgatcgtgacgggcttttcacggctttcgtcaaactcgttttcctgatcgtagccgtagtacccggccagcttcagcacgcggtcggcgatgaagtccttgcgcgtgcggttggactctacaatggcctcgatgagattctccggtacatcagcgtaatttgccagcagctgcttggtgtccttgggcaggcagtagccgccgtagccgaagctggggttgttgtaatggctgccgatgcgcgggtcaaggcatacgccgtcaatgatctgcttcgtgttcagacccttgctctccgcgtaggtatccagctcgttaaagtaggcaacacgcagcgccagataggtgttggcgaacagcttgacagcctcggcctcggtaaaacccatgtagagggtatcaatgttctccttgatagccccctcctgcagcagcgccgcaaactcgtgagcggctgcaacaaggtgcgcatcttcggggtcggtgccgacgatgatgcgggatgggtagaggttgtcatacagggccttggactcccgcagaaattccgggctgaacaggatgttcctgctgccgaacttttcccgcaccgacaccgtgtagccgaccggaatcgtggatttaatgaccatgacggcgtttgggttgacctccatgacaaggcggatgaccgtctccaccgcagaggtgtcaaagtgctgggtctggctgtcgtagttggtaggtgcagcgatgacaacaaagtctgcatcggcgtaggccgcctttgcgtccagcgtggcggtcagatccagctccttctcggccagatacttttcaatgtaatcatcctgaatcggtgatttgtgcgcgttgatcaatgcgaccttttccggcaggatatccaccgccgtcacatgatggtgctgggaaagcagcgtggcgatcgaaagccccacatagccggtcccggccaccgcgatcttatattttttcatagcagttatactccgcagttgcgaattttccgtaaggcagcggccaaaattgcgccgtgccgccttaccgtatgtgggttcattataccatgtcatcagccacaattcaagatagcaccgggagtgacggtactatgtgcagaatctgtcagcgtaggcagaccaggaatactgcaggcagtaggctgtgtagctgccgtcgggcagtttgatccggcaggcggcgggggcgccagccagaaggtcctgccccacctgcagccgggcggggtcaggctgggtcagaatgatggtatgcagtgccgggcagtcggcaaaaaggccgtccggcagggcggtgacggcggactgtatcgtgacctcctccagcgcagtgcagccgcggaaggtcccggcgcagagccttgtgactgccctgccgtttatctcggcggggacggtcaggctgcggcgggcgcggcctgccgtattcacggtcacagaaccatcctccgccattgtgaagtatgcggcgtccgcgctgctgccgctgcctgcggcggtgtttgcggccggctccggcatggcgggcagggctatttctgttgcggtggtgtcccccagcattgccttgatgtcacggataagctgccttgtgaacaccgtgcgccccgctgcgttgagatgaaaattcgtatcatagaaccaaccggactccatcacgcaggcgcgggggtccccggccagcggtgcggtaataacctgctgaagatgcgcggcataggcatcgagctgatcttcatttgccacggcaagcgcgttcatgggcggaaaatggtaatagaccgtagccccggcatcggccgcccgggcggtatagtcattgagtgcggcgcagaacgcggcctcgggcagtgcggtgtcaaaccgtattggcatcgtggggtcatagccctcgggcatgatgttggccttgcagagcgggctggccagatcaccggcggcgttgaagctgtcgcgccggtagacgccgtccgtatccggtgcgccggtcaaaaaatagcggagcttggcggcggcaaaccgtggaaacgacccgagcatcggcccaaagtcgcgggcatgcaggcagcccagcgccgaaaaatcaccgtcaacagcctgccagagggcggtaactcccaccgtgtccgacagagcctgttgctgctgctccggcatgacgatgacaatatcccccgcccgcaattcatttatggacaaatcgagcatcacccgggtgccgagcgcagcgtacaggccaaaatttacagggtggtagtccggcagctctttggcaagcagggcgctgtccaccccgaaggctgcagcgctgccgcccacaaggatcagccggggcttattgctctcggctgccagcagggcgcgcttggcgggcagctcccccaaaaaggtgctgctgtactgtgcaggcagggcaaagccccacaccgccagaagcagcggtacggcgataaaagtacccagcatagatgcgatgattttcttcataagcgttacggaatatcgttcagaattggaaatagataaaggcgttggctgtccccgcgtgcagcgcggcaaaccatgcggcagcaacagccagcgtaagcaggcaaaacgccagaacaccgcgcggtgtggggacatcgaatggcttttcaggcataaggcgcagacagagcgcccccagcaccagctgggcggctggctgcagaccgagtgtgagcaccgccgtgcgcacagaggccgcatcccacccgcagggcagacgggagaacagggtcagcgcatcggataccgaggcggcccggaagaacacccagacgaagcagaccgctacaagggtcagcaggcggcgggcaggtgcggcgcgaccctgactatcagcggggaaaagccgcttctcggcgagcagcagcagaccgtggacaccgccccagaccacaaaatgcagcgaagcaccgtgccacagaccgctcaaaagaaagaccgtcagcgtgttcagcgcacagcgcacagcgccgcaccgcgaaccgcccagcggaatgtagagataatcggtaaaccagcgggtcaggctgatatgccaccggtgccagaaatcgcgcagcgatacagcctgataaggatggtcaaaattttggctcagccgcacacccagcagggcggcagcccccaccgcaatatccgaatagccggaaaaatcccagtagatctgcccggcaaacaatacggtggccaatatggcagcggggccggacgctgcgccgggggctgcgtagacggtgtctataaagaccgctgccgtgtcggccagcagcagctttttgcaaaagccgcgcaggatatacagccatcccccgctgtccgtctggcgggcagggtcgcggagctgcggcaaaagatcggtgctgcgctcaatgggcccggccacaagctggggaaaaaagctgacaaacagcgcgtagtaaccaagatgccgctccggtgccagtcggccgcggtatacatctatgacatagccgagcgtctgaaaggtgtagaaggagatgcccgcaggcagcaaaagcgaggcccccgtgccgaaaagaccggcgtatttgaaaacgccgaggcagcccagacagagtattgccgcacagcagagccaaagctttctgccgacccggtttttacagcggccgatggccagcgctgcggcgtaggtgcccagcgtaatgcacgccagcagcggcagggccttcggactgccgagcgcgtaaaacccaaggctggccgcaagcagcagtacccagcgtgcgcagggcggcaaaaggcggtgcagcagtaccgccagcggcagacccagcacaaaggcgggtgcagtaaaattcatcgactgccccctttcggccaaagcgccgccgtgcagggaatgagcaggcagagcagcagcgtttgggtcggaatactgcataccagtgcggtcagcaccagcaccccaccggcggccattcctgctgtgcaagcccagccaaagcggcgggccagcaaggccagcgctgtacacagcaccgttataagcagcaaagccgtcatggcgtcagtccctccttctgcagtgcgtcctttaaggcagtgatgacctgcgccgtgcgcagcgcaacaccgttggtggaaagatgattgtcagtcccatagaaataccgccccggcagcagagagtcctgcagaggtgtcaggatcgctgcgttgaggttctctctgaaataggcgtccagtgcggcgatggcctccggggtggaggcttcggagactgcctgactgttgcgggggctgtaggtcaggtagacccgcacaccgtttgctgtgaagcgcgcaatttcagcgttggcggggtcaatataatacgcctgcggaaaggcatccaccgtgtaatcgaccggcagaccatagatcggcgtatcctcgttggcatccgggcggtagagaatatagtcaccgtaggcattgtagcttggtgtgtccacaggattgccgtcctcgtccagctcggcggacgatacggcgtaggagcgcgccgccataccggcgcgggtctgcagatacgatccgagcgccgaaaaaacgccgctgtactggcgtaaatcgagcggggcaagcagatcgtagttttcctcgaccatgcagaagaagtcatcgtcgaatgcgttcgtcgtgcagaattggcgcttggcggcgtcaaactcgggtgagagcagcaaaagatctccctcctgcagctgcgagcgtatcaattccagctggggcagtgcgttggtataggcaaaaacccccatgttgaccaccgcatagctgggcagggcttgatccagtgccgcgctgtcgtagccgaaccgcgccgaggagccggagaacagcacgagcttgcgcgttttggcaagcaacagaagccggtcgtacttgtcggaaaaggtggcgtagtagctgccgctgtagacgggggcggtcgcggcgttgatgtgcagggtgcgcagcgccgtgcagccttcaaaggcatagtcgctgacggtctgcagattgtcaaagagggtcagcgattccacagcgcagccggtaaaggcccccggctcgatgcggcgcagcgtgtcaggcaggatgatctccctgcaggcggcgtttgtaaaagcgccggcggcgatctcaaccaccggcgcgccacccagcgtatcgggaaggacaaggcgctccccgctcccctgccagcccgtgacggtggcggtgccgttgtttacggtaaaggtgaattcggcggcatcgttctgggcagcccactgggcatagagccggctgccgggcgcggtccggctgcccagcccaacggcctgcccgctgccgtccggggcggtattccatccggtcagggtgtggccggggttgttgaacagctcaccttggatcgcggtattcacacgcagatggcttgcggtaacaggagcctcgatccagtcaccgcccggattgtcccggtagtagagtacggtatcgcttttttctgccgtgacggcaacagcggtcgagtagcggacctccggcaggctgagggtatagccggtgccggtgcgcatcagacgggcgccgggatagtctgcgcccgtcagcgtatagccgtcggccggggtcagggtgaaggtcacactctgccccggggtaacggctgcggtctgggtctttgccgtaaacgcgggcgaagattccaaaacgatgcggcactgcaccgcaggggctgccggggcggcggcacagcctgccagcagaaccagcatggcaaggataagcatcaggcggcgcaagtgagcacatcctttcagaaaaaatctgttttctacggcaataccgcataattctaagtgccgatacggcgagcgaggtgcggcagctgctaagccaaaagcgcagataatact

SEQ ID NO: 819 - DNA, 31881 bp, unidentified
  source 1..31881: mol_type = unassigned DNA
aagcactttgcattattcctctgaaatccatccgtatgtgagcgagtttttgaatctttgtgtcggatacccattaaaaacaagcagcaactctaaagcttaaatagctctgaatttggaacatatattgaatatattcgattggcttttatacatatggtttgcaataaacatactgtatctattggtttacagtctggcgtcacgccggcgtgacctgcctctgccccctccagccaaggaacacaagcgttttgccatactgattcctgcctaccgcgaagatgccgtgatacacgagtgcgtccattcatgtctggagcaggattatcccgccgactgttttgatacggttgtcatttcggaccgtatgcagcccgaaaccaacgcttccctcgctgtgcttcctgtccgcctggttgaagtgcattttgagaaaagcaccaagtccaaatctctgaatgccgccatggctgccatcggcaatgactatgacatcgctttggtgctcgatgcggacaatgtcatcccttacgattatctgagtgatattaacgacctcttcgccaatccggaagtcgagattgtgcagacccaccggagtgccaagaacctgaacaatgacatggccctgctcgatgccatcagtgaggaaatcaacaataccattttccgtctggggcatgccaagctgggcttgtcggctgcccttatcggttccggtatggcgttccgttatgacttgtttcgtgatacgatggctgacatcaaggctgtgggcggtttcgaccgtgaattggagctgaccctgctctatcgcggcaagcgtttttattatctgcccgaaacctttgtgttcgatgagaagatacagaacaccggcgatttctcccgtcagcgccgccgctggctgtcggcacaatggcactactgccagactttcgccaagtttctgtggaaggcgcttgttgcgcgtaactgggacttctgcgacaagcttttccagcagctttccattccccgcctgctgttgatgggcttcacgttcctcttctccgtgttgtttacggtttatcgctggacatgggggctgaagtggtggctgctcttggtgttgctcgctgtcgcactgctcgttgccgttcccaaaaggttctgcaccagccgcctggcaatggccctgcaaaagataccctatacattcctgctgatggcaggaaacatcttcaagctgaggggagcaaacaagacctttatacataccaggcatggggtggcggaaaaatagaaagggatacacaataaacaagtctataagcaaacaaatgatatacggaaaaatcactttagaagattggcgtacagtctgtgtagagggagaagagccggaatcttcttttgaaagttataatctgagacttttctttttcggaactttgtataatcgggacatcttgcaggcaactccggatgataccaatgccaagcttgctgctgatgcgtttctatccgatccggcatatggcttttcacgcctggacggttcgttcaccatagtatattattcagaaaatgaatgcggagtggtgcgcgaccatcatggcacgcattatcccgtctattgtcacattgatggtaattttgccacttcctggcaatttttagaggaccaactggaagaaaatttcgagcctaatctggtttcattgagtacattccttcagcgtggcattttgaagaagaataatttcgccctattcgatgttcattctttaggtgccggcgaaaagttctacatgttgacagagcttggttatctgatgccggtttgggcttctgtaaagttagagacacaagcgaaagtacattccatgtttgattcgctgaaggaaagaaatcccagcttatatgaaaaggtggcagatgacatttattgtctgaagcgcgacagcgtttttgagcatgaacccaaggtggcgactgaacggaatccggatgtagaaacctactcccgccgttatggagaattgcatgcgcaagccatccgccggcgtatcggccatagccgcagggtaggtatcctgctgagtggcggctatgattccggttcaaaccttgctgcgctgcgcagcatttacgacggccagattgactcctattccgtgggctttaaaggagatgcctggacggagctgcccatggcccgtctgatgtctgaaacctttggtacccgtcaccacgagtacgagattgacggtacggaaatcagtgccttgcccgacattgtccgttttctgggtgagccttttatggaaggtgggctgatggtaaactattgtgccatgcgcatgataggcgatgacaagcccgacgtgattctgggaggtgacggcagtgaccagtatttcggtacttccggccgtgaagtggcgctgcattatttagccgcccgcataggattgcgtcccttgctgcgtggcatcaaccgtctgctggagcatgaaacctttgataccggcggaaagctttcccgcatcaatttccatttggataagatacttcatattctggaaggggagcgtttcggcttctccgattctgccttgtgtgcccttctgcaaaatccgaaagaagattttgaaccggtaaaatcactacggcccgatatccacagtttcgaacatctttacgcgcagcatgccattctttccgatttggagactgtaatcaaccgtatcattcttttcaaggcttccagcatggcacgcatgttcggtaacaatctgacgtatccttttatggacctggagcttttccatttcctgcaggagctgccggtagggttgaagtgcaggggcaacagtgtactggacattgcgcggggccgttccgtttctaaatatctgttaaagcaccattataaacctttacttcccgaggccattaccttgaagaagaagcagggcggttttgcacctatgccactgttcttccgtgatagggcccgacgtgctttctttaaggaatttattcttgcttccggcattatggacaactatctgcgtcgtgatgcagtggagaagtttcttacagattatgaacaagttgcagagaaggagggtggttggttctggcataggcagaacaaggctttgcaatatttcaatctgttgacgcttgttgtgtggtgggaagagtttgtggaaggacatgaggtgaaattctgaaaatatgattgaaagcatgaaagtttccattattgttccggtttataatgttgccaagtacatagaacggtgtttgttgtccgtgttgaaccagacttggcaggatttggaagtcattcttgtgaatgactgcactttggacgactctatggagatagccagacgggtggtggcttcgcatccgcgcggaacggtggtgagatgtctggaacatgaagagaacagagggctttctgctgcaagaaacaccggtatttcagcgtctgttggcgattatctgtacttcttggatagcgacgactatatttcagcgaatgcaatagagcttttggcggatgcagcggtgcagaagcgaccggattttgtgataggcaattacgaggtgaccggcgccagacgttgggctcctcctttatcattaggcaccgggttttatgaagggaatgctcttgtactttccacttatgtgcagggaaaatggtatgtcatggcatggaacaagctggtgagtcgtcccctcgttttgcagcataaactctacttccaggagggcattgtacacgaggatgatttatggtcatttaagttggcatgtatgtctcaaagtatgtatgtcgtcaatgagaccacttactattattccatgcagccggattccatcatgcgggcgccgtctatgcgtaatttggaatgtcgtgtgctggtgcttggttatatctacgactttatccggtcttcccggtgtttgcaggataaccggctgatatatatatactttgagagtctgaaggcgaaatattttgaccgtattctgtatttcacgaaagacacatcctttcattatcagagttatttggtattcaggaacaaaaagtatgcgtctttgttggagatgacggggctgtgcctcgaatggaagctgatactgcagaacatccattatgtgcttcctacgtatgccggctatctgtattttaaggcttttgtaaagtcagcctactatttgttggtgttgtctataaaaatgaaggcagtgtttcatgtaaaatgagcgaatatgaataatcttccggaaatatccgttatagtacccgtttataaggtagaaaagtacttgccccagtgcattgacagtattcttgcacagacctttacggattttgagctgttgctggtagatgacgggagccctgaccgttgtggggagatttgtgaagagtatgccgggaaggatacgaggatacgggttttccatcaggccaatgcaggattgagctgtgcccgaaatacggggttaatgaatgcttgtggaagatatgtgacttttattgattcggatgattatgttaagccttgttatcttgaaagtctgtacggtgcattgcctgccgataaaacgaaggagggagtaatagtcggttctcttgatgcatatctgccaaatggagactttcagacgtttcacgttcccgaacaagagctggtctcggaacagatgtatcttgtgctgacagacttgatagacaagcgtgttacgtatgcaggcagcaagctatacgataatcgaattatcaagcaataccgggtgagctttgtgccttttgtttccggattggaagatatgctgtttatgttggactacttgatgtatgcggattttatggttattcgtgattacaataattacgtttatagagtagggtattctgtagatgtattgtctgtgcgtataaacagctttccggcagaatatgcagcattctctaattttttgaaaagggtctatgtatatcaaaagaaatttaacttggaggatagttcactgggtagaacatggaattcattgactgtcttttttcataaagtgattttggcaatctataaacctgagcataagtatacccggcaggaacggttatcttttttgcatcaagtccttttatcagacaaagaatggataagaagattttttcttccacagtataaagcggatgtgttgggtaaattcttgctttgcagggtgggggcatcggcttttgatgggtggatgtatttcttgtcgggtataaaattcaagaaaatgtttggagcgaaataacggagggcattatgaatattctgtttatacatcctgtcatgttccaccctcaaagaggagggattgaaagagtgagtgaccttttatgccgtgaattcataagacgggggcacaacgtcctttgtctgcacaatgttcgggatgaaagccgtatggactatgcatatcctgcatcctcttatttttttccatatcaggttcgggaagtggaaaagaacgggctgtttttccgtggtttcctgcaagagcaccgtattgatatggtcatagaccaggacccgcagacttattataaattatatcctttctctaaagccttgcggggggtgtacattatttccgtgatacattataatcctcttggaatataccatcatttgggggagttcgtgatgtgggtaccgggaaaaaacacaatcatgggaaaaatcagaaagatggcccgtatcataaagattcctatgcttaagtatgattataagcgtacattacaatcggattatggaggcatttttcgatatacagatgcattatgtttgctttccttgaaatttcttcctgatttgaggcagatatattcaaaagatttgagccgggtgattgccatccccaatccgaatacatatcccgctcaagaaaacacggatttcctcaagaagaagcagatattgtatgtaggccggatagagtggcgccagaagcgtgtagggcggttgattgatatatggaggtatatatataaggattttcccgattgggagctggtcattgtgggagatggacccataaggcaggtattagaacagaaggcctcaaagatggaacgggttgttttcaccggttggcaagaccctgaatctttttaccgggatgcaagcatcctatgtctgacgagtgactttgaaggttggggaatggtattgaccgaagccatgacattcggggcggttccggtggcgttcaattcgtatgcagctataacagacattattgatgatggaaaaaccggaatgttggttcctccgttctcgcataaggagtttgcccggaaattgggcttattgatgaaagatgaagaactgcgtatggagatgtcaaaaaattgtgtgcagtatgtgaaacgctttgacatacagaatgtggcagacgagtgggaaaggacttttggcagactgaaatcaacagtccgtcaatgatgccttttcagtatccggtgagcgaatgcacgtatgcccggagtaaaaagatagagtaatgagcaagtgaatattccgtaagtggaaattataatagctccatagactatccaatgtgtaaaggagctttcgggtgtgaacttattgtttggaaagagataatagcatactattgccggtagcagtataatcagtaaatgcttgatgtagccaatccaatagtggagaacggatattttgaatccttgcgaataaagaaagtaaggtttccaaatgactatgataagaaataaactggttatgtttcccatcaatatgcccggcagtccccaaaaatgtcctgcaacgatggcaacagtcaagttgatgattacttccgcaatgggagcccaagtatcttgaaataagccatacccataggtaaattggtctatggcacctcgggtgtagttgatgaacgagttgatgataatcagatatagaatatgttggggcaatacgtattcacttcccagccataatgaaataaaagcgccggtcagtcgaatcagggcaaatgaaatggttccggctatcaagaagcggatacccatcagctcccagaatacttgctggatacgtttggaatcgccctcggctatcagattgcctactcctgcattggtactccctaataggttgctgataaatatacttatcttatcaataatgagcgtatagttcccatagtaagccacagttttgagtgagacgaaggcatataccaggaagggagtggtttggaattgtacaaaaccgcccagtttgtgtacaaacaactgtttggtataccgggttacttccggatatttcttgaaaagcagctttccctgcttcacttcgcttttcagccaggggtatacctgattgactttccagttcaggataatggaataggtaatacccagcagaagttccagactaatccacaggtaataattgcccgtataatatactaaccccatttgcaggagagtctttatcagtacggcactttgaaaataggctgtcactacatagttcttctggtccgctcccaaaagggtttgcttgtaattggcaaaatatcctatcagtgaagtggtcagatacgagaaaaatgcaaaatagatgacacctaaatcaaagacattattggggaatatcaggggcaggaagcatgccaatacacatcctgcgcttagaatgacgaaaccgatacgtcggtagatgaaaccgaaaacggaaatgatttcattaattttcctttcatcgtgttcgaagaggggcttatacagaacgtagccgatggctgtgctgatacccaattctgcaaggttcagaaatcccaagagattgttcagtgtgcctatcagccccataaaatccgcacccaatgcgtccagaaagatttttctggagaaaaaggatagggccaaactcaggaaataaaaaatgagattgacccgggcattaagcaatgattttttaaggcgtgactcgtgaggcataagttctgttattactctgcaaaaatacataaaaataattttaagggaataaaaagtgaaatgtattttattcttagattttattgctaattttgtcaaaagggtatttgatataaataatcgtagattgtggtattgatataatttgtaggatgaagatactgactgttgtttgtggattaggtattggaggaaccgagcgtactgctgaaaatttctcaataggtttgatgcgttgtggatatgatgtaaaggtgtatgcttcttctgaagggggggagcgtgctgaaaatctgcgccaattgggtattgaagttatgtattcatatagtgaactgcatgagttgaaaaattccggttggactccggatgtcattcatttacattcattgagagtgagtatggaggcctttatgttgattcataatcttttcccgggtgctcgtatatatgagcagaatgtcttttgtactcctacaaaatttactccctatttgagctcatcgttacagttgtcccaatggtgtttgtggtattattcacaatttccttctacgaagagagtttctaagactattttaccaaatgctataaatgtttccaatttttatccgtgtagtttggttgagcgtgaggatactcgtaggagctatggtattgcccctgatgattttgtcttgttgcgtgttgggcaaccttataatgggaaatggaatcataagattattgatgtttttatagattttcataagaaatatccacgtgctttactttggctggttggagcttccccttctgtggtacataaaattagcagacttccaaataaatctgtaaaaaacaggattcttcttacagataaactcataggagatgagaagttgagactatgttatggtgcatcggatgtatttttgcatatggcacgaataggagagacatttggtattgtattagcggaagctattttgtgtggtttgccggtcgttactcatcaaacgccctattctgaaaattctcaagcagaagtggtgggacatttacgaggaggacttgtggcaaatcgctatggtggaatcattgctgctttagaacgcctttatttagaaccagagtttggtaagaaacttgcaataactggtgctactgtaattaaagaacgatatagtattcaatcttccataaatttatttcaatctattatgcgcggtgaagtccattcttggaagtatgtaactaaagatttgaagatatatttaagggatgctattgatgctccaatacctggtattttatttcttttatgtatgaagaaagtactgctgtatgttgtgccggataaatactgtcgtttctttttccggttttggtgccgcctttttgataaagccgttcaaatgtaaaaaatatgaaatatacagtaacaattgcaatgccgatatataatgtggcaccttatgtggagaaatctttgttatctgcattgaatcagacctttgttgatattgagtatttgttggttgatgacaaaggtacagatgaaagtatggatattgtccatcggataatatccatgcatccacgtggaaagaatgtgagaattattgatcagaaatataatcaaggtactgcggcggctcgtaatgtaatggtggctaatgctactggagaatatttgtttataatggatagtgatgatgtcatatctcctgattgcattgatatattatatcagaagatgaagcagtattcagttgattttatagccggttcttttcaacgccagacttgggatggagacatttatccgggtgggtatcggtataaagatacattgataaaagacggggattatgctgtggctgaatatcgctatgggcaaggacatgaaatttttgtagctacatggaataaactttataaggtccaatttctgcgaaataacaatatacgttgtattgatggatatatgattgatgatgtttggtttacgtatcaagtgattatgtgtgcgcgttcttgttgcttagtttcggactgcactttattttatacttataatccaaattctgtaacgagtgtgcgatattcacaaaaactgtcagaacaatatgtcagcaccttgtcattaaaatcagaatggattcatgggcttcgtaataaatcgttctacaatggattgatgtatgatattctaaagatgagtgtttatcatagttattgcattggtaattccgaatttgtttctcctgtggataaacagaagcttctttcaaatttgttgtcccggaagtttccttatccatcgcattggtatttcaataaatttctttttaaagccctgccttttcttttgttttatagctttccgatgtcgattaaaatatgggttattcggttcattgtgagtattaatctgaaggataaggtgaagcgctggcttcacttttgacctattcaatcttccacccgtctatactcctcttctccagcgagaagttcaccccgatgcggtacagcttccggtggtccattgcaaagggtttggcatatcctttgtcttctatctgttgcagggcttcctcgggtgtaccatccagtttaaattctacgatgtagacgtaatccttagattttcctttatcggcatgtagtagggaaccaggtatttgatgaatccttcggctacttccttgttagggaatcccagccgatagatgttgaattcttcgtcatattcctttattgtgaggtagccgctttggtaaatcacggcaatgggattgttcttgaacgactccacgtctgtcagtgcctctgcagtcactccttcactcgtaaggtcgggcagacaaaagttgttgtctttcagcagtttcacaaggtaggtgggggtgccggtctcgaaccagtagctgccgaactccaaggagcggaacgtattcagcaggctgaaggggttatacagattggttccgttctggcggaagcggtagccgtcgtacctttctttcagtcgcaggcagacttcgtcgtaggtgataccgtagttttcggctatctggtgcagcgattcttcaaaataggtgtgcatctccttgtcggtcattccgcagagcgtctggaactgtcggtccatggagaggtctatcaggttgttcaggtcgctgaacacactgacctttccgaatttcgtcacccccgtcagaaatccgaagcggatataccggtcttgcgtcttcattacggagtagaaggctttgagcgtgttgcggtattcgttctgcagttcctcgttgcctatggactggagcatgggtttgtcgtattcgtccacgaggatgaccactcgctggccggtctgctcgtaggcgcggcggatgattcccttgaagcgcagttcggggttgacttcgctggggacagttccgtagacgctttcccactggcagagggtatcgttcaatatgtcgataagactgttcttctcatcgtatttactcgtgttcaaatccaaatgcagtaccggatatttcgtccattctttttcgagccgttccatttccagtcccttgaacagttcctgctgcccgttgaagtaggcttccagtgtgctgatgagcagactctttccgaatctccgtgggcggctcaggaagtagtaacgaccggtatgtactaactgataaatcagggcggttttgtccacatagatatatccgtcattgataaggctctcaaaactctgtattccaatagggtacttcatacggctgaactttgtttgatgcgcattttgcttaattagaacaaatgtatgaataaaaaatgaggtggcaaagcttttgtcatgctttgtcacctcccttttcttggttaccacttctctttttttacttcaaaacacgggcattgtttcgtccattccatcggttccacctctccgttgttgttccggtcggggctgaggtcgcgatgtcccgccactttggcttccggatagtccatcagcaaagcgcggaccagtacgcggagcgagtggcgctgccattccgtgcgtgtgtctttgggattcccatagtggtccaatccgccttcgtaggcgattccgatagagtgggcattgtagccgcgggcgtgggcgccggccctctcgaccgggcgtgtggtcaggatttgtccgtcacggcggatgtagaaatgatagcccgtgccatcaaatccacgtcggcggtgcgcggcttccagagcttgcccggtaaagggacggtcctcgcacgtggcgctgcaatgtatcacaatcaagttgatttttctcatttctttctactgtttgcctttgggggctgtgcgctaaaggggaccaccgctgttcatggcgtgtgcgctgaatgcacccaaaagtgccgaagctacagcgatgattactttcagaatcttgtcccaggttgatgattttgtactcataatggttaatggttagtgattagggattagtgattaggggtaggggttagggaacacaagctcatcgcttatcgctaacccctattttttatcccagcggattctccccctggtctccgtcggaacctccgccatcggggttattgtcgccgcttccgctaccggtgctatccttgtcggcagttacaagctcgaagacgaggttgtttgctccgcctttggtggtggcgttgctgtcgttcactaagcgcagggtgttggctaccttgaagcggatgttgacgcgctcgatgttttttacggtgcagtctttggccagttcggtggcacggcacttgaaggtggtgtggaagattccgaaaccgtccagacggacactgttgccgtccgtcagcgtctggcgcatctggcgtacgatggctttgcctacgtgctccacgtcttcggacgacatggcgcccagggcttcaatgtcttttgcgatgcgggcaaggtcgaagattttggcatcttggggcttgcgtttcagggtgtagaccatgggggagctgctgtccccgattttcttgtggcgctgtgtgcgcactactaatgctgttgacatgatggttgatgtttaatggttaatgtttcattccgaaagggaaaggaggtgtctccgcggcgatggcttctgttccgtttcgttgatacaaagataggacatggggcagggaagaagggaggttgggggaggcaggaggaggttgggagaggataagggaggttattgtttcttttgttttggatttgtgacaaataggaggtatatttgtattcgcatagatgtgcgtaaactgaataaaaagacatggaatatgttggaaaacagtaatcaggatatgtgctgttttagctcgttttgatgaagtgcgtgatgtggtggtatatgccaatcttgaaaacgaggcattgcgtgagcatatagacagagtgggggtgaggatttatgtgaaaagtggggaaccttctaagaaggctccccgaagacattgatcataagctgcacctgcgcgggcgtgtaccgtcggcaataggggttcatgcccgtggcaagcaggcgttgttccagcccgggggcggtgcgtatccattcgttcagccggttgacggcagtctgctgggcaatgcccggaaggtagtacatggcgagttcgcctttcccgtaactgcggacggggaagcggggctctgcaaaggaatcattttctttcatcatattctttaaagttcaggttatatgttttctttaatacggataacacatgattgcacggataacctgtgattgcacagtttgcacatgcttgcacggattctctttttctgtcttgtaaagatacggatttttactcgaataacctgccttgttcttcattatttttcaaccaattctcattgtcgaactgcgtgttcaccggtcccagttgctctccttggggggtgtggatgacgtcttcctcgcagggccagtagcgtccgttcaggtggttgtagacgaacttggcttcggtgtgggcactgcccaagtgtttgaaacggaccttctcgatgtagatggtggctatctgcttcgtgtcgttgcggtctaccacgaggcagaagtcggacatgttggcgaagttggcggagccgttgatgtcgttcatctcgacacggcgccgggtgccgtccttttcgttgcggttcaccttgcgggggtgggccacgaggatgacgaggcactggttgcgggtggcgaagcgtcccagcttgttcagcgtgtcggtgatgtagtccatttccgtctgccccggttccagacgttgttccaggcggttcatggggtcgatgacgaggatgcgcacccctttgcggcgcaccacttggcgggctttctccaggatgtggtcgatgccgtagctcccgtcgtcgggcaggatgtgcgacacgttgcggtccagccagcccactgcctgcccgtagacggcttccgtcatgcccggtccgggggtgaagcggtggccggtcagcttctccgccagcttgtgcaggtggtaggcgatgggcatgttttcggggctgaagaaggcgattttccactcgtggcgcaggcagaggcgcagcaccagctcgtcggtgaattcggacttgccgtcgccggggcgtccggtcatcaccagcaggcggcggggctcgaaggtgcagtgttcgtcgaagttctcccagccggtgtcggcaccccgctgcaggccgttctcgtagagggagcgcaggtcgtcgcggcagtcttcggcggtgaagatgccttccaggggcacttcttcggcttgctcgatgcagatgcggaggctttcggcgccgtatttcaccagatgctcgttggcatccttgcagccctcgccgaagtgcacgatgcggcagcgttccactccgatgcggcgcgtgagttcctgccggagcgactgccctgccgggtcctcgtctacggcgatgtagatggcctgcttgtcctcgaagtgcgactcgacgaagcggtccagccacgtgaggttgctctgggcgccggcgggcacggagacgacgtccttgcgtccggcggcgatgatggctgccgcgtcgaactcgccttcggtgatgatgcactccggggtgcccaggatgctgtccacgttgtaggggatgagctcggcgcccttcaccatcatgaagtgcttcagggcgctgcggtacttggtgttgacgagcgtcccgttctcgaagtagttgaagcagatgcagttctcctcctggccgctctccgggaggcgtaccgtctcttcggtgatgcgcagggtgcgcagcagttcctgcggcaggcagcggacggtggtccagtagcgttccaggttctcggagagttgcatccgggcagggtcgaaggtggggcggcggaagtgctggggcggtgcggcgggtttccggcgcatgtcgcggcgctgctgcttgaggcgttcttcggcatcgtcgggcacgtagagcttgtagccgcagtggtggcagtagcacaggcctttgtccaggtctacggagagtgacttgttgcctttgtgtccgcgggtgtcgttgcattgcgggcagatggtcttgattttgccgctgatgcggccgcgggtgtcaatgccgcgttgatgaaaatttctcatataggtttgctttagtagttttctgataattttttagacgcagattttagtttcagggcagcctgaggggttgaaatgccacacttagcgggttggaatgccacacttcacgagggtaaatgccacacttgggacgtgctgaggtgtggcattcggaacgttgacatgtggcattcggaacgctgacgtgtggcattccggatgccggagtgtggcgtttcagccgggtttctgtttcggctttttcgatgtcggcggctgtcgctgcgagctccacgaacgggtcgtttcgttccagaaggcggtattgtccggtcggggcggcgctccgtcggggatggggcagcccaggtaggtgcgccgtccgttcaccagctgctcgtagcgatgggggtcgggaggagcggtggcggactgctgcttttcgagaccctgcaacagcatgtgcagttcctgcgaggtgcgctggccggcttgggtgtagaacgtgaagtagcttcgcacttcttcctggctgttcatcttctcttcttttccgaggagtacgatgtgtttcttgaattcttccagtgccgtatcaaaatgcttgttcagcaggacactgtagccgcttctcatgcagaccatttcacggaacagttgatttttcgacaagccatccacttgcttcctccagctctggtagggagtgatgccgccgtcgccgccgttcttttggacgacatcgtcgtcttttctcttcatctgttcttctctattctgttcttctcttacgcgcgcgaggctggttttgtttgtattaccactgttgttcagtggtttatcgtcatttttcgcatcctccgttttttctggagttttcaaatcattttgcaaatgatttcctttttccgtatagttgaagttgatggcggattcgaattcttcttcgtggatagtgaaaagtttgtattcccagatgattttctccatgtattttttggagaacccttttcttgaaataatattcagttgactgaaactgagtttcctgtcgggctgtgcacagagcatctcgatgatgcgcagatacataccatagcccctgcatccttcattattgatgagtgcggcgagtcttttgtcattaggcaaatcgttggggtgtttgaaccaaatcattttcttcgtgtattagttttctatttcctgatagttatcttatattctgaaaggatagaagggcttcatagtgacgtgtaagggggggagactgttcagcggtcatatcttttaaaatatgcggcaaagttacgtataacagaacaagcctgcaaatggacttttgtagggtttagcggcatctcaccgaccccagaagctgtcctgcgtgtgttacagtctcttttcgggtgcttaggcatacaatggagaaatatgtgttttttttacagaaagtagccggtggagccctctcttcaggcaaccttctacttgttacattcgtaaacatttgactcacagtagctattactctccggactttgttttgtgcatacgtgtcatctgccgtatgtgggccagactgcacagttcgctttgggagaaagacgatttcccttccagcaagccgccaattgcctctgcaatgatttccaactgatccaataatggatttctactgtgtgcagtattcttttcgatgcttactgcgttttgaccctcgctatagagggtcagggttactttttttactcattgtacgtttttaagaaaaacacggcaaagatacggattttacccggaaggagatgtatttttacaattttaaaagtgcgtcaatgcaggaataaagaaggaaatagtgagaccggttacagataaattcgctatatttgcaatatggcaaatgtggaaaaaaacttatctgttgaaactttgcgtggcatcgctatcctattggtagtggtgggacatgtcatcggttccgggcccgatggcggcatgaagattgattttccccacccattgcgttatttctatgtatggatagattatattcagatgcctttgtttaccgccattgccggttgggtttatgcactgaagcctttctccgcatcttccggttttggaagttttgtccggaaaaaagcgttgcgcttgctggtgccgatggcggcggtgggcacgttgtattttctggtacagtatctgatgccgggcaccaataataaaggggaactcagccagttgtggcgcatatatatatttccttacactatatattggtatctgccgtcgttgttcttgatttttgtggtgcaatggtggatagacagccggaagtggatggacactctgggcaagtggagtatctgctgtgtggtggctctggtgtttagcaggataaatgatgtctggattctgcatgaggttcccaacctgttcagtttcaagggagccttggggcaattgccctatttctttgtcggcgtggctgcctgccgttttgctgtgtcgctctacagtcgtccggctgtcaggcgtgtcttgcttgccgtggcgctatgggggattgtcttgatgcagatagtgtggttctatcccggtaaatacgcctctttgagcatgctgctttatcccgtgacgttgattcccaccttgttcctgctgctggcatcgaagtggcacaaccgtttttttgtctggataggcggctatgcgtacagtatttatctttttcatggtttcggtacttccggtgggcggattatactgaaaatgatggggattgatgcgattgtccccatattgctgtctgcaacttttattgcaacaatcgggccggtattagtagacaaactgtttaactgttccaaaatgctgcgaatgctatttcttggaaggagataatgctctcagtctgttgcgcacccttatcataaaacgccgtagccacgggcatgtttctcccgacttcagattatagtatagtgatttggactcataaatcatccggaaagtttctgtacaaagtaccggtttcttggtcaggcggttgatttccacagcctgcggcatagagctttctacaaacagcatgtagtcggtggatgaaccgtattctttggctttgaaggaggcgtggcaattcgcccgttggcgtgcagccatatccggcaggtccagcatgacaagcttattgtatttcacatggttcttccggagccaggcttccgtctccggacggtatttctccaagcgtgaagtgaccagtgtgccaatggtgactttgggaatgaatagcggaggagcgttcagcaggaaatgacggtacttctcgccgtcatcgttctcttccggagtggggtctgcgcaaagcacgccgtcaatgtccatacacgttttttgcaggatagagtggttcatgatgttccactggaagaaacggggataatcgactatttcaaaaaagtagtctacggaattgatttgtagtggaactgcataaatgacacaatatttgacgttgtataaatgttctatgtccttcagaaattcgcggcatttcttcatggcatctcccgtggctatgctatcatccacaaccaatacattatgtatattgttcatgttgaaagttttcccccgttctccggtctgatagatatgcccgttgcggaaagagtctatgtccgtgaccggcaggttcaggtagagcgccagcaggttggcgggaaacatgccactgcggggcacgccgacaatgaggtcgaaatcccgtggcagaatgctgagatgttgcaggatgcaatggttcaggtcgtctatgttacgatagttcatgtagctttctccttcaaaaaattatcgattatgccgtatattttctttacactgtgtccccagctgtgggtctcggcaaaggctatgcgctgtttggcgagctctttgtcgtcagcttcggtcacagcacggtctatggccgaaagccattcttccgggttggtggccaggtgcgtgtggtctgcgaatatgtggcgcatggtgtgggtactggttgcgacagtgggtttacccatagccagatattcgtctattttcaatggatagttaccgtcggtaatgtcgttcaccatttgcggattgatgcagacatcgtaggctgtgatgtaagcgggcaactcgtccacttttttttgcccggtgaaatacgcatttttcaagctgtggattcggtgttggcgaaaaccgtcgtcttccggtccggtgaacacaaaactataatcgggacgctgacttattatctgatagagcagttctccgtcaaggcgggtactgtttatcgtacccatatatccgatgataggatgtggaatattttgtacatcatcgggcgttccgtactctttggcggggttgtatagcgtcaggtttactccggtttcgatggggtaggtatgagggttgtaggcttgcagctctgcggcaaaacgggtggagtttgccagaacaaggtcggccgaagcagccagttccggttcaagacgggtgccgtgcctgcgccagtaagcttcgcctatgacgtagtcgcgccggtaatagatgctgatagccggatggatgtactccttcagatagcggctgcggtaaatgtccgtatcgatgaggtggatgtaattcttgaaaccgagcgcggcagcctgctctacaatccatcgggctatacgggcattgttttttctgttgacgatattgaaaagcggtgcaggcaggaagttggccgaaaataacatgaaaggacagtccagcacccacatgttggcgttgatttgccggagcggtgaagtctctcccttgatgacagccatgcgccggatgtaggacggagattgtctgttccctctcagccggatggaaatgtccatcggagtgttgatgtagagcacccggttctgctttgaaatttccaatgccgtattcttgatggtactgcctatctcgatgtcccatgtttgcaggctggtgatgatgaagtctctcataattcttgccggttaatcatgaatactttgatatatatttacatactcttgcgcagtgtgtctccaggagaacagttttacacgttccagactgtaatttacttgttgctgatagagtgtcgcatcattctccaggcgtagcaaggcatctgctattttttgcggttcttgagggttgactaaaatggcacctttaccggctacttcgggcattgccgaaacgttgcccgtcactacgggagtgccgcaagccatagcctccagtatcggaatcccgaaactttcacgcagggaaggatagagaaatgcaaatgccgcattataaagggttgctaaatctttgttgccgatatatcccggataatacagatgttcttttatcccggtgattccttcttgctgaagaagctggtcgatatattcttctttcaaatcggcaatgagaagggggcgtttcgtttgggatgctttcagatacaacgcgtatgctttcagggtacgtgccgcattctttttggggtctgtatttccaagaaagaaaagaaattccgggtgcggtatgtatttctgcacaatactctcatcgggtgtttcctgcattgaaaagtaagcgctgtagccgttgtaaacggctttaatgacttcttcgggaagttgcagcgcttcgcgtatgcgggtacactcgaactgagaaactgtaataatctttcttgctttcttcaggatacggggaacaatcaggcgacggtaatgccatcccattttctgatagaaggaaggactgcgatgctgacgcggctccagatagataatgtcatgaagcgtcagcaccaaagggacgggacaccatagcggagctgtgttcgatgtacaatgcagcaagtccgctttcagcttcctgacggcctggggcaatgctatctgctcccacaaaggataagtagggcagcgaagctcaatgatatggaggttttccgattcttccaggcaccggtcctcccccggggcaacgaatacataatattcattgccgtctttccgcttttgcagttctttcagtgtctccaggatgacaaagtccatgccatgcttgtctttgcggaaaatgcgttgggcttcgatggcgattttcattttgctgcctttcttttctttttccgtttaaagattctcgtgatgtggctcatggaagaggtgactaccaatatgggcagagaccagaaagcgctccggaatttgcggctgatttccccttcgggcatggccatcagaaaagtgatgaataaaacggctaaaagtgcataccattttgtagcaagcggccactccagaaacgtcattgccacggcacatatcgtgatatataagatgagcaggaaacgggatggaagtagccattggaataatttttcgcataaatcccactttccttgtaagaatgctatcggaaattgttgcaatgccagtatggagctgcggtactgtgagcccaaccagcgctggcgttctttgctgtaccccgatgtatcgtccgtctttttgcaatagcagactatttcctccatgtattcggtatatatgttttccttcaggagttccatttctgcagctttggccaaatcgcttcctgataacctgggagcgatttcctggaacatctcaaaatcaaacatcatgcccgaaccgatgagggcagaggagaatcccagtgccgtatgtgccttgcggaagaggtggttgttgatttcttcgctggtggcgtttaatacggcgatgttggtattcaggttttccgtcatgcggtgggcttggatggcatcgcagccggagtagtaggcattgttgaaaagttctaatgcgttggggacgattttgttgtcagaattgaatatggtgatggcatcgtactcatgaggagaatagcgctccatgacctgctgtatggcatatatctttgtgcaatgctctttatcgggcacgacaatgttgaccggcatctggagcagcgtaaccaaatcttcttcggacagttgtgtggcagccactgcgatgtcgtatttttctttcggatacgtctgcgtgtcaaggaaatgattgatggactctatcacttccttgccgtttttcagcacaacaaagaggaccaggaaccgatgtcgcttgggggacggtggatagggattcttgtatttccgcaaggaggccaatgcatagataaacaagtaggctacggggatggccagcaataagaaaagaaccgcgtccgtcatttgcaaggcattgttgttctcgtccatccaccagtcgggattgaatatggaaaaaatgtcgttcatatatgttttctatttaatattttctatttttttgttctcagtttttctgtcagcagttggtcgatatgctccccgttaatcaggactgacaaaaataaaatgattataaatcctgtagggaattgcccgaagaaagcatttccataggcacttatcatcattccgaagataccgcatgcaatggctgtgagtattccgcgtaattcgttattcttgattcgaaacatgataagatagcaacctcttaacaatgcactgacatatatgataagaaaaagcactaatcctacaataccggtttccatccatgtcttgacataaaaagaatcatggggaatgagtgttgtgagacgggaaccatattttctggcttctactcctcccaagccgagtccttctccgaaaggtttgtattttagatattcagccaattttttttgattttctttgcggacaatgtatgaggcatcttctgtcggtctgaaagctgtacgcatacgcctgatggaagtgttgctttcaccgatataggtatgggcgaaaaaaacataaaaaaacaatccgaagaagactgtagctcccataagtttgatgtttttgctgagaaaagttaacaatatgattcctccgatggggacaaacaatgcaccgcgggtgccggaaatgaacaaggcatatatggcacacatggcaataatcgcataatagattctgatggagcgttttttcatgaagatggcggaaataccgaacagaatggtggcaaaccccatgttggagccgaaatttccggcatctgtgaaaaaggaaaaatagcgggtgacatcggatagaaggtgtgtcttgtacatttccgtttcaatcagcatggttgtttctgtctcatcaaaacctgcatatttctggtaaatggcttttgccacggctgtcagtgtgaatatggacaaaagaagcataatgactcgcaaccgcttgtaggaggtcattgttaaaacactaatcaatgatacgacaagagtattgtatatggttccacgggagtaaacccaagcttcagtgagtgctgttggattcaatatttctgccgcagtatatatggcccatatacaacctccgaacgtcagaatgtttttggcgtatttccatgcaatcttaccttgttggtgataggaatatatcaggagcgtcacaagcagggtgacggttgcgacatcataccagacactcaacccactgccctgcgtgtatctgtaccagggaatgaaaaagtaattgaatgtgaataggagacatacaccgacaaaaggattttttaatgcttgtattgccattatcagtaagaaagggaaaaagcaaatggaggcaaagatataccatgcaccggagagtaggctgtaggtgattacagccaaccctatgatgaacactgacagtgttgctacgaagggagatatactatgtcctttaatacccatttgcatttactttacagcagcagatttggatgttaaccctaattgtgccaaccggctgaagaaactgtggaccggagtatgaggaggcaattctccggtgaagctttcaaccacttcgcggtctgcattgttgagatacataaatagaggagttccttccaattcttcctttaacggtttcaatcgggtgtcgtcatctctgccccacaatcgggcggcgttggctatcagcaaattgaaatctgcctttttcaataccggcataggtagagttgcggtactgacagcaggatattccactaaaatgatgtccggtatttcttctgcttcattcagaacccagaagtcagacaattcttgagcttgtacatatcccttgttttgggtatcgaaatcgtggtcgtattttacaaggcgcactttcataccctcagtttcccaataatcaatgaaatatttggcaaggaatgattttccttcacgtttctccatgctgagcaggtttatgacagtaggacggtccggatgcaggtagttgttcaattgccggcaactgtaggcagcggcaagccggttgcaagccttgaggaatccacgatacttcaagttgcttataccattgaatgctgcaatgacagagagtccggacagacgtttgctgcggtccggatcgcggagagtgcggtctaacaattcaatcagcaggaagtagccgcttatgaatattaaactgccgaagaatgcggcaaggatgtagataagcctttttctgccattgtctgtcagcggatactcgggtgatgctatgacttgcaggttggctgtcgtcatcttgatgttctgtaagcggaggtgtgcttcggcaaggcctgctatctgtcggcggtaattgtcttcggcaatgcccacggcacgctctttccgcttgatttgggtgcctacgggtgaaaaatcccggtattggtcgacaatttcacgctggcggtcaaccaatactttcacttcagctttggcttttgcctcattgatgcatgccgtcagccattctgtcaccatatcctgaatgcctacaccttctttggaaaaactgtactcattcaaattatcggagagatggcttatcttttcttctgccttttgcagggcttctttttctttttgaagtttactactgttctgctgactttgttctgtggtgaaaatttcctgttcgagaatgctttgattcagggtactgactttttccagctcttgcaacaaattagtatttgtgcgtataatcttggcacgtatatccattttattctctaacatctggcgcaaggcgaccgcacttccatagattcgctggacttcttccatgcgatcatcagtaccatatttagtcagagccaatgctttggattgttcattgtagttgatgacttgtttctgaacactatagtctgtcaaatcatcttcttctgcagtaagtgcttttttggctatgcgcacttgctcttcaaaataggcgatagcactgttcgtggcactgaaccggagttgctcataagcctttaacagttcatcttccaatatcttgagggtgttttgcgtaataccgggatcggaggaggtatataccaattctatcaggtcgctggtacccagtcgtttaatggtgattgtgtttaatgcgctataactgtaataagggtagggacggttgaatatggaatagacaaaattactgctgttctctttccggtaattcatcagattatttgtagttttatccaaagaggaacggtctaccaaagccagcacttctttaggaaggatttggacgagctgcctataatgtttggcttgaatgtacatgttgtctttccactcatcaccgtatacgaggctggttgcaagcagacgtaccgaaacctttgccaaagtgttcttggacttgcctatattgatgatattgtcgaaggtactgttgatattgataagctggcttccgtccagattggtgctgttggttacacctgcatatagactgctgtttaccgtataactgtatggcagaaactgtgtaaagtatatgaccaatgccgtaacaaggaggcttccccacaataaccaataacggatgcggtaaaagaagcttgccaaaaattgtactatattcataatcggtttatttgtctgatataacttttacattagtcagcatctccagtaatacgatagaattgtgtaaagctacacgactctgttcatacgtggtcacggcaccagtgcggcgcgcacgttccaaagagagtgaaatgatgtcaacggttccttgtatgaagttgttttctgagattttcatctgtgcgttatacaaggcggccgtttctgctttggcttttatagtggctaattgttcggtaactgcattgtaggcttccaatacctttagtctccgttcttccatgacatcttcttgcatatattgcaattgttctatctgatagcggtagtctttcagtttcagcggtcggttgaacaagtctcctaaagtgataccgacgctggccccgacattgaagttgtgctgggcacttgacatcgttgtctggtacataggggtgaactcgtcactggcattgcctataatattatagcgtccgtaggaatagttaccgttcagtctgaagtagttccaccagttccgcttttctaatctatattggttcttgacttgctctacttgggattgcgctttttttactaatgcattttctgtcactgcatcaagaaagacagatagagggggcaactctaacttctcaatatctattgatgtcttcggactgattaaacccaatgtgttgacttctattttcttgtcctccatcttgagttgctccaatatcttgatgcgctcctcccgtgtcaactcctgctgcgcagccacagacaaaggtacccccaacaatcctaggaggattacactgtaaatgatggacttgatatatctttttatcatctctaaagccatataattcctattatctttttttatacattctctttttgcacaaacgctgtcagcgtcttgcacagtatcttcatgtccagccagaatgaaaattcttgggcgtacttaatgtccagttgctttcgctcttcggccgacatcttcccggcatcgcctcgtttctccacttgccacagtcccgtcagtccggcgggagccatgaaacgctcgatatacgcgtcgctggtcagcagctcggcctcgtagagggggagcgggcggttgcccacgatgctcatgtctcctttgaggacgttgaacagctgcggcagttcgtcaatgctgtacttgcggatgaaacggcctacgcgggtgacgcggggatcgttctctatcttgacaaacgtattctgtttttcttgggccttctttttaaggaaatcttcttcggagatgacaaaatcgtccgaaatcagcagggtagcctcctcttcggaagtgccggtcaggtcgtcgaagcggatatcgggctgctcgtccgtaagctcttcctctatcttatattggttgagggcattcagttctttcaggcgcttgtctgcattggtatacatggaacggaacttcaggaagttgaatatctggtagttgctgcctacgcgctgggatttgtaaatcactttgcctttactctccatgcggatggctatggctgtggcaatgagtagcggagaaagcacaacgagcactgcacacgcaaacagtatatcgaagatacgtttccacataggcaggtggaaagtattgaatatcttgcggtgcgactggctgaattcctgcagcttgtgctccttgcgcaactggaggaatttcgtcatttgctggaggctctcttcgctggccataggggaaagggtgttgttgacacctgcctgcagatagagcttgcggtgttccttcttcagttcttcggtgatgaggatgatgtagacacgggggaaacgcttgtgcaggaaagtgatggcctggctgtctttttgaggggtactttcttcgtaaagaatggatgtgttgtaccgttcgcggataccgtcgatgactttcgccgctttgttgcaggatgaaacagccatgaacatgcctcccgcaattttgctcaagtggtcgatggtgacgcggttgctacctatgtagatataatataacatatccattgattttgtcgtttagagaaatttcttgatacgggccttcagctccataggattgaaaggtttcagtatgaaatcctcggctccggcttcgagcaggttgatgcgctcggtggtactttcctcactggaaagcatcacaaccggaatgtccttgaaaagtgaattgcttttcagatatgccaggaattcactgccggtcatcttgggcatgcgtatgtccgaaatgatgagagcgggttcgttcccctcattcagccattctatggccctgacgggatcttcgaaataaaccagctcattctctttccctaaatagaccgagagtaccttgcctatggcaggtttgtcatctacaaataatatttgtttcattgtttatgataattgtttgctatatttatctatatacattttcttctaccgggtgttcgtaccattccgtatactgggttctgtcttgggcccaatagatgaattccggatatgcgcttgcttcggggatgtcagtacgtgaaacattgatggtttccttgggatagcggaagccatacggcacgcagattgcccacgtgttgttgcctgctaagtcaagattctcttgctgtatggttccggcggcagtggcgccatatccccaaaattcgtaaagatgaacttccatgcgttgttccatgcttttatattgataacagatgaagaagtccagattgtctgagaataggggctctgtccgagtttggtctgtcagttcaataatgacttcataagtatactctttggcggttactccaatgccggtgtttaccatctcacccggttcgactccaaatacattgtgtacttcgcctgcaatggggattacgacactcggatcggaatcttccatataagtaacgttattgtacctgaatttgttgtacgagctgttgaatgactcctggaaacgcgaatcgtcgcctccggtcttgacttcccggatatcggatttattgattccggtaatccggagccctacgcccaacggcttgcttgctcctgctgcagcaagggtcacgtcgagctgtatgcgcttgatgtggttcgtctttttctcgcggtgatagtaggtctccacgtccaagaccacgtcgttgaagtcatagtcgcctaccaacgggaagttgtcttcgaatacgtacgtataggagaccgggtctgtaggggtttctgagccggactcgtccggagtattgccttcgcccgtacagtctccggcaggaatggtgatgggggattctccccatttggatatggttccttcggtgttcttgatggcatcaaggaatttggcttcccaccagatatcctcggtgatatcatcgtcaatttctttcacttcataatgaatgtttccctggctggagaaatttcctatatcttcaattttattgatttttaccagtgcatattcattgtttggacccataaattgtgcttgtgacaattctgcttcatcaagtacggttatcatggagttgtcacccatcgtgatttgggtgttgtaattgttgctatggtccccgaaatcctctatctctgcagaagaggtgtctcccatgttcagtgtgcctacaaattcttccgcatatagatagcatccgttgtctatagtgatgttgctgtcggttttcccgatataggctttaccctggttgatgaatttgcatccgctgtcgaaattcatttcatcgacacgcacggtaccgcaattatagaatgctcctccctggctgacatggaaatcgtctatttccatagtgccggcattgtagttgtagctgcctccggatgcattggtcaattcgatgtcgttccctttgatggttccacccgcgtagacgataaaccggctggattgcactaaagtgaaggtgtgctcgtccggtatcacgatttcccctccgtcaatcacatagaattcgaagcctcgttcaacggtcatgttgtttccattgggttcccagctgccttcaatgatgatgatggccggattgtcacttcccatgccgtccttgctgattttattcctatatatattgtctttggagattttgtaggcttttccgttttgaaaatcggtattcggccttatttcttcggcacttgatagcattgcggtgatttctgcctcagacttttccggtgaataggtctcgatgctgacactgcgtgtccatgcggcacgtgtagttgtgggggaactgccgaaagcggcatggagctgaccgttttggatggatacgtattttactatgttgcggctgtgtgcatcggtgcggcacacaaaagcgctcgtcagcacagaagggcagtccatgacggtagtaaatactgttgtattattggcggtgccttctgccagcagtttggcggatgaccggctgattaaggggttcttgtcgtaaatacgtatggtgtagtcgatgccggtatcttcggatacagaaacattgacccggacctgctgagtcattttccaatccatagccgggtctatgttcttgaccggaaacctatcctgataggctgctttcactttttcggggttaaaaacatcgtctttacaaccctgcagcagtatgcctactgtaagaataacaagcggcagaaagcgtttgtattggatattctctcccatattttacatttgttttgcttgattgtaagcaaaagtacgtttatttaaactaataagctttattaatgggggataaaagcgtgtttgttaacgctttttaacgattttgtatggatagataatgcaagtttgtcttgaaaattatcaatattactaaatgccctctgtattgccgctttactaaatcttggtgatttctcctgccaggtcggaattcatgcggtggcggatttcggcttggtccagtccatgccccaggaggaacatgagtttggtgacggcacattcgggggtactgtcatagccgctgatgacacctgcctggagaagttgcagaccggtttcgtaacgtcccatctcgacggcgccactttggcattgggtgatgttgacgatgacaatgccacgttcgctggcttctttcagctggc

SEQ ID NO: 820 - DNA, 24469 bp, unidentified
  source 1..24469: mol_type = unassigned DNA
tggtgaccaggacatcgaagtccagatagccgccggcgatcttggcgatcagatcgtcatcgccgacctcctgagcgcctgcagcctcagcggccttggcagcgtcgcccttggcgatggcgataacgcggacattcttgccggtgccgttgggcagaacaacagcgccgcggacctgctggtcagcatggcggctgtcaacgcccagacggacatgcagctcaacggtctcgtcgaacttagcggtagcggtcttgcagcacagctccagagcttcgctgggatcgtaagtcttgttgttctcgatcagcttcgcagcgtcaatatacttcttgccgtgtttcattgcgtattaccctcctattcagccctcaacggtaacgcccatgctgcgggcggtgcccttgatcatgctgacagcggcttccagagaagcggcgttcaggtcgggcatcttggtcttggcgatctcctcggcctgtgccagcgtgatggagccaaccttgttcttgttgggcacgccggaagcagtgtcgatgccggcagccttcttgatcagaacgggcgccggaggggtcttggtgatgaaggagaaggagcggtcagcgtaaaccgtgatgacgacggggatgatcatgcccatctggttcttggtacgctcgttgaactccttggtgaacgccatgatgttgacgcccttctgacccagagcaggaccaacagggggagccggagttgccttgccggcggggatttgcagcttgatgtagccagtgattttctgtgccataatacttgcacctccaaattttgtggtgagttgcggcctgcggtgcagacctcccacgggcgtgcgacctccgcacaccctataaaaaccgtaccccggggtgttccccgttcgcggcctttaccggaaactgggtgtcctgaaaaaatcagaacagcttgacctgatgcagctccagctctgccggaagctcgcggccaaacatggtgatcttcacgcgcaccttgcgcgcaggaatgtcgatctcctcgaccgtgccgacagagccttccatcgggccggccgtgatctcgacagtatcaccgaccttgtactcgacctcaaggtcaacggtggtttcgacgcccatcttggcaacctctgcctcggtcaggggctcgggcttggactccgggccgacaaagccggtgcagccgcgcgtgttgcgcacgatgtaccaggtgttgtcgttcatgaccattttgacgaagacataaccgggatagagcttcgactgaacctctttctcaccggtcttgttgccgtgtttgtcaaaaacttcttccatgcgggtctcggtcggaacctttacatcgcagatcagatcctgcagatggcggttctccaccatcgtcataagatccgtagcgaccttgttctcgtagccggaataggtatgtgctacataccagtttgcttgctcagccatggtctttgcctccgctcaacgcgctcaggcgccgatcaacaggtggatggcgccgccaaagatgagatccagcaggatcagcacgacagctgcgactgccacgaccacgataacggtgatcgtattggtcttgatgtcgctcttgctgggccacacgacctttttcagctcgctcttcgtatctttgaaatacttgccgatccctttgaaaaagttcttgactttaccgaagaaggaaaccttcttcgcgccgtcgttctttttgggcttgtcgctttgagtctgggcggcagcggtggctgcttttttatctgccatctctaagctcctatcctcacttggtttcgcggtgaagggtatgcttcttgcagaaacggcaatacttcttcatctcaagacggtcgggagaattcttcttgttcttctccttgttgtagttgcgctgcttgcactcagtgcaggccagggtgatcttgacagtcattgttcggcacctccattatcggttaataagcctccctcgcgcttgcaggcgcccttgaaaaagggcataaaaaataaacccgcaaaagaggtgctaccataataacacgactgcgggtttaagtcaagcgggtttgcaaatttttttgtacttttttgacgccgtggcgaggaacgcggcatataggcgggcattgcccgcccgcgggtcatcgttgacgccgacccctacgataacaaatcacgcaccgctgccattcccgcatccgtcaggcataccccgcctttggctttggcggtttcggcagttacataatccaccgccggcgcggggcgggtactgaggtaggtcagcgtatcctccaaggcgcttacatcggcggccagcaggtcggtcaaaaggcgggcgctctggctgcgcagccctgcggggaacgccgccaaaagcgccgggttctgccgggcaaaggcggcccagacggcggcgcgggcatcggcctgcgccgaggcgcctgtcagcattccctgcattttttcgatcagcggccccgcctgtgcggcggtgcattcggctacaggctccctgccgtagcccagcgcctgccgtgcagcgggcgtgagcagtgcggctgtgtcgaaccggaccagagcatcggacccggcgcaggctgcccatgtcgcgggggttgcggcgatataatgcagcgcaggcgcagcgctctcccctgtggccacagtgccgcagagcagctgtgccgcccgcccggcccctgcggcaagggtgcagtccgccagtgtggtcgtgccggcgggcgcgtttacgcgcagcgagccgggcagtgcgcagagggtcagcgtctgctgcgggccgtctgcccggaccagcaggaaggcaggctcctcctgctggatgaccagcagaagggggaagatgccctgcgcgccgggctcgatgcgcagggtactgtctgcggcggaggcttggcgcagaagctgctgcttttggtactggtcggcaaaaaaggccaccgtcaggatcatgggcagaagaagcagcagcgtcagccccagactgtaccagaagatcccccgtttagaacgcataacccacacaccccttgcaaagactatgcccagagtgtagcccggaagggctgcgcttatacacgaaaaaaaggagtgcttggtatgtttgatgtgtttggtccccacggtgccgaggaggagcgcgaggcgctctggaccgatttgagcgagatccccgatgagcattacagcgaggagaacccgcagcacaacacgcaggaggtcatcgttcccccggcgcaggagccatacggcccggcaatcgtgccgccggaggaaaactgagcagaggcgagcaatgctcgcccctacataagcgcgttatcgtttactgccaccgctcgggcgggatgcccacgcagcagggagagcggcggacatcgaacacgggggtctccttattcctttttatataccagaaagcggaacccgatctcggtggtcaggctttcgcaggcggcaaggcgggcggctccgtctgcgggggtgttccagtaatagggcgtcatcgcaaacagatcctgcacgctctgcccctgcagggtgaggacggcctcggccgaaaccgcccgaataaacgaaaaaccgtcatattcggtctgccgtacctcgttctcataggggtggtcgtagagaatctccttcagcccgaagagatgccgtgcggtgggcaccgcatagatcagatgcccgcccgggcgcagcatacgggcaaactcggcctccgccatcggtgagaagatgttcagcagcaggtcagcccaaccgtcccgcacgggggcgcaaaagctgccgccgacacagaaggctgcctcgggcaccagccgggaggccagccgcacggcctccttggagaggtcaaacgctgcgagctgcggaccgccaagggcctcataaaggtatttgtcgtagctgccctcgccgcagccggcgtccacgatatggccgtggggcagctcggcacagagggcggccagcgtctgcataagcggcgcatagtgcccggcggagaggaacgcacggcgggcgcggaccatcgccttaccgtcaccggggtcggcagtgtgctttttctgcatcggcagcagataagcgtagccctcccttgcgaggtcaaagctgtgtgccttggggcagcgcagcgtgcgcgcattcagcagcagcggtccgccgcagacagggcagcgcagtgctgccgctgtggcgggggtcattccgctgccggggcggcgggtgcggccgtctccggcgtttcggttttctcagggggcaggggcacggtcatgccgccgtgggctgccagatagtcctcaaagttcgcaaacttctgcttcggcgggcggcgggtgatcagctccagcccgggctcgtcctcctgcatacgcttcggcgggcgggcgctgcggggctggcggggtgccttgggctggtccgacagcgggcggctgggggtctgcggtgccgggcggctgctgcgccggggctgctggggcgcagccggacgcgcactctgctgcggcgcggccgggtgctgtgcgggggccgccgggcgggcggactgtccgcggcgggggcgggcaccgctgcggctcccctctttgggggcgttcggggcggtgctctgcggcgcaggcttgcgggcagcgggtgccttgccctcacgctggggctgctgtgcctgcggggcgctgccgttcccggcagggcgacggcggcggcgacggtgcggggcaccgttcggggtctgggcgggcttttccataattcacctgatccttataagccgatgacacggcattcgttgtagtatcgtttttcctcggcatggcccatgctgaaggtcttgcggggcagtacgccgcccagcacaacacccttgaacaggtcggccttggcaaaatcgggcagcagtatggcggtggcgggcttggcggggtcggcagccaatgccatcgcaacgctctcgccgtggatataatcgaccgttacaccggggtggcggggcagataatcagccagaaaggcttcaacactgccgacagtcagcggtgcgggcggattggccagcgccacggcggactcaccgcaggcgtcagccagacgcagccgctggtcggaggcggtggtgctgcttccctgccggcggtcccacgcatccagcgcggcgtacagctccttggcggatacgccgaacaccacgcggtggatcggctcgatctcaatggcggggctgtggacattgcagacctcggccaagcaccagcgagccggatgggtccggcgctgctcctcggtcagggagggcttcagctcctcccaataggcttttgcagtggcaaggctgtggttgccgtcgccaacggccagcaccatcggctcctgccctttggcggcgggccagcggcgggcaaaggcggcggggtcggccagtgcagccagcgcggcatcgacctgtgcgatcagcgccgggtcctccacggcccagccgcgcaggcggccgccgcccagcatcagctccccgtcatagagcgggggcagcgtgtccttgatctgaccgatcggctcgatcagggtgcagccggcgtcatcggccagcatcatgacatggggggtctccagcgcggcaccccggcgcaccttcaggcgcggggggatgcgctccacaacggtgctttcgctgggacggatggcaggcttggcaccgctggtgtagtcgtaggcctccagatccacggcgcccacaaggccctgacggatggtgccgtccatctgggtgcgctctacataaacatagccatgtacttttcttgtcagaacggtatggcggtagtcctccatcgtgcggcggatgctctgcaggcgcgcgtcctcctgcggggtgccgagataggcctccggcaggacgatgtgcagggtgctgggcttgttttcggcgcgctgctcggcgcgctgccaatactccggctgggaggtgaactggtcaacagcgatgcaggcccacggatccagcggaacaccggcggcaggcagtaaaatatcggctgcggtaaagcaggcttcggacatgataacgaccccctcacaaaagcaaaattacaatacgacggtatggcccacaagggcgtagatggccagactcagcacaccgatgtagatcatcgagctgggcaggccctgaaagatcgagggaacggccttactgcgcagacggcggcggccctcccggacgatgtagacagcaaagacatagcccagcccgctgccaagggaaaaggcgatgcactgcaggatcgtatagttctggttggcacagacgagcatggtgcccagcactgcggtgctgcaggtggccagactgagctggctgcggcagctgtggcgcaggcggcggggcagcagccccagcagcagccatgtgacagccatggccgccgcgccgcaggtcaggtagacaacggggcgcagggccgagatcggcagccagtccggcagatagtcgcgcagccatgggaaaaacaggttgtgtgcggcccagcccggcagtgcggacagggtcatgacgagcagcagcggcaggcagaaatcccagacctgagtgcggtgatccggcaccagctttatcaggcggctgacgcccagcgcgcgggccagaacgacattctccgcaaagacagccagcaccatgtagctgacaaattgcagcacgccgctcagaatcggctgcagctcaatgtttacggtctgcatacaggcggcgcacctcctcatgcttgtaatcggtatacaggttggcggcggcgcaccagcaggcggccataacgcccagaatgacaaagccgcccgcgggcagtgcggccagcggcagcagcgcattgtgcatgaccacatggccgaacacggcaccggtggccagcagctcgcgcaggcagccgaccagcagcagtacgacacacatgccgagcgcattgttgaagccgtggcgcagcgcttccttcaccggctcaagctcggagaattccatacgcttgacgatggcaggctccacaacaaggatcggcagatagatgcccagcagcgtgagatctgcgccgaacagcgcgtagagcaacacataggtgggaatgtagagcagcgctgcggtatagcagtagatgaccgggcggaagcgattgccggtcaggtggcagactgccacagccagcatgcgggtaaaggtgacaaggatcagcgcggcgatgcagagcatcagcgcccgttggccgtccagtgcggcgccgatgaccggggccaggcccagcccgcgcacgataaccgggttggagagcaggatgtggtcggcgcggatgcgctcgttcagtgcggcctcggcctccttgtagctgttggccggagcggtccgtttgtgctttggcgcaggggcggcagcgggctgcggggcagtctggacaggctgcggtgctgtgaccttcggctgcggggctgcctgcggcgcgggggccgcgggctgcacggcaggcatctgcagggtgcgggcatcctcggcagcgggctgctgtgccggtgctgcgggggcaggcgctgccggggtaaagccgggcttgccgtattccctgtcgcggtaggtgcggaaatgctcctcctcggcgcgggcctcggcctggcgggcagcctcccgctcggcctgacggcgctggacctcctccagcatggcgcggcgctcggtctgggtgtagcgcgggcggctggtggggatgatgacggtatcattgtgggcagcggtgttgcgcgggggcactgcaggctgctcctgcggctgtacgatcggctttttgggcacaggggtcccggcctgcatggcggcgatggcctgctcgatctcagcgcgggtggccccctgctctgccatgcggcgggcagtctccaccatttctttagtgatatgcgggatgatcagcgtctcggagcgttcctcgccccggcgcttactcggtttttgctgcattggcaagacgctgctcctcctctctcataaagcggatgcgctcggtacggtggctgatgaggtccagccactcgggaatggcgcctgcgatcagcagggcgcagcagacggcgcactcatacgggctgaaggtgcggaacacatgggtcatgatgccgagcatcgtgccgtagacgatgcggctcatcgggcgatccggcattgtgaccggctcacagatcatgaacaggccgccgaacagcgctgtgccggacagcacgatatatttttcaagatagacgcgctggcggatatactcccacgggagggagaaggtcggcagctcgttcagattcgggaaaagccacggcagaccgatgacaaacacaaaaaacgggatgacgaccagaggactgatgcggccccgcaccagcaggaagaggccgcacgccatcaggacgagcgcggcgctggtgcccacagcggccgaaacattgccggtcagcagattcatcgtgctggcgctgggcagaccaccgtcgcgcagggtcgcgttcatgccctcgaccagagtggtgtttacctccccaaagagcggcagctgggtgccgggcacagggtagaaaaagacatttttaggccaggagataccggcgaccacgacgccgacggcagccgggtggaacggatagtgcccctcaccgccgaaggcctccttgaccagcacggcaacaatgacggcggcgatgacgatgggataggagatgctggcgggcatcatcagcacgatcagtgcggcaaagcactcgctggacggctcatgggactggtagcccgtgccatgcagcggtgccagcgcgcagtcgcacaggtaagcggtcagcagcgccgccaaaaaaagcagcaccgggcgcagaccgtaaaaatagcatgacatcccgaccagcgggagcgagcaccagagaatatcgctgtagtagctgtaattcgggctgcgctcgactttcatacgtttgggcatggggaaaagctcctttacttgctgtgcagtacacgtaccacagcggcgggatcctcagcgcggaaaagagaatttccggctacgagccagtcgacaccggcctcaatacactgcgggccggtcacggtgtttatgccgccgtccacctcaatcagggtgttgcagcccagacgggtacgctcggcacggatggcggcgatgcgggccggggtggtgggaagaaatttctgcccgccgaagcccggctccacgctcatcacaaggatcagatccacaacgccgagatacggaaagacggcctccacgggggtgccggggcggatgctgatgccgacctgacagccggtggcgcggatggtggcgatgacctcctccaccgtgtcgggcacggcctcaagatggaaggtgatgagatcggcgccggccttggcaaaatccgcggcatagcgggccgggtcgctgatcatcaggtgaacatcataaaagacatcgggcagggcggcgtgcaggcaggtaagcaccggcgcaccgtagctgatgttcggcacaaaatggccgtccatcacatcaaaatgcattacatcggcaccggcctccagcaggcgggtgcagtccttgtgcaggttggcaaaatcggccgacaaaatcgaagcggcaactttcgtcatgatacaattaactcccttatataaactggttcccacaaattcctgtgcagtgcgcacatataagggtattatatcccattacaagccaaaaagcaaggcggccgccaagcacaaaccgcccgcagagctgccgcaatgcggctctgcgggcggttgtgaaagtttttcagcgggcaagggcagccagcagcaaaatgacaaaaagggactgcaacgtaagcagtcccgcaaagagcggatgctgccggagcatttgtgcgaaggtacgcccgcgcatgatgggtcagtcctttttgtgggtgcgccagtggtgcacagtctgcagctggaattcaaaatcccgggcatccttggccagctggctcgacaggatgatgccggagatgaagagcagcagcgctgcgaccagcacaaagcagcagacgatcagcgtggggaagcgcggaaccagaccggtctggaaatactcactcagcaccggcaccataaagccaacgccgaataccgccagaatggccgccaaaatgccgaagaacataaacgggcggtagtttttaaacagccggccgatcgtacccagcaccttgaagccgtctgagtaggtgttcagcttgctctcggagccttcggggcggtcgcggtagtcgataacgacattctcgacctgcatgttgcgctgcagggcatggatggtcatctcggtctcgatctcaaagccgcgggacagcaccggataggtcttgacgaactggtagctgaaggcgcggtagccggtcataatgtccttgattttgccgccgaacagatggttggtgcagaaccgcaccagatcgttgccgaagttgtggaacgggcgcttgttctgggtgtagtaggtgctggacagccggtcacccacgaccatgtctgcctgacgctcggtcacggcggcaaccatctcgggcgcagcctcagccggataggtgtcatcgccgtccacaaggatgtacgcctccgcgtctatttcgcggaacatgcggcgcatgacattgcccttgccctgctggtactcatggcggacgacagccccggccttggcggccagctcggccgtgccatcggtagagttgttatcgtagacatagaccgtagcgtcaggcaggacgcggcggaaatccgtgacgaccttctcgacggttttggattcgttgtagcaagggatcaatacggcgattttatccataatattcctccggggatttacatccagaattgaacaaggcggctgacggtgtaataaagggacggattcatgccctgcagccaaggctccatggcgaacagcgtgcagaagcggtaaacggcggtgtatgccacggcggcagccatgaccacgcgcagcgcaggcagtgcggcagcggcggtggcatcccccacggcggtgcggcggctgagtgcgccctcggcacagaaccagcacagcgccgccccgacgagcagtaccgggctgtaatccatcagatagcggtagagcaccccggccatttcgcagtccacaacggtcataacgaccatggcggcgatgccgccgtagacaatgcccgccacagcgcggcggtggtgcagacagcggcggaacgcgggcagcagcggcagcgccagcacccacaggtagggcgtggcggccagcataccgccggtgaatttctcgctgatggtgcgaatgacggcgttcgtctggacgtccgtctcccgcaggaaggggaacacgccctgccagctgggcagctcaaacaggctggtaaacaaagcaggcccgatgcgcacggcattgaagccgcgctgggtcatatcgttgccggtcaggttgtagttggcaccgaagtcgaagggcgaaccgaaccgcgcggcgttgtaccacatcagcccggcggcaactacgaccaccggcaggataaaggcggcggcctcccctaccccggcgcggctgcgcagccgcttttgcccgatgtaccgctgccagaagatgggcacggccaaaaaggcgaacagctccatttgagggcgacacccggccaccagcgctacaaacaggctgccaaaggcaagcctgactaaaagcgccccgcgcttttccactggggtattggcggcggaaagccagagccacagccccagcatcagcagtgccgcaccgcagaggatggcgtactcataaatgtagggccgcaccagcaggtaatacagttggccgcccagcacaacggcggccacggccagcaggtacgcggcgctggtggtccgcgggaaccaccggcgcacggcctgccccaccaagccgaagcaggcggcaagaagcagcagccccaaaacgaccatgcagggcgcataagccaagttctggataccggtcagtgcctcaaacggcagttggaataacagacacggtacgataccaaaatagacgtaatatcgcccattgtagaaggcgtggtcccagtggatatcgttgatctgcgccgcatcccgcgccccggcatcgtaggggttctccagcgccagcagctcggcgggcgggtcggcctccaaatctaagcggccgttcagcagactgtgggccagcgcgccgtactgctggtagacaaagctgacggtgcttttgccgtcccagaacgtggtgttgtaatctttcgtggcaaggccggtgttgctcggctcccagaaaggcacgaccaccacaaaggcggccagcaccaggcccagcacggcggctgcggcgcggtcgcacacattgcctgccagccagcggcggtgccataacccgctggccgggcgcaggccatacaaggtcagcaaagccagaaataccgcgataaaacgcagaaccgagaaatccagcgcccgcggggcgttcgccgtgatgccgctgaaggtcagcgccaccgggaactgcgcgtaggtggagctgtacccggcggcagtcagcgtcatcatgccgatgttgccggtcaggtccaggctgatggtgtgggtgcgcggggcctgcaagccgatctgccagttgccgaagcgggtcagctcggtgttggcggcgtcggtgccctcaatggtgaaagtgacggtgctgtccgcgtggagcgggtctgtgtcgtcactgaccagaccgtcaaaccgcaggttgtagatggggtggtcgatgtccaaaaaccgcaggtaggtccgcccctcgtccagcgagatcgtacccagcccacgcccgacgttgatgttctcgtccaggtagtcaacgagctggaacggctcatagctgtgggtgttgaagtaggcgatgttgccgacgaatacttccagccccagcgccgtgatgagcagcagcggaacaacggctttcagccccttgcggccaaagttgcgcagcccggcggtgacgaaaccggtccagccgttcagcgctgtgatggccacgagacggaacgcattgaagccgatggtcagcccggggcggtggtaggcaaagaccgcgaacagccaggtggccagccataggccgatggcccagacgatgtcctgctttatgacgctgcgtcgctgaagctttccgggcaaaagcccgaacagcgcagagaccagcgccgtgaggaagatcgttatcaggaaaaacatggggcgcagtcggctcctttcagtgtgaataaggcttccccccggggaaggcttttatcactgtttcgcgtacttttcgatctcgtgcagccagaaattggcggtgcggtcccagctgtatttctgcaggacctcgtcaggggcggccacgggctgggcggccagcttgtcaaggtcagtgtcgtagtcatagggatcaaaataccgcgccgtatcgccgtacagctcgggcaggcaggtggcgttggccagcgcgatgggcgcaccaagcgccagtgcctccagcggcgggatgccgaagccttcaaacacggcagggtgcaaaaacagcttgcagtgcttcatcagggcagcgttctcggcgtccgagacatagccggggtagaaaacattgtgggtatccttggcctcggcgtcatcgccgaaggcgcgcagatccttgccgcccgcgaccacaaaggtcttgtcggggttgcggcgggcaacttcgcggatccatttgaagttcttgtgcttcgccagactgccgagcgcgtaataatactccccttttacaacgccgggcatcttgtcaaagatgctctcgtcgggggtgacgcccttcatatgctcccagccgttgtaggttatgccgatcttgtccagcgggatgcccagcttctcgctgatgaggtggcgctggttgtcgctgacggtgaacacccgctgcgcgaaccatttggtggacaggcagtgtacccagaacttgaagcggaaaaagcccttgtcggtatccataacgagcgggcggatgtcgtgcagcaccacaacactgcgctttgtcagcagcatatcgctggcaaggccgacataaaaggcgtgggtgcggcgcagataggcgggcagcacggccagattgtagaaatatttgacggccttgagcggcacgagccggatgtttttcagctccggcaggtggatggggcggccgtcgtcccggtaggcaatgcggacatccagaccggtgccctcgatgagcttgtctagacgcaccacagtttcatagacatagcgcgggatgccggtgatgttgtcgcacagcaccgtgccgttgatgacgatggggttcaatccagttcctccttctcccagtgggagcagtccagcagctcctgctgccagtcggccatgcggcgctcgcaatactccttcagctcgcgctcaaagcgctcctcgctgaaggagcggctgtgcttacggatttcttctttagaataagccacgccgtcgcgctcaaaccgctcgatgcagtcggcaagactctcgacggtctgttccttaaaccaatagccggtcttgccggggcgcacactctcgcacgcgccgccgcggccgtaggccagcacgggcgtgccggcgctctgggcctccaccggcgtgatgccgaagtcctcttcacccgggaaaaggaacgccttggcccgcaggtagtagctgcgcacttcctcgtcggacaggccgccgcccagaaattccacggtcgggccggccatagccttgagcttgtccagctctcccccgccgccgatgacgacaaggcgcttgcccagtctagtgcaggcctgcacggcgagatcgacccgcttataccatgtaaggcggccgactgtgaggtaaaagtcctccttctcgacaaagggactttcgttgatatggcagcaggggtagatgacatcgctgtcgcggcggtagtactttttgatgcgctgggcgatataatgcgagttggcgataaaatagtccacccggtcggcggcgcacttgtcccagatgcgcatcttgtgcatctgccccggcatgacgaggcgggcaagccagttggcattggcgcggtaggtgtagtaaaaatcccacacatagcggatgggcgtatggcagtagcagatatgcacggcatccgggcgggtgatgacgccctttgaacaagaggaggacgatgacagcacgagatcgtactctgtcaggtcgaacgcctcaaaggcaccaggcatcagcggcagcatggccttgtacagcttgttggaaaacggcaccttctggaaccagctggtgcggatgtcgtagcttttgaaccactccggcatgtttttgggatcgtacacaagggtgtagatgacagcattggggaaaacatgcttcatggcatcgaccacgcggtcgccgccggcatagccgacgagccagtcatgcacaatggcgaccttgggctcctttttgctcattacagacactcctgtccgataacgcagaatgcgttactgcaatttttcgtcattgaccatcttgccgccgaacaccgtgcggaagatgatcttgatgtcaagcgctacggtccagttttcgatataccagatgtcgtagcggatgcgctcggcaatgtcggtatcgccgcgcaggccgtggatctgcgcccagccggtgcagccggggcggacctgctggcgcaccagatagcgcgggatctcctccttgaaatgctctacatggtagggcacctcgggccgcgggccgaccagagacatatcccccttcagcacattgaagaactgcggaagctcgtcaaggctgcatttgcggataaagctgccgaagtgggtcttgcgcggatcataatcggtggaccagccggtctgctgctgcacattgacccgcattgagcggaatttgtacatcataaagggctttttgttcaggccgatgcgctcctgcttaaagatgatcggcccggggctggacagcttgacgccgatggcggtcgccagcatgatggggctggtcaggataatcagaatcaggctgccgataatatccagcccgcgcttgacggcggcattgagcaggttgtcaaagggcgtctgccgcacattgatcagcttgcactcgtccagcacatcgatcgtggggcgtgcgggcagataatcactgtagaacggtaccatcgtgatgcgcacgccgtttttgtcgcaggcggcaaagacatggggcaaaagctcgatctcgtctgcctccagcgcaacgacgacctcgtccaccggcatttcatccagcctggcggtcaggctgtcgtacccgcccagaaatttcacgcccaggcccggctcctcgaccctggccagatagccgtccacaacaaagccatagtaggggttatgctccagcgcgcgcagataaagcgcggccgatttgccgccgcccaccagcaggatatggcgcagacccagccccttgcggcggcgggcgcgatccacccagcgcaggaccatccgctcaaagacaacggcggccgtggccagcagatagaacagcgccagcacgatgcgggaataatcgtcaaggtgcatcaggtaaagcgcggcgacaaagatcatgatgcctgccgcgttgataacggcaattttggtgcagcgctctgccagaccgtgcaggcgggcgttggagtagatgcccgcgacccagtagatgatcaccagcacgagcgaggtacccagcccggcaaggatgttgcgggggtcgcgcgctacggccagtgcggggccggcgccgcccggctcaaagaaccggacaaagttgaagcggatatagttggcaagcaaaaagccgataaaaagcagcgctgcatcgagcagcagatataaaaggcttttgatgcgttggtttttttccagcacctgtggtgccctccctgaatcgaaaaatactgcgccgcaggggcggggctttgccccgcccggtcatgcggcggcagacgcagcgttccgcgggcggagcagagccccgcccctacagagcgttgggtacaaacgatttaaacaatctattctatcatatttttgccgctattgcaaatcagcggtacaattcctgcagctggtcgagggtctttttcatctcggcgcggacctccggcgggccggacacgacaacgccggtgccgaagcctgccacccagccgaaaaactgcgggctgacctgaatctcggccgtcatggtaaaatgctcgccgtctgcgcagggcaccagcaccggcccggtgccgaagcggtcgatcatcgccccggcaaagcggttttcgcacagcagcgtcacccgcttgagggggccgttgaacatgccgaacatctgctgcatgtaggtgtttacatcaaaattagcgtactcatcggcgccctcgcgggtcgtgtcgggcagggggcggacattctgcatcttgtcaacgcggtagtgcttcaggcggccgtccgtataggcgatgagatagtagttgccgttttcccacaccagcacccacgggctgacgcagtacagctggccgtcgtggcggggggtcatccgcttttgcaggttccagtcgcagtatttgaactgcacctgctgcccggccgtgatggcagagtgcagcgcgtcaacggtatacaaaatcttttcgtcggtgcttttgatccggccgctgacaaggaccttgcggtcaagctcctcctgccggtatttggaggtgaactgcccgagcttgtcgatgagaatcttggacttgcgtgctgtgatgaacttgctggcgtagacggcgtccacaagcagcttcagctcggccagctcaaaaggggcctcggtcatataatagccgccgccgcgcccgcgctgctgtacaatctcatacggggagtccggcatgttgttcagcgtgttcaggtcgtcatagacgctcttgcgctcggcaacaacgccgcgctcctgcaggcgctccaccagctgcgggacactcagggggtgcttctcgtccgtttcgcgggcgaggatgtccaaaaggacaagcagtttgcgtttctggccttctttgcgcggcatagcaacggctcctttccggctgtgaacagatatagtcctattatacaccctataaagggagagggcaagagggctggtgacgattgtacgcaggatttcggaacgagggggacggctgcaaaagcccctccggcctcgcaggctcggccacctccccgctatgcgaggaggctttcacgcgggcaaagcccgcgcaaaaaggctccccacatgtggggagctggccgcgaagctggcctgaggggcttttggggacgccgccccttacatctccatctccgccaaaagctcccccaaatccgcaaaaatatccgtaggcagcatggcggtcatgctgcggtgcttggcgcagcggtcggcagcggccccgtggagccatacggcggcgatggcggcatcctcggggctgcggccctgcccaagtcctgcggccagcagcccggcggtcagcccggccagcacatccccgctgccgccccgggccagcccggcgttgccggtgttgttgtgccagagcgtgccgtccggcttagccaccagcgtgccgctgccctttaaaatggcgatgcaatcgtatttttccgcaagctgccgcgcggcctgcgcccggtcggcctggatctcggccacggttgtgcccagcagccgtgcggcctcgccggggtgcggcgtcaggatcgtgttggcgggcaatccgccccggagtttgccggcagccagcgcgttcagggcatcggcgtccagcacagccccgcgccatggggcatttttgcccagcagggcgcggcacacctcgggggcgctctcccccagcccggggccggccagcaggacggcgcttctgtcggcaaaccagccccgcagggcggcagcgtcatgcgggtggatgccgccgttggccgccgtgcggcagccgcaggcacagcactcaggcgtgcgggccagcaccagctgcacaacaggctccacgctggccagaaagaccagcccggcgccgccgcgcagcgccccctctgtgcagagtgcagccgcgccgcggtaggccatgctgcctgccgcagccagtacgctgccgtagcttcccttgttgctgtctgcccggcgctccggcagcagctgctttaccagctcttgtgtgatctcgcgctgcatcttgcatccctccgcaaatgtattataataggtacagtataatccatttgcagaaaaagtgaaaggggcagttttgcatggttccggcattggaagaaattttggcgggcacaaaaaacatggtctttttcggcggcgcgggcgtatcgaccgagagcggcatcccggatttccgctcggtggacgggctgtatcaccagaaattcaaatacccgcccgagacgatgctctcccacagcttttatgagcggcacaccgcagaattttttgatttctaccgccaaaagctcatcgtgcacggcgcggtgcccaatgcggcccaccggcggctggcggcgctggagcgcgagggtaagtgcaaggcggtcgtgacccagaacattgatgggctgcatcaggccgccggcagcagggtcgtctatgagctgcacggctcaacgctgcgcaactattgcacccgctgcggcaagtttttcccggtgcagttcattgaggcagcagccggagtcggggacggtgtcccccgctgcgatgcgtgcggcggcatcgtcaagcccgatgtcgtgctgtacgaggagggactggacgaggaaacgatggaaaacgccgtcagggcgatctcccacgccgataccctcattgtgggcggcaccagtctggcggtctatccggcggcggggctgctgcggtatttccggggtgaaaatctggtggtcatcaacaagcagcccaccccggcggacggtatggcgaatcttttgatccgggggccgatcggccgtgcactggacccggctgccccggaagaaagttgaattttacacaaaagtccatagttttttgcaaaaaggcattgcaaatggtggtgtgactttgttatgatagatacatagtgcttttataggcaggtaaaaagagggggctggcttttatggcaaacgcgctgacggattttacaaagaaacgcgaatttctggtgtgcatggactccgacggctgcgtgatgaacacagtgcgcatcaagcatacgacggtcatgtgcccggagcttatccgtgtttttgcgctggatgagcaggcagattttatcaccgctgcatgggacgaaatcaacctgcacacgatcacccgcgggatctcccggtttgagagtgtgcggctggtgtttgaccggctgaagaaccgcggcatcgagatccccggcagcgaggacattgccgcctgggtggacaccgcgaccgagctttccacggccagcctgcagcgggagctgcaaaagaccggcagtctggccctgcgcaagctgcaggagtggaacaatgcctgcaaccgccgcattcaggcgctggagcctacctttgagccgttccccggtgtggaggaaagcctgcgccagctgcacgccgtggccgatgtggccgttgtcagcgccgccaacgagagcgccatcgccagtgagtggaagcgctacggtttggcccgccatgcggatgtcatcttcgggcaggaggtgggcagcaaggcgaactccattgccacgatgctggcctgcggctatgagagccgcaaggtcatgatggtgggcgatgctatgggcgatgctcaggcggccgccgccaacggtgttgcctttgtgccgatcctgccggggcgtgaggccgacagctggcgccgcctgcaggaggaggccctgcccaagctgctgcacggcaccttcagccccgcctatcaggccgagctgatcgccgcgctgcgcagcgctttgcatggataaaccaaatacgccaaatttcgcgccgtcactcttgtgacggcgctttatttatggtatactgactatgattatctgtataaataaacagcgcgtgtcatgctgatgcaccgtaggggcggggctctgctccgcccgtggcactttgcgctgccgtaaacggcccgggcggagcagagccccgcccctaccgcgatgcggaaatgcaaaattcatctgggaaaaggagcctcgtgtatggacttattacagcaggcccgggcagagatcgatgctgttgatgcggagatggccgcgctgtttgagcggcggatgcgcgcagtggccgatgtggcgcgctataaggctgagaccggcaagccggtgtttgacgccgcgcgggaggcggctgtgctggataaaaatgcggcccgcatcactgatgagacgctgcgcccttactatcgcgcttttttgaatgatgcgatggccgtttcccgcgcgtatcagcgcgcgcgccttggccgcgacaccgccgcctatcagggggtgcccggcgcatggagccagattgcattgcagcgcctgttcccctttgcgcggcagacggcctgcaccacctggggcgaggtctttgatgctgtgcagagcggagatgcgcaattcggcgtacttccgtttgaaaattccaatgcgggcgatgtttccaccgtgctggatctgctgtacacccacccggacatcatcatctcccgcatgtgtgatttgcccatccggcaggatctgttggcggtgccgggtgcaacgctgcagaccatccgcacggtcgtcagccatccgcaggcgctggcccagagcagcgttttcgtgcagcagcacggctttaaaaccggcacatggggcaacacggccgatgccgcccgccatgtggcggagctgaaggacccaaccgttgcggccatcgccagcgcagagactgccggcttatatggcctgcagatcctctgcgcaggcatcaacgccgacggcgacaacacgacccggttcatcgtgatcgagcgcagcccggagccgccggtcatgaccgggcagggccagcggttggcgctgctgtttacggcgcgtcacaagccgggtcagctggccgctgcgctggaccggatcggcgcagggggctttaatatggagtgcatcaagagccgtcccctgccccatgttccgtttgaatactatttctatgtacagcttgtctgcccggcagacagcagcggcgcagtatgtcaggcgctgctggacacgctgacctctgtttgcagcaccctgcggctgctgggggccttcacccttgacggtatggagaaataatccatgaaaaaggatgtgcgaagcatgaaactgacaatgcagcttaaaagtcgcagctatgatattattttgaaggccggatgtctggccaacctccaccagttcacgaatgtgcagcaccgcaaggtctttgtgctgacggattccggcgtgcccgccgcatatgcgcagacggttgcggcccaatgcccggaggccacggtctataccatcccgcagggcgagggcagcaaatgcctcaaggtctatgggcaggtgctgcaggccatgctggcgttcggcatggaccgcagggatctgctggtcgccgtgggcggcggcgttgtgggggatctgggcggcttctgcgccgcaagctatatgcgcggcatcgactttgtgaactgccccacgaccgtgctggcgcaggtggattcctccatcggcggcaagacggcgattgatctgggcgagacaaagaacatcgtcggcgcgttctggcagccgaaggtcgtgctggtggattttgatacgctgaaaacgctgccccgccgtcaggtggtcaacggtttggcggaggccttgaaaaccggtctgatcggggacccgcagctctttgcgctgtttgagtgcgagcatcctgaggaaaacatcgagcagatcgtctaccgcagcctgaaattcaagaaaaagatcgtggagcaggacgagcgcgagggcagcgtgcgcgcctgcctgaacttcggccacaccatcggccacggcatcgaggcggtgcgcggtgtgcgcggccgccgcacgaccggcctgtaccacggcgagtgcgtggcgctgggcatgctgccgatgatcgaggacaatgcgctgctcaagcgcacccgtgccatctaccgcgcgctgggcctgcccacccgtgccggtgccaaccgggaaaaggtgctggcctacatgcagcacgacaaaaaggccagcggcgatcatatcacggtcatcaagtgccccggtcttggttgctggcgcgccgataagctgccgatgaccgaattgccgggcttgcttgggttggaatgaacctctgcagaggcggatgcccgcatccgcccctacaacattgaggaaacgggaattgtatgaaaaacacctttggaaataccgtcagcatgacgatttttggcgagagccatggcccggcggtcggtgcagtgctggatgggctggcagcggggctgccggtggatgaggctgccatcgcggccgccatggatcgccgccgtgcccggggcgatgggctttccaccgcccggaccgaggcggacgccgtggagcttctctccggcgtgtacaacggtcacacgaccggcaccgcagttaccctgatgatccgcaatctgaacacccgcagcggcgactatgccaaaacggccgacctgctgcgccctggccacgccgactacacggcctacgccaagtacgaaggctttcaggatgcacgcggcggcgggcatttctccggccgcatcacggcggccagcgtggcagcaggcacgatctgcgagaccgtgctgaacagtctgggcgtaaaggtctacacccatattgccgagtgtgcaggcatcaaggacgccccgctttcgagtgcggcgggccttgtgatgcccgcgccgcagcccgggcattttgccctgctggaccctgcaaaggaggagccgatgcaggctgccatccgcgcggcgggcagcgagggcgacagcgtgggcggtattcttgagacggttgtgaccgggctgcccgccggtatcggtgagccgtggtttgacagtgtcgagagtgaactggcccacctgatgtttgccatccctgcctgcaagggcattgagttcggcgcggggttcggctttgccgccctgcgcggcagtgaggccaacgacccgttcacgatgcgcggcggcgagatcgccaccgctaccaacaaaaacggcggtg

SEQ ID NO: 821 - DNA, 41214 bp, unidentified
  source 1..41214: mol_type = unassigned DNA
ctggacggcggccgtatcggcatcgcttctcaggctctgggcattgccgagggcgccatcgatgagactgtcgcctatgtcaaggagcgcaaacagtttggccgctccatcgcacagttccagaacacccagtttgagctggccgagatgaaggcccgcgttgacgctgccaagtatctggtctacgcagctgcccagaagaagcaggctgccatggacggccagaaggttcgttacagcgttgaggctgctgaggccaagctcattgccgcccgcaccgccagcgatgtgacccgccgctgcctgcagctgttcggcggctacggctacacccgcgattaccccatcgagcgcatgatgcgtgatgccaagatcaccgagatctacgagggcaccagcgaagttcagatgatggtcatcggcggcgcgctgctgaagtaaggaggacagacgtaatgaaagcaatcgtttgtgtcaaacaggttcccgatacgcagggcaaggtcgctgtcaaggctgacggcacgatggatcgctctgccatggctaccatcaccaaccccgatgacctgaacgccgtcgaggccgccctgcagctgaaggacgagaccggctgcgaggtcgtcgtcgtcaccatgggcccgccgccggcagagggtatgctgcgtgagctgatggcccgcggcgctgaccgcggcgtgctggtttccggccgcgagttcggcggttccgacaccttcgccacctctcagatcctggctgctgccgtcaacaagatcggcgtcggccctgaggatatcgttttctgcggccgtcaggccatcgacggtgataccgctcaggtcggcccccagatcgctgagaagctgcacctgcctcaggtcacctatgtcaccgagatcaagaaggatggcaactccctgaccgtcaagcgtcagctggaggacggctacatggagctgaaggtccagactccctgcctgctgacctgcatcaaggagctgaataccccgcgctacatgagcgtttccggcatcttcgagtgctacgacaagccgctcgaggtctttgactacaacgctttgaaggatgacccgctcatcgagaccgacaccatcggtctgaagggctccccgacgaacgtttacaagtcctttgctcctccggtcaagggcgccggcatgaaggtcgaggacgctgcccagctggtcggcatcctgaacgacaagcacctgatttgaggaaggagaaacgaacaatggctgaattcaatgcaatggacaccgccgccttcaagggcgtgtgggttttctgcgagcagcgcgaaggcgagatccagtccatcagctatcagctgctgagcgagggccgcaagctggccaacgaccttggcgttgagctggctggcgttgtcatgggcagcggtctggctgaggctgacctcaagaccctgggcggctacggcgctgaccgtgtttacaatatcgacagccccctgctgaaggactacaccaccgatggctatgccaaggcgctgtgcgacctcatcatggacaagaagcccgagatcatgctgatcggcgcgaccaacctcggccgagacctcggcccccgctgcgcagcccgtctgcacactggcctgactgccgactgcacccatctggacgttgatgtcgagaagtacaagaacttcctgcgcaccacctccaacatcgatgtggacaacaccaagttcgaggaaaacaccaacctgaagatgacccgccccgcattcggcggccacctgatggctaccatcatctgcccgcgcttccgcccgcagatgtccaccgtccgccccggcgtcatgcagatgcaggcgttcgatcaggccggtgctgacaaggtcgtcatcgagaatgttgctcctgctctgactgccgacgacatccatgttcaggtgctcgacatcaagaagagcgctgagaagctcgttgacctgatcggcgctgacgttgtcgttgccgtgggccgcggcatctccgctgaccccgagaagggcatcaagctggctgaggagctggccgaggctctgggcggcgttgtcggtgcttcccgtgccgtcaccgacgagggctggctgtctgccgaccatcaggtcggccagaccggcaagaccgtgcatccccgcatctacgttgccctgggcatctctggtgccatccagcacgttgccggtatgcaggactccgagaacatcatcgccatcaacaagaacgagaacgcccccatcttcgatgttgccacctacggcatcgtcggcgatctgtacaaggtcgttcccgagctgatcaaggagatcaaggctgccaaggcctgattccgcctgtaatcaacaagagccgtgccccgcaaagggcacggctctttgttttttgtatcgcttagtctgccacagccggggcggacagcagctccgggggcagctcactctcgtcctcattgacgagggaatcatcgatatcaaatgtcgcatcaaaggcctttgcggcagcgtccgccaacagatcgacatcgaccagctcactgtctgccatgacatacagcagcttatcatcaaagctgaccacgcgggccttatctgcctccacgcagacccacttgcgcatgctgatgttttcctccatcgaatcggcaatctcgcgggcatcggccttgtccttgaggcgcagcagcaccaggctgtacgcctgactgccggtcatcggctcgctgactacggcggcgtccaccttgcccacattgtccgcagtcagccccgccagatagccgtaccagctctcatcggtcaggtcaacagccaccgtctcgatgcccatcgcctcaacaggctgaagctggtagatcgcgtccaccataccgcttagctccgcgtccggctgcggctcggcggtctcaccggtatcctcatcgtcaacgctgaactccgggtccagctccgcgccttcctcaggtcttgtggcaggttggttcgccagatcatcgctgtcagccttctggctgccgcaggcagacaggagcagagaggtcagcagggctgttgcaaaaagcagctttttcatcgtaaaattcctttctcggtcaaaatttcgtcaggggcaaagcgggcatcccagtcatcggcaggtaagtccgccagcagggccgccgccgggcagagcagcagcctttcccccttatattgtgccagaaaacggtcataatacccaccgccgcggcccagccgcacgccgtccgtcccggccgcaaggcaggggatcagcgccagcgtggcagcatacccgccggggtcggcggcgggcaggtctgcgggcggctccgggatgccgtaggcaccgggctgcagcaaagacaggctcggtatctccacccagtccatctcggtgcggctccgcacacggggcagcagcagccgtttgccgtccgccagcgcttggcgcaaaatggccgctgtgtccggctcgtccggcatagctgcaaacgccagcactgtgtcggccgccgcccagcagggcagggcaaacagcgcccttgccataccgcagccgacagcctgcctatccagctctgcgcgccgggcctttgccagcgcgcgtgcctcctgttttgtcattgtgcatcccaccttttgaggtatcataccatatctgcccttaccctacaagacggaaaatgaccgctgttgttacagcagcgacaaaatttttccgccatcttgcccgcagcggcagaatagagtataatataagctgtatcgctatgtatatgctgacatttatataaaaaggagattcaacctcatgggcaagtttaattttatcaagaccgacattcccgaagtgcagatcatcgagccgactgtttttggtgatgaccgcggctattttatggagacctaccagatcgacgattttgccgccgcaggcatcgacaagccttttgtgcaggataaccagagccgctccaccaagggcgtactgcgcggtctgcacttccagaccaagcacacccagggcaagctggtccgtgtgacgctgggcgaggtgtttgatgtggccgttgactgccgccccaacagcgcgaccttcggcaagtgggtcggcgtgaccctctcggctgagaacaagaagatgctctggatccctgagggctttgcccacggctttgtcgtgctgtccgatgtggcggagttctgctacaaatgcaccgacgtctacgaccccaccgccgagggcggcatcccctacgacgacccgactgtcaatgtccagtggccggactgcggctgtgcgcacaagaccagcgccaaggacaaggagcacaccccctttgccgaccagaagtttgagtattttgagaagtattgaggatacaccgtggagaaactgaaaaacacctttgccggtttctggaagtaccgctatctgctgcaaaacctgatctcccgcgattttaagctcaaataccgccggagcgtgctgggcgtggcgtggagcgtgctgaaccccctgctgacctgtctggtcatgtgggccgtgttcggggcgctgttcaatgtgcgcgggcaggggattgaggatttcccgctgtttctgatcatcggccagctgatgttcaacttcttccgcgagagcacgaccatggccatggagagcgtgctgaaaaacggtccgctgctgcgcaaggtctatatccccaaatatatcttcccgctggagaaatgctgcttcgcgctggtgaatttcttcttcagtctggtggcgctcttcattgtggcgttgctgacatggtcgcatatttcgctcgggacggtgctgctggccatttatcccatcgtcatgctgtttattttcagcctcggcatcgggctgatcctctccacgatgtatgtctttgtgcgcgacatcatgcacatctgggaggttttctgcacgctgctcgtctacggcagcgccatcttctacgacccgcgccagatggaaagctggatgcagttcgtcatcaacctgaaccccatctactggtacatcacctcggtgcgttcctgcgtcatgtggggcgagggcctgaccgcaaacatgctgctgatcccgttcctctgcgctgcactcagcctgggactgggcatctttgtctttaaaaaatatcaggacaaatttgtcctgtacatgtaagggggcatcgaaatggcagagcagaaacccattatctcaatcgaccatgtttcgatgcgcttcaacctcgccaaggaaaagcacgagagtctcaaggaatactttgtggcgctgctgcacggcggtgtccggtttgatgaattctttgccttggacgatgtatcgtttgatattatgcccggtgacttctacggcctgattgggctgaacggcagcggcaagtctacattgctgaaagtcatttccggcgtgtataagcccagcgcgggcagcgtcacggtcaacggcaccatcgcaccgcttatcgagctgggtgccggctttgacatggatctgaccgcgcgggagaacatctatctgaacggcactgtcctcggctacacgccgaagtacatcgactcgaagtttgatgacatcgttgatttcagcgagctgcaggatttcctcgatgtaccgctaaagaactactcctccggcatggtagcgcggctggcgtttgccgtggccaccatgacaaagcccgacattctgattgccgatgagatcctgtcggtgggcgatttcctgtttcaggaaaagtgcgaaaaacggatggcagagctgctgtccggcggcacgacggtcattttggtcagccactcgatcgaccagatcgaacgtatgtgcaacaaggtcgcgtggctcgaccacggccatctgcgccgcctcggccccaccaaggagatcacggccgagtaccgcaaattcgagaaaaaggacgccatgccggcaaaagtcaccgaggaataaatcatgcctgaaacttcccataagaaacccgacaacgagcgccctgccgatctggccgtacaggacagtgtgggcggcatggcgcgccgccttttggatcccgcccatctgcgggatctggccggccgcagcgtcaagaccctgcgggagcagggcgctgaacagctgtggcgtgatgtgaaattccgcgtcgggctggccctgcaccacgatgactggcggcaccgggcagacatcccgctgcgccgcgagctgaaagcccagcgcgccgccgccctgcaggggccgcagatcagcatcatcgtgccgctctacaacaccccggcaaaattttttgatgagatgctgaacagcgttatcaggcagacctacaccaactgggagctggtgctgctggatgcaagcgatgccgacaaacggctggagcgccgactgcccaggcaggtgccgggcaccatcgtgtatgagtgcatcgagaacggcggcatcgcggccaacacgacccgcggcttcgagctggcacatggcgattttattgccctgctggaccatgacgatgtactgtatcccaacgccctctttgaggttgtgcagaccatccaaagcaccagtgcagattttgtctacagtgacgaaatcgttctctcggctgatttgaaacaactgggcgggtatcacttcaagccggattttgcaccggactatctgcgcggtgtaaacttcatcacgcatctggcggtgttcagccgcccgctgctggatgcggccggagcctatgagtcgaaggagtttgacggcgcacaggatcacgatctgatcctgcgcctgacagaaaaagcgcatcgaatcgagcatatcaaaaaggtgctctatatctggcgcggccatgcgggttccaccgccgcaggcatggaggccaagccctacgccatcgcggcgggggagcgcgccatcgatgcgcagctcgaacgcctcggtctgccggggcacgccatggctgtgcccgatgcgcccggggcgttccaagtcaggtatgagctgacgggccacccgaagatcagcgtgctgatcccgaacaaggaccacaccgacgatctggaccgctgcctgacaagcctgtacaaaaacgccgggtatgacaattttgaggtcatcgtcattgagaacaactcgactgacccggcgacatttgcctactataaaacgctgcatgaccggttcccgacctgctgggtcgtgacgtttgaggggaaaggcgcgttcaatttctcggctatcaacaacttcggcgcgaccttcgccgagggtgagcacctgctgctactgaacaatgatatcgagattttgtcgcccgactttttgcgcgaactgctcagctacagccagcgccccgatgtgggtgcggtgggtgccaagctctactacccggacgatacgatccagcacgccggtgtgctgatgggcatcaacggcagtgcgggccacagccacaagagctacccccgcaccgctgtgggcgatatgtaccgccttgtcacaacgcaggattacatggctgtgaccggtgcctgcctgatgacgaaaaccgcgctctaccgtgaatgcggcggtctggacgaggaaaagttcgccgttgcctacaacgatgtggattactgcctgaagctgtggcagaagggccttttgaatgtttacaccccgcgtgccgaggcataccattatgaaagcaagagccggggccttgacacattaagtgagaacgcccgccgctacgagcgcgagaaagcgaatttctacgcgaaatatcagcagtatatcgacaattacgacccctattacaacccccatttcaacaatctgtttgaaaatttcgggttgaagtgatggaaaccgtattgccgaagcgcaagtctcaccatttgcagggttacgattacagccaaaacggcgcctattttatcacaatatgcacgcaccaacgcagaatgttgtttggcccgaaccgggctcccgtaggggcggattccatatccgcccgcatggcggcgcgcgttttccgggagatcatcggtcaatatcctacggttcaatgccattattttgtggtgatgcccaatcattttcacgccttggtggagattcaacggccacgggcggatatggaatccgcccctacggttatcagcatcgtgcaggcgttcaaacggtattctacagtcgagtacatccgtcttgtcaagcgcgggcaagccgcatcgttcgataagcacctttggcagcgttctttccatgaccatgttgtccgcaatgaaaccgattaccgcatgattgcggaatacattcaatcgaacccccgcctttggcacaaagattgcttttatgaggagccaccccatgagccttgaaacaaaacgcatcaaagagctgttcggctatgcgcggaccctgacaaaggaacagggtgtcggcgtcatggccgggcgggccgttggcttttttaagcggcggttcttcggtaaaaaggcgcggtacctgccgtcaaagcagacgctggacgcccagcgcgccgatgccgccgcaaatgccgcaggctggccgaccatcagcatcctgaccccgctgtacaacacgccgccgcagtttctgcagcagcttctggacagcgtgcaggcccagacggcgcccaactggcagcttgtgctggtcgatgccagcgatgacgcccacgccgatgtcggcagggctgtgcaggtgcgcgccgcgcaggattcccgcatcgtctatgccaaaatcaaaaatgcgggcatcgccgccaacacgaacgaggcagccaagctcgccaccggcgactatttagccctggccgaccacgatgacatgctggccccccacgcagtgtactgcatgagcaaggcccttgccgaaagcggtgcgccctttgcctacagcgatgaggccctgtttgagaaaacgcccgagcatccgcgtgtcggccacttcaagcccgactacgcccccgaatacctgatgtcggtcaactacatctgccatctggccgtattcaaaaaatctctgtttgacgcagtcggcggcgagcgccctgcgtgtgacggcgcacaggatcacgatctttttctgcgccttgtggatgagatgcagtgcagtgaccctgccgccaaaccgctgcacatcccgcaggtgctgtactattggcgcgtgcatgcggcatccaccagcggcggcacggcagccaagccctatgttgagcaggccgcgcagcgggccgtagccgaccatctgaccgccaccgggcggcagggcagggtggaggccgggcttttccccggcacctgccatgtggtgtgggatattcccgaaccggagccgcttgtctcgatcctgatcccgaacaaagatcacaccgatgatctggagaagtgcctgcacagcatctacgccaaaacgacctatgaaaacttcgaggtcatcgtcattgagaacaactcgaccgaccaggccacggcggcctactacaagcgcctgcccgaccggtacgaccgcgcccgcgttgtgacctacaagggcgggttcaacttcagccgcatcaacaatttcggccgcaagtacgcggcgggtaaatacctgctgctgctcaacaacgatgtcgaggtcatcaacggcgactggctcacccagatggtgggggagtgcagccagcccggtgtaggcatctgcggtgcgatgctctactatcccgatgacacgatccagcacgccggcatcatcacggggcttggcggctatgcaggccacagccacaagtaccacaagcgcggcggcagcgggtacatgttccggctggccaccgtgcaggatctctccgccgtgaccgctgcctgcctgctggtgcgcaccgctgtctacgatgccgcccatggtctggacgaggagttcaccgttgcctacaacgatgtggacttctgccttcgggtgcgggacgccggctggcgcatcgtctggaccccctatgcacagctgtatcactatgagagcaagtcccgcggctccgatgaaaacgacccggccaaaaaggcccgttttgacgccgagcatgaccgcctgtatgcggtccacgggcgggagaacatcctgcatgacccctactacagcccgtccctctccctcgattacgaggatttccgcgaaagcggcgatttgaggaatctgaaatgagttgattgccttcccccgtgggggaaggtgcccgaagccccgaccgagggcggatgaggggcaggtttgccctattgcccgtcagtgggaaatccccggtaagtttgcccctcatcagtcagcgggcggggccgctgacagcttcccccctctggggaagccatactgacaaaaaacgcacgccgtaaatttcacggcgtgcgtttttattattcttttttatccggcgggaactcaccctgcttttcggcctcgaggcggctcaggcgggcctccagctcggagatgcgctggttgacgatatccggcagatcctgctggtcgaggtcgtccgccgggcagcacttgacattgcccacacgcacgatctccgccgggacgccgaccgccgttgcgttggcgggcaggtttttcagcacaacgctgcctgcacccacgcggacattatcgccgatgtagaccgggcccagcaccttggctccggcaccgatcagcacattgttgcccagggtcgggtggcgcttgccggtatccttgccggtgccgcccagtgtcacaccgtgatagatcgtgcagttatcaccgatctctgtcgtctcaccaaagacgatacccatgccgtggtcgatgaaaagcttgcgcccgatcttggcaccggggtggatctcgatgccggtcagatgccgcgccagctggctgacaaggcgggccagaaaaaagcagtggtgacggtacagaaaatgggcgatcttatgcgtcaccagcacatgaaagcccggatacaaaatgatgacctccgcgacattgcgcgccgcagggtccttatcgcggatgttttttgcgtcttcccaaagccccataattcttttcctctttgctttacgatacttgtttattagtatatcacaatcccggctagagtgcaacgcaggatcgttgcggatccttcaacttttcccgcagcaccgcccttgcaaaatgccgcgctgctttgtatactgatggtatcataaaggaaaagaggctgcatggtcatggatcatcagaacatccgctttcacaatgtcgaggagctggagccggtcgagggcggctggctgctccgccgcatcggtgccgcagcacgcgcccgcatcagccccggtgtgcaggaaaactgctttgccaccggtattgagctgcgcttcacgatgccggacggcgcagttgatctgctgctgaaaaccattcctcaggccgaggccgccaccgcccacatcttcttcggctcatttcagggcgggtgggagtactcctccaaaaacattggcgcggatgtgacccgcatccacatcgaatacccggccaagctcgccacgctgcgccgcatcacagcggaaaagcagcttgcctttgcgcccgaggtcgtgcgggtcgtgctgccctatgtgccggtgatctttgcgggggtcgagggccggaccgccctgcccgccgccgaccagctgccgcagaaaacctatctggcctacggctcgtccatcacgcacggtagcctctcgctgatccagccggattgctatgtgttccgcaatgcacaggcgctcggggtcgattatctcaacctcggctttgccggcaacgccctgatggaggaggagatggcaaactacctcgtatcgcgcagggattgggactttgcctcggtggaaatgggcatcaacaccaccgagcgggtgaaggagttcccgctcgaggtgtttgaggagcggatcgaccgctttaccgccgtgctggcccgcgatccgcggccggtgttcgccacctcgttcttcggctatctggatgaggacactgaccgcaccgacaagatgcgccggatcgtgcggcgctacgccgccgagcggctcatctttaccgatggcctgcagctgctggacgatgagacccttatctcggcagacggcacccaccccgatgcccgcgggcaggagcagatcgccgcacgctggagccgcatcatggcggaaacgcttgccaaccgcacggcgcggtgagttttttaggcgtttatcattttgtacaaaactcggcgtaaaaatccataaaatccttactttcgcaatccgggcgtttgcattgacactgccgtccctacatggtacaattaagtaaaatccatgtaagaattcggggaaggagtgtgccgcaatgatgatgcagtttgtttcttgcttcaaaattcacggtgccgtgttttttcccgttttcaaaaccggtgcttctttttgacttttcccgtctgggaaaagtttttttttgcccaaaagcgcgcccgcaaggggcgggctgcaaatctggtagagtatatctcaggaggttcccactatgctgatccgcaacgcaagggactgtgcaggcaagccgatcgaggtctggctgcgcgacggaaaaatcgccgctgtcggtctgggactgcttgtcccggagggggaggagctgctcgatgccaagggccgcacgatcctgcccgccttcctcgacacacactgccattggcgcacccccggctttgagtataaggaggatatctccaccggctctgccgcagccgctgccggcgggtatacctttgtgaacctgatgcccaacacaaagccggtctgctccagcgctgagatcgcccacgccgttgaggcggaggccgcccgcgtagggctctgcgatgcaaaccagaccgtctcgatcacgaaggactttgacggcaaaacgctcgaccacctgatgacgctgcccgaggatgtcaaattcatcaccgaggacggcaacggcgtcatgaacaacgccgtcatggcgcgggcgttcgccatcgccaccgagcgcggcctgaccatcatgtcccacgctgaggaccgcgagatcagcccgtgggactaccgtctggcggaaaacattgagaccgtgcgcaactgccatctggccgaatactacggcacccggctgcacatgtgccatgtttccaccaaggagtccgtagacgccatccgaatgagccgcctgcgcggtgcgcgtgtcagctgcgaggtgaccccccatcacctctggtttgatgacagccgcctgcagtacaaggtcaacccgcctatccgcaaggcggaggatgtgaccgccctcattgaggccatcaaggacggcaccgtgacctgcatcggcactgaccacgccccccacaccgccgaggagaaggagaagggcgccgccggcatggtgggccttgagactgccttcggcgtctgctacaccaagctctgccgcgagcagcgcctgccgctcgaactgctcagcttcctgatgagcgccggccccgccgccgtgctgggactggccgaccgcaaaggcatgctggagccgggctatgacgccgatgtcgtgctggcggatcttgaccacatgtatgaggtcaaggccgatgagctgcacagcaagagcaagaactgcccttatgacggtgcgctgctctacggcaagatcgtgacaacgatcaagggcggtaaggttacgttccagatcgaagaataataccgctttacgtgtaaagcacccgtaggggcgcattccatatgcgcccgtgcagttctgccgcaggcacgacgccgcgggcggatatagaatccgcccctacggattccacatcatataagaaggcaaaccaaaacggaggaatcagcatgcttaccaacatggacaaactgtacgagagcgttgccgcgaacggccctgtctgcgtgggtctggataccgagatcagctacctgcccacgaccgacaccgccaagacagcgggggagaacgtggtcgcattcaaccgtgccctgatcaacgccaccaagggcgtggccggctgctacaaggtgcagatcgcctactatgaatccctcggtctggacggcatgcgcgcctacgccgagacactgaagcttgcacgcgccaccggcctgccggtcattgccgacatcaagcgcggcgacattgccaagaccgccgagatgtatgccatgggccacttcaccggcgacttcgaggccgactttgtgacgctggctccctacatgggtctggactccatcagcccctatctgccctacgccgagaagcagggcaagggtatgttcgtcctctgccgcacctccaacggcggcgcaaaggacttcgagtacgagaagctggctgacggccgccacgtttatgacctcgtgggcgacaagctgaacgccctcggcaaggactacatgggcgagcacggctactcctccatcggtctggtcatcggcggcacccacatcgaggaggccaccgagatccgcgccaagtaccaggacagcttcttcctcatccccggctacggcgcacagggcggcaaggccgaggacattgcccagtacctcaccaagggcaacggcggcgtggtcaactccagccgcggcatcctgctggcctacaagaagcagcccggcgttgcctttgacgaggcagcctacaacgaatgtgtgcgtatgcgggaggatattcagggtgaatgcaacaagctgtgatttgaaggtcctgcggcaggagactgtcgcagctgacatcatgcgcctgacggtccagtggcaggatcccagccgtgagccccacgcggggcagttctatatgctgcgcgcctgggcagccgatgccacaccgattctgtcccgccccatcagcgtggatgactttgacaaccagaccggtgcgctgaccttcctgtatcaggtcaagggcgagggcacccgaaagctggccgcgctggcggcaggggacacactgacagtgaccggcccctgcggcaacggctttgacaccgccgcgctggcgtctgcccacaagcgcatcgccgttgtcggcggcggcatcggcacggcgccgctgctgctgctctgcagggagctttgccgcgccggtgtgcgccccgacctctatgtcggcttccgcgatgcctcctacggcatggagagctttgtgccttggtgccacagcatccatctggctaccgattccggtagtgaggggcatcacggccttgtgacagaccttctggatgtcacccactacgacattgtgctgacctgcggcccgatggtcatgatgcgcggtgtggcaaagctctgcgccgctgccggcgtaccctgccttgccagtctggaaaagaagatggcctgcggtctgggtgcctgcctcggctgcacctgccacaccaagatcggccccgtgaccgtctgcaaggacggcccggtctttaacgcacaggaggtgtttgactgatggcagacctgcatgttgattttctcggcaagcggctggccgggccggttgtggctgcgtccggcaccttcggcttcggccctgagtatgcgggcatcgaggatctgcggctgctcggcggcatctccggcaagggtctgaccctgaacggccagcccggcaatgagggcgagcgcctgtacgagaccccctccggcctgatgaactccatcggcctgcagaaccccggcgtgcagcatttcatcgaccatgagctgcccgccatgcgccagtgcggcacgaccgtctgggccaacctcggcggccacaccattgaggaaaatatcgagggcgtggctatgctctgcgccgccggcgtggacttcattgagctgaacatcagctgccccaatgtcaagcagggcggccttgcgttcggcatccgcgcgcaggacgccagcgaggtcgtctccgctgtgcgcaaggtctgcacggtgccgctcatcgtcaagctgagccctcaggccgagagcatcccggagatgtgcaaggcggtcgaggccgccggtgcggacgctatcagcctgtgcaacaccttccaagcgtgcgcgatcgatctggaaaagcgccgcccggtattcaacaacacctttgcgggcctgtccggccccgccgtgcggcccatcgccctgcggatggtctggcaggccgtgggtgccgtcagcatcccggtcgtgggtctgggcggtatcctgaccggccgtgacgcgctggagttcatcatggccggtgcaacagccgtgcaggtgggcactgcgaatttccttgacccgaaggcctgcacccgcatcaccgccgagatcggtgcatggatggatgcccacggcgtcaaaacgctggacgagatccgcggctgcgcaagataaaagccttcccccgcgggggaaggtgcccgaggccccgcccgagggcggatgaggggagagtccccgcagccgcccgttcacgggctataacggcaaggccgcccctcatcagtcggcggtcagggccgccgacagcttccccctaagtgggaagctgtcaccaagataagcattcatatatcttgcagttttatacgaaatatgctatgattatacaaataatatacaggaggaacatactatggcacgcgaagcacttgaagttttgaaggaatgtgaagcatttttggagggtcacttcctgctgtcctccggccgtcactccggcgcttactgccagatggcctttctgcagcagtaccccgacaagtgcgccgaggtcatggccccggttgccgagaagctgaaggagctggacattgatgtcgtagtcggccccgccatgggcggcatcgtctatgcctacgagctgggccgccagatgggcaagcgcgccatcttcaccgagcgcgtggacaatgttatgaccctcaagcgcttcaagctcaaccccggtgagcgctgcatcattgctgaggatgttgtcaccaccggcatttccagccttgagaccaagcgcgtcatcgaggaggccggcggcgtctgcgtaggcattgcctgcgttgtggaccgcacccgcgccgaggctccgtccccgatccccatcgtggccagcgccctcaagctggacctgcccaactacgcccccgaggagtgccccatctgcaaggagggcaagctgcctctggtgcatctgggcagccgcaagatgaaggaggccgccaagcaaaccctgtaagcgttgcttgtgcaaataataaagaataaataataaatttggcagaccgcatcgctgcgctctgctcaataaaaccccacattctttattatttcttatttcttatttcttatttatgctaggagataattatgcaggcatatctgatattggcaaacggccgggttttccgcggtgtcagcgtgggctgccccggcacaaccatcggtgaggtcgttttcgccaccggtatggtcggctttgaggaaacgctgaccgaccccagctactacggccagatcatcacccagacctaccccctgatcggcaactacggcatgaacagcgaggatgtcgagagcggcaagatctgggccaagggctatatcgtgcgcgaggcatgcaaaaagccctccaacttccgcagtgaggaaacgctggattccttcctgaaaaagaacggcatcatcggcattgagggcatcgacacccgcagcctgacccgcaccctgcgcgagagcggcgtcatgaacggtgccatcacgaccgagttcgaccccgatgccgagccggagaagaaggcggcgctgctgcctgagatcgccgcctacgctgtcgtcaacgccgtcaagaccgtcacctgcagcgaggccaagacctatgagccgaccgcagccggtgcctgcggcgacaccccgctgcatgttgccctgctcgatctgggctgcaagaacaacatcgtgcgctgcctgcagaagcgcggctgccgcgtgaccgttctgcccggcaccgccaccgccgccgagctggctgcgctgaagcccgacggcctgatgctctccaacggccccggcgacccggccgaaaatgtcgagatcatcgccaacatccgtgagatgctcgacaccggcatcccgaccttcggcatctgtctgggccatcagctcaccgcgctggccgccggtgccaagacctgcaagctcaagtacggccaccgcggcgccaaccagcccgtcagccatgtcggcaagggccgcaccttcatcaccagccagaaccacggctatgcggtcgaggctgataccctgcccgcggaagtgggcaagatgagctacttcaatgccaacgacggcacctgcgagggtgttgactacttccgctggaactgctttacggtgcagttccaccccgaggccaacggcggccccaaggacaccgaatttctgtttgatgagtttgtcagccgcatgctggctgcgaaaggagtgatcgacaatgcctaaagacccgcgtatcaaaaaagtgctggtcattggttccggccccatcatcatcggtcaggcggcggagtttgactactccggcactcaggcctgccgcgccctgaaatcggagggcgttgagacgatcctcgtcaactccaaccccgccaccatcatgaccgaccctgacattgccgatcatgtttacatcgagccgctgaccgccgaggtcgtcgagcgcatcatcgagaaggagaagcccgacgccatcctgccgaacctcggcggccagatgggcctgaacctctcgatggagctggcccgcagcggtttcctcgaccgcagcggcgtccgcctgctggcctgcaagcctgacacgatcgaccgtgccgaggatcgccagctgttcaaggacacaatggagaagctgcaccagcccatcatcccctcgaaggtcgttgaggatctggacgatgcgctggattttgccgaggtcatcggctatcccgtcatcgtgcgccctgccttcacgatgggcggcaccggcggcggcatctgtgaggaccgcgagaagctgcacgagatcgccacgaacggtctgcgcctgtctcccatccaccagatcctcgttgaaaagtgcatctccggctggaaggagatcgagtacgaggtcatgcgcgactccaagggcaatgttatcacggtctgcaacatggagaaccttgaccctgtcggcatccataccggtgactccatcgttgtggcacccagccagaccctctccgacaaggagtaccagatgctgcgcaccgccgcgctggacatcatcaccgagcttggcatcgagggcggctgcaactgccagtttgcgctgaagcctgacagctttgagtatgcggtcatcgaggtcaacccccgcgtgtcccgctcctccgcgctggcctccaaggccaccggctatcccatcgccaaggttgcaaccaagattgcgctgggctacaccctcgatgagatcaccaacgatgtcaccggcgagacctgcgcctgctttgagcctgcgctcgactatgtggtcgtcaagtacccgaagtggccgtttgacaagttcgtctacgcggacaaatccctcggcacccagatgatggccaccggcgaggtcatggccatcggcaacaactttgagcacgccatgatgaaggccgtctcctccaccgagttgggtctggacacgatgacgctgcccgactttgagaagctgaccaccgaggaagtcattgaacacctgcacgtgcaggactccgagcgcgccttctgcgtctacgaggccctcaagcgcggcgtgccgcatgagacaatctacgacatcaccaagatcgactggtggttccttgacaagctgcagcatctggccgacatcgagatggggctgaagaacggtgagctgacgaccgagaagtacctgaacgccaagcgcttcggcttccttgacaagaccatccgccgtctggcgggcgtggacaccctgcccgaggccccgaaggccgcctttaagatggtcgatacctgcgccgcagaatttgccgccaagacgccgtatttctactccacctacgatgaggacaacgaggccgcgcagttcattgccgagcgcagcgaccccaacaaaaagaaggtcctcgtctttggctccggccccatccgcatcggtcagggcattgagttcgactactgctccgtccacgctgtctggacgctcaagcagcacggctgcgaggccgtccttgtcaacaacaaccccgagacggtctccaccgacttcgacaccggcgaccgcctgtatttcgacccgctgaaccccgagagtgttgaccacatcatcgagaccgagaagccggacggctgccttgtccagttcggcggccagactgccatcaagctggccaagcacatggacgagatcggcctgcccattctgggcacccctgccgatgccatcgacgaggccgaggaccgcgagcgctttgacgagctgctcgagcgctgcggcatcccccgcccggagggccgcaccgtctttacgctggacgaggccctgcaggctgcgcaggaggtcggctacccggtcctgatgcgtccgtcctatgttctgggcggccagaacatgatcgtggcctacaactccagcgatgtcatcgagtacatgggcgtcatcacgaagcatgttgacatgagccaccccgtgctgatggacaagtacatcctcggcaccgagtgcgaggtcgatgccatctgcgatggtaccgattatctggtgcccggcatcatgcagcaggtcgagcgcaccggcgtacactccggcgactcgatctgtgtctacccgcccacgaccttcagccagaaggtcattgacacgctggtcgattacaccggccgctttgcccgcgagctgaaggtcgtgggtctggtcaatgtgcagtatgccgtgcagaacgaccgcgtctatgtcatcgaggtcaacccccgttcctcccgtaccgtgccctatatctccaaggtcaccggtgtgccgatggtcgatctggccgtgcgctgcacgctgggcgaaaagctcaaggatatgggctacggcaccggcctgtggcgcgatggcaagagcccctactacgccgtcaaggtgcccgtctacagcttcctgaagctgcacggcgttgacacgatgctcggccctgagatgaagtccaccggcgaggttctgggcattgccccgaccttccacgaagccatgatgaagggtctggtcgcagccggctatcagttcaagacccccggccccggctcctgcgtgatcatctcggtcaaggacggcgacaaggcggaggccgccgagctggcctggaagctgcatgactacggctacaagatctacggcacccccggcacggccaagtacctgaacagcgagatggtgccctgcagcgttgtccgccagatgagcggcgcgcgcccgaatgtcattgacctgctggaaagcggattggtggattacatcatctccaccagcccccacggccgtgacccgcaccgcgactcggtcaagttccgccgcaaggctacggagctgtccattccgaccatcacggccatggacaccgcccgtgtgctggtcgatgccctgcgcggtgaccacgacatcagccagatggagctggtggatattgctcacctgcaccgcgaggctgcaagcggtaaataactgctgacgcaaacgcctgtgcctgtaaaagggtgcaggcgttttttggctaaagacggcgccggcaatagcccgtgacgcccccgatgcacgccgcctgccttttggatatttttacatggtgcgtgcattttttgccaaatgccactttttgatagtccgcactgcgaaattttagagtttttgacgaaaaacacttttttcgtcaaaaactcttgattctgcgcacaattttctctataataaacatcgtaataacaacgggcattgtgtgcctatacggataggagttagaaatatcatgacgagatctcagttgattaccaaggtagccaacgacaccaacatgaccagcgccgaggttgagaaggttatggacggcatcttcggcaccattggcgatgtgctcaagagcggcgacaaggtcacgatcgcaggcttcggccgttttgaaatgcgtgagcgccagaccaagaacttcaccaaccccaagaccaaggtcaccagcaaactggagcccaccgcgatccccggcttcaaggccagcggccgcctgaaggagaaggtctccggctgatctcgtcaggattcatacagcttttgcggacccgcataacagcgggtccgttttattatagacatcaaaaaaacggagcatcgctttttgcgatgctccgttctctctttttacagatggatatgccgcggcacgccgttgatatagatgggcgtcagctccgcctgaatgagcgggcgggcatagcgctcaaagttctcattgacatgcatgccgtcctcggtgatccagtccagcgggaccttcttctcaaagttagcgaccttcgtcacatcgaccatctcggtctctgcgcggtagggctggtcactcttgcgcttgatggccgccatttttgcggtctcaccgcgcacggcggcctcgaccgcagcaccgccgacctgataggcctcggtgatgtcggtgcggcttgccagatggctggcgcagcgctgcagggtagagaactcgattgcgcgggtcttgcagcccagacgcacccggatcagatccgccagataacggctggtaccgctcaggatcgccttatggccgaaggcatcaagctgcccagctgtggagacaagatcgcagaggaagacgccgtccttgttcttgacgccctcactgacggcgatgatcacattgtggcgttccttctccagctctgcaacccgcttgaggaaggcctcctcatcaagggggcgctccggcagcaggatcaggtcggggccgttgcaatcgggaccggcggccagactggccgctgcggccagccagccggtgtggcggcccataatctcggccactgtcacgctgcgcaggtcgtacacgctggaatcgcagatgacctccttgaggatcgtggcaatatacttggccgcgctgccgtagccgggggtgtggtcggtcagcatcaggtcgttgtcgatggtcttgggcacgccaatgaagcggatctcgctgttgacggtcttgccgtaggcgctcagcttggagatggtgtccatcgagtcgttgccgccgatatagaacaccgcgccgatgtcatacttggcaaacagctcaaacagccgcaggaacggtgcctcgtccacggtgggatccggcagcttgtggcggcagctgcccaaaaagctggacggcgtgcgcttgagcagctcaatatccatcttgtcactcagcacgccatccagatccaccagcttttcctccagcagaccctcgatgccgtactgcataccgtagacatggggtgcgccgcaggccttggctgtctcatagacgcccgccagactggagttgatgacggcggtcgggccgcccgactggcctaccagaacattcttcataactgtacctcgcgttatattttatttgaatattacagaacgtatttttctattgcctttgccacaccgtcatggttgttatcatcggtcgttgcatcggcaatttccttaatgtcatcggtcgcgttgcccatggccacccccagcccggccgcctcgatcatggcgcggtcgttgccggagtcacccacggccatcgtctgctcccggcgcagacccagatgcgccgccagcgccagcaggccgctgcccttcgtcacgccgggggcgttgatctccatgttgccgggcaggctggaggtcagctccatgccggggcaggcggcctcgatggcacgccaggccgcatcgcgctcggcctcgtcgtggtagagcatactgtacttttcgatctcgtgcgcgtgggtgcgcagcgtcgcgtgcatgtcatctacctcaatgcgggtcgtgcggaagtagcttttcaggttttcgggcaccacgtccatgtggttctcggcgttttcgcgggtcgtgtagcttttgccgccgatgaaaatgctcatcatgccgccgccccgggcaaggatgtcatagatcttcagcgcatcggcagtggcgaacggctgctttacaagctgctgcccggtctgcagatccaccacactggcgccgttggaggtcagcgcataccgtacaccggggatcgaggtgaatgctgccgggatgccgctggccgtgcgccccgtggcgggcagcaccgccacaccgcgcgccacggcgttgcggatcgccgccagtgtgcggggggtgatctcctttttatcgttaaaaaccgtaccgtccaggtccaatgccacaaggcggatatcctgcattttcttcactccttataccggcttattgtaccgcaaaatcgccatgattgcaagccgcacgacattgtgttagaataaacttggtaattctttgggaaagagggcgtaaatttgcctgtgcttcacacaaaaacggggcggatgtggctgccggacgcactgcgggggctggctctgctgaatatgctggcctatcatgccctgtacgactgggtatatgtattcggtcataccggcggttggtacaatatctcggccccgggctgccatctttggcagcagtacatctgctggagctttattctgctttccgggttcagcctgccgctggcccgccgccccgtccgcaatgggctgcttgtggcagcgtgtgcggcattgctgaccgcagcaaccgtcctgtttctgccgtcggagagtatctggttcggtgtgctgcatctgaatgcggctgccgtgctgctaacctgccttgtccgcccgctgctgcagcgcatccctgccaaagcgggcctggcggcgtctgcggcgctgtttgcgctcacgaatcagctgccgcagggatttatcgggtttgagggtctgcggctctgtgccctgcctgcggggctgtacagggccaacctgttctggctcggcctgcctgacctgacgcggttctcctccgccgattactttccgctgctgccgtgggtgtttctgttctggtgcggggtgtttctggctcggctctggcatccgggcaggggagagccccccgccgccctgcagccgctgtgcgccatcgggcgcagcacgctgccggtgtacatgctgcaccagccggtgctgtacggcctgctctgggtcggccacgctgtggcgggccggatgtgaccccgcagccctgcaaaccgggattcacggtttatttacaataaaattttcattttagcgaaaattgttgttgacagcaggggtgttaatatagtataatcttgtttactggttaatagtatttgaccggcaaactcctgtctcaggtcaagggagggaagaagatgtcggagatccgtgtcaaagagggcgagtccctcgagagcgctctgcgccgttttaagcgcagcactgctcgcagcggcgtgttagctgaggtccgcaagcgcgaggcttatgagaagccttccgtgaagcgcaagaagaagtccgaggctgcccgcaagcgcaagtttaagtaaggtatcttacaacgaacgactgtgcaggttcgcgttacgcgcgggcctgcacttttattttatcggcggcagcgatgcggcggggtgagggcaccccgccctgcatcctgcggattgttcctcgtagggcggcatgccctcatgccgctgcaaccaaccgctatcttaaaaaaggtcacatctatgattttaacccccgaatatatctttaagaaaatcgagtgtatccacccggacttcctcgcggcgcacggcatccgggcgctggtgctggatgtggacaacaccctgaccggggacaacagtcaggtgctggagccctccgtgcaggcttggctggacgagatgcgcgcagcaggcatcagcctgaccatcgtctccaacaacacgcccaagcgggtgcgcccctttgccgagcgcgtgggccttgcctgggtaccgctggcctgcaagccgttcaccatcggcctgcgggtggcgcgccgccgcttgggctgcaaaaaaagtgagatggccatggttggagatcagatttttgccgaccggatggccgccgggctgtacggctgcccctgcctctacctgatgccccgcacgaaccacgacaaaaacaaatttgtgctgctaaaacgcaagtttgaaccgtactggatcgacaaatactatcagaagggcggtacactgtatgaatgacaccccgcgcttcggcacagccggactggccgacagctacacggtcaaaaagttcgaccccgccgccatcgccgcctatacggcaggcttcggcctgacggcgttcgagtaccagtgcgggcgcggcgtgcggctggcgcacgacaaggccgccgcgctgggcgccgcctgcgcagagcgaaacatcgccctctcggtccatgcgccctactatatcagcatgtcaagccttgaggaggacaagcggctgaacagcatcgactacctgctgcaaagctgcgccctcgtcaaggcgctgggcgggcggcgcgtcatcttccattccggctcctgcggcaagcagagccgggaggccgcactggaaaaggctctggacacgatggagcgcgccgttaaggcctgcgacgaggcaggctacggcgactgtatcctctgcccggagacgatgggcaaggtcaaccaactgggcacactggacgaggtactggcgctgtgcgcggtggacagccgcatcaccccctgcatcgacttcgggcacctgtacgcccgcagctgcggcacacagtttgccgaggccactgccgccgcggattacgccgccctgctcgacacactggccgagcggctgggcgatgaccgcgctgtacactttcacgcgcatttttcccgcattgcttacaccaagggcggcgaaaaatgccacctgacctttgcggataccgcgttcggcccgcctcatcttccgcttttgcagctgctgaaggcgcgcggtctggcccccacgatcatctgtgagtcggccggcacacaggccgaggacgccgccgcgctggcccaaggctatgcggcgctgtaaattcggcaaaaaatatcaaatttcacgcaaaaatatctgtacaggacttgcaaaattgctttccatactgtaaaatataaacaggtatgtataatttatttatggaggagtttctatatgatttctgcaggcgaattccgtaacggcgtcaccttcgagcaggacggccaggtccttcaggtcgttgagttccagcacgtcaagcctggcaagggcgctgcctttgtccgcaccaagaccaagaatgtcatcaccggctctgtcgttgagaccagctacaacccgaccgctaagttccctcaggctttcatcgagcgcaaggaggtcacctactcctacgaggacggcgatctgtaccacttcatggatgttgagacctatgacgacatccccgttggtgccaacgatgtgcccgacaacttcaagttctgcaaggagaacgatacctgcaagctgctgagctacaagggcaaggttttcagcgttgagatccccaactttgttgagctggaagtcaccgccaccgagccgggtgtcaagggcaacaccgccaccaacaccctgaagcccgccaccgttgagaccggtgccgagatccgcgtccccctgttcatcaacgagggcgacaagatccgcatcgatacccgcaccggcgagtatatggagcgcgtgaactgatttaggttttctttgccgggcatggccgtaccgccgcgcccggcatttttgataatagggaggattttgattatggctatggatctgaatgcaaaggccgcctacatccgcggcctgatgaccggtatggaatttgacgcagactccaaaaacggcaaggtcattgccgccatgatggatctgctggaggagatggccgccaccgtcaccgagcatgacgatgcccttgatcaggtgtatgacgaactggaaacgctcgatcaggatctggacgatgtcgtcagcgacatctacggcgatgacgaagaggatgatgacgaggacgaggacgaggaagatcacggcgctctgtacgaggtgacctgccccaactgcggcgagatctccaccctggatgaggagaccctgatggatcccgagggcgatttggtctgcccccactgcggtgccacctttgacattgagctggagggcaccgaggaggactccgccgaggagaccgacaagcaggaccgctaagtaaagggcatacccctacgacgaataaaaatccccgcagccgtcttggctgcggggattttgttgtttgtggggcaggggcttacttcttctgcagtgcgccctgcagcataatgtcaccgaaggacagtgcattgtacagaccgaccttgttggcctgacgggcaatgcgctcaggcaggggcttcgactcatcggtggagagcagcacaatatgaaccttatcggccacatccacaccgttctccttcttggtggacagcacctgcagatagactacgaacggatccttcatcgagccatagtaaatatcgttgccgcagcgcaccagcgggcggcccttataggtcagcttcggggtataagccatatctgaaaccttctttctgtttagtcaatactatattatagcatagatttttggggaatacaaattttatttgcaaaagctttccccagaggggagaagccttttttcatcacagatccagcttgtcccgctcgaccttttcctcgttcagcgccacctgctctgtcaggatgcggaccttgctgtccagctggctcagccggatcgacataaaaaactgcttggccagcaaaagaaagatgatgacaacataaacaaagttgatggggctcataaagcccagcaggtttgcagcccaataggcgatgccggggaagatggccagaatcagcagggccgcgctgaacagcagccagaaaatcgtatcctcgatctgtacctttgcctgccggacacgccgcaggatataccccgccgtgataaggctgcccagaatcaggcagatgcgaatgagcgtttgatcgaacatttcacaggctcctttcggggtagggtgtctcggtatcgcgcttgcggaaccactggatcagcaggatggagatggacattttgaccatatactgcacgctgcgccagaaggtcaggtagctttggccggccatccgctcgcccatctcgacctgcacctcttttacagtcgcgccgttcttgatcaggtagctgatggtgtccggctcggggccgtagttgaggttctgggcaaactcctcgaccatggcgcggttgaacatccgcatgccgctggtggggtcgcagatggcgcggcccgttgtcaggcggatggaccagctgatgatatagctgcccagcatccgcagcgtcttgggctttttcacggtcagaaagcggctgccgatgacaatatcgctgccctgctcaagctcatggagcatcgcctcgatatactgcggcttgtgctggccgtcagcgtccagctgcatagcgcagtcgtagccgttctccgccgcaaagcgcaggccggtctggaacgcccccgccagccccagattgaccggcaggtcgatcaggcggtagccgcgggcgcggcagatggctgccgtcttgtcgcggctgccgtcattgacgaccacatagtcgtactggggatagtcggtcgtcagttcctcaacgacctgcacgatattggcttcctcgttatgggcggggatcacaatgagtaattttgacatcttagctccttttggcagactttacgacttccatcattgtagcaaagacagcctgccatgtaaagtggctgcaaaggttttggtaggtgttctcggcacgggcctgcgcggcggccgggtctgccagcagggcggcaagcccggcgcggatcgcatcagtgccggcatcgggcaggaagatcgcgtagtcctccccgggcagcagctctccggtgcccgccgtgcgggtcgtcacgatggggcagcggcaggccgccgcctccagcagcgtggtagggaagccctccgcatactcggtgggcaggcagtaggcatccgcctgtgccagcagctgaaggatcgcatcgtgcggcagcgcgcccagcgcatagacccggccgcccagtgcggccaacgcagcctcctcggggccggtacccgccacagccagtgtgcacccaggcagggcctgtacagcctcggcaaggcgcagcgcacccttttcggggatgagccgcccgataaacgcaatgagctttccatccgcaggcaggtgcagcttttcgcgccagtttatggcattttctgcatgggccagcctgtccagctcaacggggtccacagcgttcggcaggcggccagccgcccggatgccgaaggtctgcagccaacggcagacatccccggacacgccgtagaaggggaacccgcagcggcggatgctgccgcaggcaagatgctcatacacccggcccagcgccccggtcagcccgccgtgcatcatatagccggtggagtggtcgatgaccagcgccgggatgccgcgccgcctgcactggtgcgcagcccagatgctctgggggtacatgcgggtctggatgaccgcaaagtcaatgtcctgcgcccacagtacatcggcgggggcaaagggcttcagcaccgggaagcgcccgcccatgaccggccatgacggcagacggaagatctcgatgccgtcagcatcggtttgccgcgcgggcaggcccggcagcgccgccgtaacaacaagcgccctgtgaccggcggcaacgcaccgccgcgccagattccatgtgtaccgctcgaccccgccgggggtggggaggtattgggttgagaagaagcaaataaccattacagttggccttttcaaaataatagataataaataatatggggtttttgccgtgccgcaaggcgcggctttttttatttgcaggattttaccttgcaataatcgccagcatactattcaccaccacacccgcctgtacaagcgcgattgcaatcgtcagcttatcctgcgcggcgccctcatcgggcaccgtggccaagcggcggggcaggcaggccaacagcagcagcggcaggatcggcaaaaagtaccgtccctgcaagccgtacagcgtttcatagcggatcggtgtccagagcagacagcccgctaccgtcagcaggcagcagagcgccgccgccgcgcagcaccagccccgggccctgcccgtgagcagctgctttgcgccctgcaccggcagggctgcgtaggccagcagcagatacagcacagcgacccagccccaggccagctccaccgtgtaatagctcaggctgccgccgaccagcgtgcggatatagtgatccccatttttgacgacactgcgcacaaacagcagcgccgtggctgccgggtgccgcaggatatatcccggcgtataggtctccttgtcgcccgcatccaccgtgctttgggtagcgcgggtggcgcgggccgcctcgacctgctccgcaagcgccgtgcggtcaagcgggatgcggtcatccatcgcgccgacctcaacgcccagcccggcaaactgctcctgacagctgggcaggctgaacagctgcttgtacgcctgcaccgcgccgccctcagcaaaatagggcaggtaggcatctgcattacccaccgtcacatcggtgccgaacagcacgagcgatgcctcggtatagaacgcctgcgcgtccgtgtaggtgttggccttatccgctgcaaaaaggaagctctgtcccagcacggcgggggtcacatccttctcgcgcagagcctgcacccagaagtccacctcgctcttggcgggcacggcgttatcctccacataatagtataaccgttttacatagttttccagcgagttctcgttgatctgcgcctcatactcccagtcggccggtgtcggcgtacccttggcggcgcggtcactgccggccggctcggccgctgcggctgcaggctcctgcaccgtaccggtgcgcagcgtgtcggtcagcaggccgctgttcagcaccagcgccagcagcaggcagacagccagatagccgcattttttcgccttggcatggcggcccagccgcgcggcaggcaccagcagcagcagcgctgccagtggcagatagacaagcttgcccggggccagcaccacgccgcagagcagcagcgccgccagccgggcaggggagagtgccttgccccggtcggggccgaaggctgcatcgagcaacagcgccgtaaaggcaaagctgcaccccagcagcggggcatcccggctgaagctggccgccagatgcagcgtcatcggcagcagcgctgccgccgtaaacacccgcttgccgaagggcgccgccctgacagccagcgccgccagcgccgcaaagagcagcaggtttgccagccgccccagcagcagcgcgggagcaaaccccagatgcagcaggtaggcgagaaagaccgccgccgcgctggccagatagagcagcgggttctggtcggtctgcagctcgttgtactcctgatggctgtcaaacggctcctcggtcgtggtcaaaagctgcgaggtgaacgcttcccaagtaaacacagtcgtgttttcgttctgcaggtcggcgtcctcgtcccccacacggcggaaggtcgttgtcgtggggacccggcccatccgccattcctcgcgggacagatcattggcccagcggctggcaagggtgaagctctggttgatatggtatttctcatccggtgcggcgtagggcggcagcacaaagctgtacagcagcccaaagcccagcaccagcacaaacacaaggcggtgcagcgccagttttttgccaagcactgcccagacggcgaacgccgccagcacggcagcaaggcccgccacaagcaggaaaaaccgcgtcagatagccgccgatgcgctggtaggtgatttgcatcgccatcgtgccgtccacagcgcggccgctgaccgacatctgctccttccagagtgccacaccatcgctgtggcccacggcaaggattgcatcggtcgtgtaatggggcgtgacggtcagccggtagcggcggccctcccggccggtcaccgccgggtccagccccagagtcgtatactggtcaggcacgatataatccatcgtgccgaccgagcgggacagctctgcgccggtatcggcgtcatagagcgccacctccagcgcaccgctgggctgctccccgggcaggtaaaactccagcccgatggtcagcagatccttgtcgtaggtgaacacctgctcggctgtctcgccgtcatggatcagctctgcgcgcagaaaatctgtaatgatctcgctgcggcccttcgtcacctgcgggcgcacctcggccagccagagcagcaccaccgctgccagcagcacaatgagcgttgccagcgcggccaacaagggggtatattttttttgttttggatttttcatgcaatctcccgcaaatgcgaaatcacaacgccgcgccgaacgccttttccaccgcagccttccagcgcccatcgttgcgcaaaattttctcgaccgcgccgcgcacggcaccttcgccgccgcgctgggggcagatataatctgcgcgggcctttacctcctcggcagcgtccgccgggcaggccacaaagccgcacagcgccatagccgccagatcgttgaggtcatcgccacagtaggcggtctgcgcccgggtatagccgttttccgccataaatgcctgcagaaatacggctttctgcccgacattctggcatacatcggtaattttcaaatcggcggcgcggcggcggacggcctcgctctgccgcccggtgcagatcatcacgcggatgcctgccgtgcgggccagtaccagcccggccccgtccttgatggcaaacttcttcatctcattgccggtggcatcgtaataaacgccgccatcggtcatcgtgccgtccacatccagcaccagcaagcgtatcatagtcaggccctctcatactcactgggggtgatgaaccgcaccggcagccccgccgcacggatggcaccggccatctgggcgttgtaggctgcaccgcggcctgtgtgggtgtgcaggcccgcatcggcataggccgccgtgcccgtgcggtagccatcggcaccggccagcagcacgcccgccgcgccgcactggcgcagcagccgcagcagcatcagcacactgttgccgccctgcgcatcggtggcggaaagccggtcataattcacaacagcggcatccttatcagcgcgcaggttactggtcaggatcagcgggcaggggtaggctgcggcctcatcaaagcgttttgcgttggtgaagaaggcgtagtccggccgcataaagtccggcacaaagttggcagataccgtcacatcggcagctgcagccgccacggcggcgcggcctgcctctgcggcaaggctggcaccgggggccagcaccagcaccgtcttgcctgcaaaggcagcctgcagggcagccagcgcggcggtatcatcggtgcggcggttcttgtactcggtgtacagggcatcagcgtaggccgcatcgaacaccgtttttttgtcaggggcaatgtccgccagaatatggttgatgtcccggttggtcagatcgcccttgccgaggtaatgctccgcatagttgcggtgcagattgaacttggccgacaggaaatacgccggtgtatagccccatgcgcagtcgcccttgatgggcgcaatgtgatcctgaatggcgtccatcaaatcatcaatgttgtagtggctgccgaaatactcgttcatataatcggcgatcagctcgatcggcaggttgccggggatacggcccatgcccatcaggctgccgtccacagccagatcgcggcgcaggtgcttatccaaaaactcctgcgccagacagaagctcagggccatgttctcatgcaggtgcagcgccaggcggatgtccggggccaaattgtggtccgccatgctgacgatgcgctccagatcgcggcggcgcatgctgccgaaggtatccacgatggagaactgccacgggtggatggcgttgacctgctcaaagatccagagcagatctttatcgctgtagcccatgatgttgatggggttgatggagaccttgtagcccagttctttaatgcggcgggcaaagtccatgccgtctttaatgtcgtaatcgtgcgcggtgatgcggatgatctcgatgccgtgtccatcgtagggggacagcttttcaatgtcgtagttggagcgcatcgccatgccggagtacatcgtgcggccgcgctggctctcgtcaggcagcaggcggttcagctcctcaatggtgttgcagaccgtgacatcggggtcgtagccgtccacattgcgcagaaagcccacctcgaccacatcaacgcccgcgcgggtcagcgtctggatgatgcgccgtgcctgcccgaagccccactgccagtcattgacatagccgccatcgcgcagggtgcagtccagcagtttgatatcagccatgctgcttctccttcaaaatttcatttacaagcgccaaatctttaggcgtatccacactgaccgtcttgtacgggctgacgatggcgtgcaccttatgcccattctcgataaagcgcatcatatcgttttcctcggccttttccagaatagatttcggcgtatcatggtagaatttcagtgcctgcttgctgtacagctggatgccggtcaccttctcatactcaaagtccagcgtgcccttcgggtaggggatggggctgcgggaaatcagcaggatctcccgcgcggcgttggtcacgaccttctggttggaaaaatcaatgacatcggccggatgctccatgacattggtcagcacagcgacataataagggtcagccggtagggcgctgggcaggatcaggtcaaacgcggccgggttgaccagcggctcatcacccatcagctgcagatacaggtcggcgtcctccacggtgctgacctcccagatgcggccggtgggggtgtcatggtcggggctggtcatcagatatttcatatcatacttcttgcaggcctcagcaatgcggtcatcgtcggtggcgatcagcacatcgtccagcttcgggcaggccttggcggccttgtacacccaccagatcatcggcttgcccaacacatcggccagcggcttgcccggcatccgcgtactcgcataccgcgccggaatcacagcgattgttttcatggttgtacctcgcatatttcgcttatatataaaatgaaccacgcatgtaggggccgggcatgcccggcccacagctttacggaaagcgctctattacgatcaggttgagggcgggacatgtcccgcccctacagttgcaacccttcacaccagcgccctcgcttcgtccagcgtcagcaggattttttcttcggcggcggtaaagccgcgcaaaacgaagctctgtaccgttacggcgcgggcaaaggtaaacggcaggcaaaagttcagcacctcgctgggcatcgtgcgctccagcacgaccgcctcggggaaaagcgcctgataatcggtcgcatcgcgcgggtgcgtcttgataaacagcggcccggcagcatattttgccgccaccgccttgaacatcgcgtcctgctcgttctgggtcatcaggccgtccgccacaaagctgcggggcagcaaaagcgtggcgccatcggccttttccggcaggggccgggtcaaaaatacgcggcgcaccattgctttttcgtcctcggtcaggctttccaacagtttggccttgctgtccgtcaccatgcggtcggcggcaaacagcgtacaccgcgcggcgtcctcactctcaacgcagcggcaccacgggctgtcaccccagtagaggtagccttttccgcgctgcttcgcggcaaaatcggccgccgcgcgctggtcggtcacaagatgctggtcagggccgagcgtactgccgaaggtatcctcacagaggatatacccggcgcggcagtcctgcaggtagcggcccagcacgctccaatcgttgtggatgtagacattttcatacgctgcacggtagaatttccatccgcacagcttttcaaacgcccgggcggcccgctggtgagcaaagaggccggtcacagtgccgggccactttgtctcctcgacaatgaccgtcttaacaacaccggtcgcgtccagccgggccgccagcgcggcggtgtcgggcacagacgcggaaagcaccatcgtatgcggcccattttcacaggcgcagcgcccggcccgcagcaggtcaacaagcacctgataggccgtgtggcagatgtaaagattcggtttcatgcgtcactcctgcacgagcttgacgggcgggaagtggatgcgtccccagccggacgcccattcgggcatcgtcaggtcgctgttggtcacttcaaaggcgaactcagtcaccggcttgtccaggcagaccgcatgggccagcgcgccgtcaaaaatatcgagatagaagaaatactgtccctcgcccagcaggctcgggtcaaattcaaacaccgaggtgtagattttgcccggctcggcggggccgaggtcgacggggtgtgtgatgcccacaggggaggagtcccgcgcgtggaggttcatcttcatgtggatgcctgcaaacggctccgacacgcgccatgtgatcttgacgcgcatcttctcggtgtccgcaaagacgctggactccttatccacaaagtcgagcgtttccagccggaaccgcttaccggcgctgccagtcatgcgggcaacatcggccagatcgtagtggaccacattcacatcggtcgtatccatatagacggcaatcgcctgctccacatctccgtcaaagatgaccttgcccttgtccagcacgacacagcggctgcagagctggcggatggtggacatattgtggctgacatacagcaccgtgcggccgtcctgattggcgacatcgctcatcttgccaaggcatttctgctggaacttcatatcgccgaccgccagcacctcgtccatgaccatgatctcgctgtcaaggtgggcggccacggcaaaggccagcttgacaaacataccgctggaatagcgcttgaccggcgtgtcgataaagtcgccgcactcggaaaattcaatgatctgcggcagcttggcatcgatctcggccttagtcatgccgaggatcgcaccgttcatatagatattctcgcggccggtcatctcattgttgaagccggtgccgacctccagcattgaggccacgcggccgcgaattttgatttcaccctcggtgggggccgtgatgcgggacagcagcttgagcagggtcgattttcccgcgccgttgcggccgatgatgcccagcgcctccccctgatagaccgtcaggtctacgccgttcagcgccataaaggtttgcccaaacagccgctgatccgtgccgatgacggtgttcgggtcctccttgccgcgcacgcgcgcccaccagctctgcaggtcgtgcgtcagcgtgccgccgccgatctggccgagcttgtactgctttttcagccctgtaacctcaatgacagggcgtttttcggttgtagacataatacgccctccctcagacggtatccataaaggttttttcgatgcggctgaacagcacgacacccagcaccagcgcggcggctgtgaacaccagactgtacacgatgccgaacatcgtgaccgtgccggtgcctaaggtcgccatacggaagatctcgatcggggaggtcatggggttcagctggaccagtacacgcagccgagggctggcgtccagcatcgacagcgggtagacaacgggggaggcgtacatccaaagctgcacgccgaagcccacggcaatggcaaggtcgcggtattttgtcgtcaacgaggatacgatgatgccgacaccgaggccgagcagcatgacctccagaatgacaaagggcaccgccagcacccacagtgtaaaggccacaccgctgccggtggcaaaaaaccacgcccagaaaagcagatacatcgccgcctgaatcccaaagttgatcaggctggtcagcacctgactgaccggcatcgtcaggcgggggaagtaaaccttgccgaagatctgcgagttcgtcacaaaggtgttggccgtgttgttgacgcagtttgcaaaaaaagtccagactgtgttgcccgccatatagaacaaaaagccgggcactccatcggtaggcatgttggccatgccgccgaacacgatattgaaaatgaccgtcgtgatgagcgggttcaggatgatccacgcagggccgaggatcgtctgcttatacagcacggtaaagttgcgcttgacaaacatcgtgatcaggtcgcggtaacgccagagctcctgcagatcaatgtcgaaccagccggttctggggcgtataacggtggtccagccctcctcggccgggcgggtggtttgcaaattttcagccataaaaatacctgttccttgtgtgtatgatcgtgtttgcacagttatccataataatagtgatattttaccacatttcgcgcaaagaatcaacttgccggggcgtatataatagcagcagaatatcgtgcgcggtgaaagcgtaggggcggattccatatccgcccgggggcgtttccgccgccgtacacaggtcgggcgcatatagaatgcgcccctacaggcaacggaacacggatgcttgaagcacatcttacttgccaaggatgaccgcgagatttcgcgcaatccggcgcttagggaggcggcgcgaacgcgccggaggaaatttcccgcggaggcaggcgaagcgatgcgtccccgcaggcaagaaagcggcctgccgaaaatccatcggcaggccgcttttatacattcactattttacagcacctttgacaaaaatgccttcaatctctcgttttcggggttggcaaagaactcctgcggggccttatcgaccttgacgatgccctcatcaataaagataatgcggttggcaacctcgcgggcaaagcccatctcatgggtgacacagaccatcgtcatgccgccgcgggccagctccttcatcagctccagcacctcgccgaccatctcggggtcaagggcggaggtcggctcgtcaaacagcagcacatcggggttcatcgccagcgcacgcacaatggcgatgcgctgcttctggccgccggacagcatgttggggtaggtgtccgccttgtcggccagaccgatgcgctccagcagctccatggctttcttgtcggcctcgggctgcttcatcaggcccagacgcacgggggccagcgtgatgttcttcttcaccgtcaggtgggggaagaggttgaaatgctggaacaccatgcccatcttctgccgcacatggtcgatgtcatggtcggtgacttccttgccgttgaagatgatatggccgccgtccggctcctccagccggttcaggcagcgcagaaaggtagatttgccgcagccggagggaccgaccagcacaacgcagtcgcccttgttgatcgtcagatccacgcctttcagcacctgcaggccgccgtagttcttcttcagtcctttaacgtcgatcactttgcgccagcctcctctcaaattttgcaagcagtgcgctgaacagcatgaccagcaccagataggtcgcagcaacgccgagcagcgggaacatgggctcataggtacggtt

SEQ ID NO: 822 - DNA, 22490 bp, unidentified
  source 1..22490: mol_type = unassigned DNA
tctatcgtcgaataggctttaaggagacagggagaaagaacgcaataacaaataagcttgatgagattgagttcgcattgacataaattccagtttgccgggcagacaggcatctgaaaaaccacacaaaaacgagggagcagccatggtgctttatttttcgggaaccggaaacagccggtatctggcgcggtgcattgccgaagggctgggcaagaccgagctgaccggggcagagcgcatctgatttgtgatggactgcagcagcgagatcggcaatgcagcaggacgtgtgaaggaaagcggaaaacagatgaagtttttatacttgcatgggctaggacaaaaaccagacagttggaaccgagtaataaaagaaacgaaggtctcagacagcagcgtcagcttgagtctggcagagatgctggagggcaaagcggccacctatggggagctgtatgctgcattctcaggaaggtgcgacaaggaaaataatgagatcgttttgtgcgggctttccttgggtgcggttctggcacttaattatgcgatagaccacccggacaaagtaaaggcactggtgctaattgcagcacaatatgaaatgccagaaaagttattgaagttccagaatctgctgtttcacgttatgccgaatgcaatgttcgagcaatttggcttcaaaaaagcagacgtgattcgcttgtgcggcacgatggcggaattggatctcagggattcattatataaggtgtcctgtccggcattgatcgtttgtggagaaaaggacaacgcaaacaaaaaagcctcaaaggaacttgccagttatttgagcgatgcccacttccatgagcttttgaaaacaggtcatgaagcaaacatagagtctccagaggaattggcaatggtgctgcagaggttttatgataatattatcggatagtctacgatctacaccctgaaggatcgctgtctgaaatacagtacatttagaatagtgttttctccattctgccggttgaatggcgtttgaagttaaagaggatcttgctgatcatataataacgatctgcatttggctcttctgtaacacagtcacagaagctgcagacccatggcgatgatccacatataggagcaggtcttggggatcatcagcaggcccactttgggcttggtcttactgaagagagtcacaggcaggtagcagccgaaggagattaggatggccgctaccatccgggtcatgtggtagtcgccggtgttgccggagatggcgtacaggatgatgacgccgaggccggtaaaggcaaacactgcgttgcgcaggatggacagggtggggttgccctcatcggtacaccagttgttctggggaagcaggcagatcaggatgcgcaggatggcagacagccagatcaggacttccacagctacgggagcctgaagctgagggaaggtggccttccagacatacagcaggatgatatagaataccgtcatggtgatggaagagacctgcagcccgatgccgagctgctttttgatccggtcgctgctgcctcgcacggcccggatgatccggggcaccagatggaaggcgtcaccgccgcagagggtcagggtcaggacgccatataggataaaaaggctgcggccctgagccatcgtgaaaaagaggatgcctgcgatgagatcaaagatcagataggcggcatcgaacaccgcctccatcaggtcgggcattttgggttgataggctttatgattcatgatgtgtcattccttttattttgaggcattcttctgcgttgtcgcatatcttctggaatgcctgtttacaagctgcgatctgaggctctgagagtccctgaaacatatctctggcaaactgccgctgggcctcaagcccttcggcgatgatcggctgagccgacgcggacagatagacatcgatatgctttttgttcccgtcggcgacctttttttcgatcaatccccgctcctccagcactttcagtgaggtggagacatgagatttggtagaattgcgcacccgtacaatatctgcggcggtatggtactgaggattatggtataaaaacatcaggatatcatactccatctgccggagctgatatttctgacatacggatgacatcagcagctcatagtagcaggtaatggctttgtgatgatcccaaaagttcatagatacctcctgtgatatattgttctatttagaacgattgcattatatgctatccccgccgctttgtcaagaggaaatttctgccgacgatgttcttgaccggaaaataggactcattgccctgcggagcctcttctgccacgtcaacacagtgaacaaagaataaaaaaacagcgaccccggagagcggtgggaatcactctccggggtcgctgttgtcaggacagggtctcttttgtatgcaggcgtcggaaggcgtcctcttttacaagctcaatgaccaccgcagtcagagggataaagaagatgatgccgatgatgccaaaaagctttccgccgatcatggcggccacaagggtgtaaaacggagaaagccccacggactttcccaccacgcggggatagatgaactggttctcgataaactgcacggcaaggtagacaatgaggcagcgcaccgccagcacaggatccaccagaagcacaaggaacacgctgaccacgcaggagatcagcgcccccacataggggatgatggcacagatggcggtgagcatccccaccagactgccgtaggggatccggaaaaccgaaaatgcaagggtcatgaggacaccgaggatcacggcctcactgcattgtcccgtcagaaagtttgcgaaggactgacggaacagccgacagaatttcagcagcccggcggcgtggctgggcttcagataggcgcataccagtgtgcgggcgtggtggcagagactctcggccccgagggacatatagatggagatgatcagggcaaaagatgcagtcaccacgatgtttacggtggcagataccgccccgaccgcattgaccagcacggtgtcgatgctgttggtgatcctgtgcagcagctgctcccagtcgatgccctccagccaatgcatcaaccagtccatgttggtgtcctgtgcgctgagataggcggtccagcgggggatattggactcgatctgtaaatagaggctgtgaaacgactgcacaagctccgggatcagcagggtgagcgccagcaccagcacaagaacaacgccgagcagggtgatgaaaaagctgagaagatggatggcgctgcccgagggctgctttttggccctgcggaacagacttttcagccgcttttccagtccggccataggcacgctgagaaaaagcgccagaatgccgccggccagaatgggcaggatcagatcgacaagttcggcggcaaaggccagaacggcagaaagccgcagcagtgcgacaaaaagcgttacccccacaacggtcacgagcagatattgttttgtttttggttccatgacgacattcctttcccagagcctgtagctgcaaattgcaaaagcccctcagcggactcttttatcgtattgtaataggaaggaacaggcttgtcaagacgccgggaagaggagtggtggcccgcagcgatggccctgcctgtcggccttggctgtgcgcccatctatcccagcatcatccatgcaacgccgagccactttggggcggatcggtcgcaggcgatcattggagtccagatggcaagcgcatacgtcggaaattgtctgatgccgccgctgtttggcgtgattgcaaaccataccacgatcgcgctcttcccctattatctgctggcgattctgattctgatgggccatatgcacgaaatgctgcaaaaagagaccagacagatacgataaaacaaagacagctcaatgccgctgctgtatccgctcagcatgatggttctggatgtggctctgccctgtgggaaacggcctgcaagaggcgatgctttaataaaatacgcatctgggaagaaaaacgagggagattgtatgaaagatgataaaagtgttatcttttcgtgaattttagcactctacgcttgacactgctaacaaacggtgctataacataggcgtgctcaggaggaagggcaaaagagagagccgcaaggtgatcgagcggctccccggaaagcttttccgaatgaacaacataaagattttttacccgacccgaacgccgggattggaggaatgatttatgtttatgcctgctgttttccatgagaatctgttcgatgatctctttgatccgttctggaacgatggcgcactggagcgtgcgatgaaccgtgaagagcgtgaaaccttcggcaagcgcggtgcaaacatgatgaagaccgatgtcaagcagaccgagaacggctacgatgtggctgttgacctgccgggctgcaagaaggaagacgttcagatggaactgaacgacggctatctgactattcaggcagtgcgcagccactcgaatgacgagaaggacaacaatggccgctacatccgccgcgagacattctccggcacctgtgcccgcagcttctatgtgggcgacgccgtgaagaaggaggacatccacgcaaagttcgaggatggcgtcctgcacgtcgagctgcctgctcctcagcagacgaaggctttgcctgagaacccgaatctgattgcgatcgagtaaaacgccggtcgtgtgcgccaaggcacaacgcacacagaaagcccccggagagctgtaacaagccctccgggggcttttttgtggggcggaaacatggtacaataggaaagaacgagagagaagagggtgcgatgaaacaagaaaaagcctattatcacctgcccggtttgtttgagttttatgagctgtaccgggagtttctgcccctgtaccgggggcatcgagaatatttctatgactggtgcagcattggctccatctacggagcaccggccgactgcatctggggcggaggacgcaccggcttcggcgggaatgaccccagagaggtccttgcgctgatgcaggagtatggcatctcggcccgactgaccttcagcaactccctcctccgggaggaacatctttcggaccggaaatgcaatgcgctctgcgccctctttgcacagagcggcggggtggagaatggcgtcatcctccattcggagctgctgctggaatacctgaggacgcactacccgcagctttacctcgtctcctccacgaccaaggtgctgacggatttccgacagctccgggaagagacagtccgagaggaatttcgctatgtggtgccggatttccgactgaacaaggcctttgcacagctggacagcctgacgcagccccagaaggacaaggtggagtttctctgcaacgagtgttgctgggtcggatgccgggaccggaagcgctgctacgagaatgtcagccgcaaaaatctcggcgaggactgccccgaccatatctgcactgccccgggcgcgggggagggctaccgtttctcgaaggcgatggagaaccccagctttatcggcgtggaggacatccggagaaccttccttccgatgggattttccaacttcaagatcgagggacggggcctcggcagcgccttggtgctggaatttctgctctattatatggtaaggccggagtaccagctgcacgtccgggaagccatctatctggacagtatgctcgacctgttctgagcggcccggcccccgtttcgaaagcatcttgacaaagctgggcggagttgtaataatagagagacagttatatccgacaaacttccggaaggagaaaacaattatggaagcattggaatgcatcaagacccggcgcagcgtccgccgctttaccgaagagcctgttaccccggagcaggtggccgaagtggtggccgctgccgcttatgcccccagctggaaaaatacccagatcgcccgctatattctcgtggaagatgcgcagaagcgtgagaaaatcgccagcgattgtgtgctggatttcacctataacgccaacacgctttcccatgcccccgcactggttgcgctgacgatggtgacgggacgctctggttttgagcgggacggcagctattccagcccgctcgaaggccactggcagtcctttgacgccggtattgccgcacagaccttctgccttgccgcgcacgcactgggcctcgggacggtcatcatgggcatctatgacccggacaaggtggcaaaggtgctctccgtgcccgaaggacagacagtggctgcgctcattgccatcggtcatcctgcacaggatcccgccgcacctgcccgcaagagcgtggaagaactgctgagcgtacagtaaatgagatgggtccggcattctggacacctgccacaaagtagataacatcaccccggtttccttttttgaaaggcagaagccggggtgatgttattctatttctgaccaaacccaacgggcaggttgccggagccgcctgttgggtttgctgcatctggcaaaacagcaaaattatgataggatttctccgtcagcaaagccccggtggacgcttgatcgtctactaattctactaaaattgaatctgtggctgtttttttaagcaaattggacaataaatcacaaaaagattgacaatatcgaccaaaattttctagggggggggtagaatagtgtcaaaaccccttgcgtacaaggtaacacaatggtaaaataaacttataaatagttttatcgcaaggcaagaaattcgtgcaacatgaaaacagcatatttgcgatatgcaattcaacgctgttgctgttgcattaaaaagttgaattgctataggatgtcgaacgcacggtatctcctacgagcgaatgagagataccccttaattgcggaaggggtgataggtgtggcgtttcgacgatttggacatcatccgagaacaggcaaaggtgcgctaactgggatgggacggcgcggggaaaaggtgcttgatggaagaattgcaaacaaaatgacccttggcgaagcagtcgtcaggggcgttttgcgtgccctgacgtatgggggtgctgcggatcgatgccaaaaagtgactgcaagtgcctctgccgttgaagctggataagagaacgtacagttggaatcgtgtgtgagattacatagtgtgagtgaggagaaaaaatgagcgtagaggtaactggaatcaataagccggctgaaattgaccgaaaggaaaatctgagggagcatcagctctattggatcgggcgtcggacgcaggatgtgatcttgtcgtcgctggcattggtggcgctgtcgccggtcatgctggctacggccattgcgattgtggtggatgacccttctgctggcccgattttctcgcaggagcgtattggacgaaacggtaagccgtttaagttctacaagttccgctctatgtgccccaacgcagaggcaaagctggacgatctgctggaacagaacgagatggacggccctgtgttcaagatcaaggacgatccgcgcattacccgcgtgggcaagtttatccgcaagaccagcctcgacgagctgccgcagctgtggaacatcctgaagggcgatatgagcatcgttggcccccgcccggcgctgccccgcgaggtggaacagtacggcgactacgaaaagcagcgcctgtatgtgacccccggcctgagctgctattggcaaattgccccgcaccgcaacgacctctcttttgaggagtggatggatctggatgtgaaatacgtcaaggaacgcagcttctgggtggattggaagatcatttttaagacatttaaggtgtgtttgctggggcatggggagtaatgtctacctcaaactttcagttgcggcatgatggtctacggtggcgtataaaactcatgcgaaatacccctactgcaagcctgttttattgcggagcaagggacggacatgataccttcatttttccgaaaaattagaggtggaggttgaaagtgttgaaaagcccaaaatctatttttctggaaaagtttattgcagaggaaagacgggcatgataactgcatttttctggagatttagaggtagagggtggtagatgattgttcatgttgcaacaaagatgagatgtgaacttgtacggttttaacaaagtgagttggcgtacgggttatgacaataagggtcagcactttgaaaaatagagaagtgcgactgagagttatgacaataagacctaacactttgttggtgagttggtatgaaggtgtctaccataaagtttcagttgaagcgaaatgagtgagtagcccatgataggtctacataaaagattcagtggtggtcggaaagacggattgaaatacggctgcggtagatggaagcaaagaagaaacattggagctgttgtatcaaaaacttacaagtaattatccgggaatccaaattgctgggatgtacagtcctccgtttagaccattaacggaagaggaagatagagcaatcgtagaaagaataaatgaaaccaagccggactttgtctgggttgggcttggagctccaaaacaggaaaagtggatggcagtacatcaagggaaaattgatggactgatgcttggtgttggagcaggatttgattattatgcagaaaatattaagcgcgctccgatgtggatgcaaaaacataacctagaatgggtgtatcgcttagtgcaagatccgaagagactgtttaagagatattggagtacgaacacgaaatttatttggaatgcaatgataaggggaaagtaaatatgaaaagagtatgtatggtcgttccaaatagaatggtaaaaggtggaatagctgcggtcgtaaatggatatagaggatcacaactagagaaggactatgaaataacttatgtagagtcatataaagatggaagcaaatttgataagcttttgaaaggtatttgcggatattttcattttgcatatgtgcttatgtttcacaagccggatgtggttcatattcattcttcttttggaccatcattttatagaaagatgccatttatttatatggcgtcttggcgcaaaattccgattgttaatcacatacatggtgccgactttgacgaattctatgtaaacgcaccagaagaaaaaaagaacaagattaaaaaagtatatagtaaatgtaacgtgttgattgctctttctgaggaatggaaaaaacgactgagccagattgttccggaagatagaattgaaataattgaaaactatagtgttcttcatgaagatgctttagaggaaaggatgcagaggaagtgtaataacacagttctgtttcttggtgaattaggaaaaagaaaaggctgttatgatattccagcggttatagcacaggtgaaaaaaagtatcccagctgtgaggtttgttctggctggagcaggaagcgaagtcgatgagaaagcaatcaagaaattgattgatgaaaaaggtgtatccgataatgtggaattccccggatgggttcgtggtgatacgaaggataaactgcttagggaagcagacgtattctttttgccatcttataacgagggaatgccaatgtcggtgttggatgcaatgggatatggtcttccggttgtaagtacaaatgtgggtggaattcccaagattgtgcatgatgaagagaatggttactgttgcaaagccggagatacggatgtaatgagtgaggcaatcactgatcttttaatggatcaattaaaacgtgaaaaaatggcagaagacagcatttctattgttaaagcaaagtattcattggaagcacatataagttgcatggaagatgtatatgagaaggtaatgacatgaatgagaagaaaaaaaataatcgatatattatatgttgtagtgatccttttccatttgggtcagcaaattccaattatatccgaaatatggcattggccttgaaaaatgcaggtaagaaagttttagtaattggattgcttgagggagaaaatttccttgacggcgaggaaaatggaagatttcaaggcattgattatataaacatcactcagaaaaaaagtaaacttccatttagatttacaaatcatttattcttcggaagaaaaattgtgaaatgtctgagcaaacaagatgttaaacaagaagattatataattgtatataccgattatattagtgtaagcaaacttctttttcaggcctatgcgaagaacaatcaattgggacacatggcatattgcatagttgagtggtttcaagcacatcaatatacgggcggaaagtttagcctagattatattttctggaagatccactttgatttgttcatgccgaaatacaagaaagttataggtattagcactaagcttgcaaatcatttttcagatataggatgccaaacaatggtgttaccttgcttgacggattgtgataacttgacgattcgttgtgatttatcggtaagagaaaaggaatattatgattttatttacccgggggcagcaacgaataaagattctttagaaggcatgttgaaaggattgttgttgttaaatgaagatgaacggagaaaagtaagattccattttacaactctaaaaccgaataaactcattgaagcagcgaattgttcagaggaagcattcaataaattgagtggtgtattggtatttcatggtcgtttggaatatgctgaattattagagctatatcaaaatatggactatttatttttagctagagagaagaatattataactgaatcaaattttccgagtaaagttccagaaatgcttgtatatggagtaattcctgtttgttcagatgttggtgattatacaaagctatatttagaaaatgatgtgaatgcaattatttttgaaggtgccgcaccagaagagtgctctcaggcatatcggcgggcgataaatattgataaagaaaaaaagagccgcatgaaaattaatgcaagacatacagcagaaactaaattagattatcatgcctggggggacaaactagtatcatttttagggtgattactataatttagaaggagttgaaaattatgaaagtgatttggcttactaatgttgccactcaaatggtggattccataataaatgaaaataaacgatccttttttggaggtggctggttagatggtttgtcagagcgactcctgagtgataagagtttcaaattagtactatgttatcctttgtatacccaaaaagaaaatattgaaggcggcaaagataattttaaattctatggattcgctgcagatggaaaaaaattaagaaaaggtacggctggaattgaaacttttgaaaaatattttgaaatgattctaaggaatgaacacccagatgttgttcatattcatggtacagaattcgaatactgctattcgatgtgtagggttgcagaaagactggggatgcttgatagagtggttatttccattcaaggattagtgggagtctacgcaaatcatttatttgctgggatgacagttgcagatgtgagaaaatgcacacttaaggaatttcttacacaaaatagtgtttatgatacatataaggcttacgttcgtcgaggagtgtttgaagaaaaaagccttaaaatggttaagcatgtaatgggaagaacttcttgggataaggcgtgtgttgatctcgtcaatcctaaatgtcaatatcatttttctaatgaaacattgagagatccattttatgaagaaacttgggattatgatacttgtgagagccataccatttttgctagtcaagcgttattacctttgaagggattgcatattctgttgaaagctgcgtcattgataaaggatgaatataaggacttaagaataaaagttgccggacagaatataattttaggtaattggattaatggctcatcatacggattatatattaagaaacttatcaaaaaatatggacttgatggtcaggtcgaatttctgggacctcaaaatgcattgcagatgagaaatcaaatgcttaagtgtaatgtttttgtttcaccttcaacaattgaaaattcacctaattctgtgggtgaggcaatgttgcttggaacgccatgtatttcttcggatgttggcggtgtgaatgacatgctgagaagagatgaagaaggatttgtatatccgtatgatgaatactatatgcttgcataccacattaaatatgtatttgattgtaaaaaacgaatagcaagtgtaacaaaaaaggcgcaggagcatgcaaggattacacatgatcctatgataaatagcagtggtgtaatggccatatataaagaaataattaatcaataaggaatatagaactatatgaagatatggactcaacttaaaaaggttcataatgcaattacatataaggtgtatactccattgaacaaaatcaaattccttttaaatggtgttgtttatggtaaaaacttatgtgtacgaggaaatgtctatatttttaaacattatgaatcaggtaaaattataattggcgataatgtaataattaattctgcttcatgggcaaatccaattggatgtggtgatagaacatactttcaaataaatgaaaaggctgtattgactattggaaataattgtggaatttcaaatacagcaattacttgcgaagaaaaagtgactattgaagataatgttatgataggatctggatgtcatatatatgatacagattttcatccgttggaatatagtgaaagggtcaaagaatattataaaggttgcccgactaaaagaaagccggttcgcatctgtgaaggagcgtttatcggggctggatgctacatccttaaaggtgtcacaattggagaacatgcaattgtaggtgcaggctcagtagttgcaaaagatattccggcaggagaaatttgggtaggaaacccagcaaaatatattaagccagtagaaccgtatggagagaataaatgagtttgaaagtatcaaagaaagtgttcttttacatattgttttggattgcatgcctattgccatacgatgtaataagcctgtttccttcatatgaaacgtatttccagtatattttacaagggggcttaggattattccttttactccagtataaaatgaagataaaatcagatatattctcaagtatattatttatatggattactctatatctacctggtgcaatttttgtatcaagcataaaaagtgtaacactaattaaatatgtatgttggatggctttgcttctaggtttattaagcttctttgaaaatgcgtcagaagaaagaatatatgatttacttaaagctggaaaaataactttttgcatttatatgtttttaacatttatttcaatgtctgcaagggcaacagatgttggaggcgttttcttcctcggaagtcgtgcaaccacgttgcagtattttctatgccttttaacattttgtatttattatgatatacgatataaaaaacgaatatcgtatattacatacgctctgacagtgctgtcttggatttttgcaattcttagaggcagtggtcagggaatgatgatgctttttacgctcttgggcttaacattgttggagtacttcgcgaaagtaaaaataaaatcaaggatcaaacctctttatataattgttgcaattgttgtagttaattatttaacggtcacattatcatatatgaattttgatttcattattgatatcattcagaatgtcttacataaagatgcaacgcttaccggtcgaagtgagatatttacatactcattgggcattatgcttaaacatccggtaattggatacggatatgataatggtattattgagcaaacattaacaagaattgtagccgcttataacacagcacataattctattttacagatgttaattgactgtggttttgttggaacatttacgtttcttgctatgaattataatggctttttaactatatataaagatgaagatgatacactgaatatattttattattcattaattgcaattttcgtaggcggtattgtgagtatgattattccgagtaatgcgtattttctgattttgctttttgcggtaggtcgtactaaatatgaatacctgaattggaaggagtgagtttatcagaaatgaaacataaagagtcaaatgaaaaaatgagatttttgaataatactagctggatgcttgcgcagcagatttattcaatgattctgtctcttgtagtcggatcattatcggctcggtatttaggtccatcaaattatggattactaagttatggaagctcattgatatcattgtttactatgatatcttcacttggattaacaaatgttatcatcaatgaaatgataaagcgtccatctaaggtgggctcttatttgggaagtgcatttgtggcgagatttattgcgtcgtgtgcatcccttataatgatatatggaattatatttattctggagccagataataaactattgcagatagtaacggtgctgcagggagttgcagttgtgtttcaggggtatgaagtttttacttactactttcagatggaaatgcaaatgaaggtggtttctattgcaacaatgcttgcattaactgctgcatcagtctggcgaatatcacttcttgcacattcggctgatgttcgtttttttgctttgacaaattcaattcaataccttgttgcaggtttagttgttattataatttttgccttaaaatcaaaggtgaaattatctttcaatattcttgatgtgaaatatctagtgggtaagagctatcacttaattatatcaagcattgcgagtacggtttgctgccagattgacaagattatgattggtaagattatgaatgaaacccatcttggattttattcggcggccgttacaatagcagaattatgggagtttgttccttcagcagcagtaaactctgctagaccacttattcttagtagaagagaaggtaattataaggaatacgaacgtagatttcagctcctattattgggaattacttgtatgggtgtagcagtttcaattgcatttatgttccttggagatctggcgattaagatactatatggaaaagactatatggaagcaagcattcctttgacaatcttgatttggtcgacagcagttgcggcaattggatatgctaggaatgtgtggtttgtggcagaagactgccaaagttatgtaaagtattttacaattgcaggtgcagtgtttgatttcgtggcaaacttgtggtttatacctgtatttggaattaagggtgcggcaataacaacagcactgtcacatattattgttggttttattgcaccgctatttgtaaaaaagacgagaaaatttgttgcactttattttaaatcattccttttattcccagatttaataaaaattgtaacgtcgacactaaaaaagaaaggataaatatatgcagcagtataaagaaaagaatgcagtagcaatattgacttttaatagaagtgaaacaacaaagaaattgatggagataatgaaaattataaaaccacccagattgtatgtaataattgatggaccaagagatagccataagggtgaaaaagaaaaagttgatattgttaagcaaattattgatgacaatgttgattgggaatgcgaactctataaaaattattcggaaaaaaatatgggaacgtgcatgcgacagtacacaggtttctcatgggtctttgaaaaagaagaacaagcaataattcttgaagatgactgtattcctaaccttgattttttcagatattgtgatgaaatgctggaaaaatataaggatgatgagagagtcatgatggtaagtggatcaaattacctaaaaaaatgggagtcgggatatagttatcattttagttctatgggtggcatatggggatgggccacttggagaagagcctggctgaaatatgatgtcgatattcgagcatggggagactatgaattaaaaaaagaattaagagaaaagcttggttgggagatgtatcagcatagaagagaagcgtgggatagtttatatatgaattcatcaaaggcaaagacatgggatttccagtggtggtttgccagaacgattaatagcgggctgacaattattccaagtgttaatcttgtttctaacgtagggtttgatagtggcgcagtacatacaacggcttcatctccaaatgtgaatcttgaagtatatgatctaaagttcccgttaaaacatccaaattatgtaatggaaaatacgggatatgatcgtgcattatttaattctcttttcagaggaagatttagaaagcgtttgcatcgaaaagtaaatgacttgcttgagtggaagggaaaagtatgattagaattagagcgtttttgggaaggattagaagacttccaaaacaaacggcaatggattataaaaatagccgattaataaaaacaaagcaacaaataggcaaaaaaatatattattttggggttccagagcattcaaatctaggagatcttgctcagtgcttctgtattagaaaatacttaaaaaaatacttccccgaatatgaagttacagaagtttttacaagaaattatctggataattcttttgggattcgcgactatttgaaaacgataattaagccgaatgatattatattttttcagagtggatattgtacgcaggatttgggaggacgagaagatcttatgcatcagtctgtgatgcaggacttcccagataatcctctggttatgctaccgcagactgtgtattttagaagtgaagcacgaaaaaatcaggcaagtcgtatttacgatgcgcataagagactattctttttagcaagagaccaagtatcctatgaaacagcaaaaaaaatgtttccgcatattcatgtagaaagctatccagatattgtaacgacattgattgggcagtatgagtactcttttgagcgagagggtgtgcttttctgcattcgaaatgattctgagaaattttattcagatgaacaaattgaagatttgatgagacaccttgacggaacaaaatgtgatcgcttggatacgacaatacatgtggaaccggatgtgattcgaaataatctaaagcagtatattgaggactattttaagaagtttgcacattataaactgattattacagaccggtatcatggaacgattttttcacttgtttcgaatacacctgtgattgtgattcagacgaaagatcacaaagtaaaaacaggtgttgattggtttaaagagcattatagctcacaggcattttttgctaatacacttgatgaggcaaagtgcttagcggataagattttgagcggttatgactataaaaggaatgataactactttgaacaagagtattatggaaaactcagaagaaagatagaacaggaattgaggatttaatagatggaaatttgcgagaagaataggtgcacaggctgtcaggcgtgtatgaatatatgtccggtggacgcgatttcgtttcatgaagatttgaagggttttttatatccagaagtgagcgaaaagtgcgttggatgcaatgcctgtaaaagagtatgtccaagaaatacaggagtacaactaaatcaaagggaacctgtagtatatgctgcttttacaaagaataaagcaactcggaaaaatagcagttctggtgggatgtttactgagttggccaaaagcgtacttgaaaagggcggaattatttatgcgtcaaaattaagtgaagattgtaaaagagtagtgtttgattcctgcaacactgttgataatctcgcaaaattccaaagttcaaaatacgtccagagccaaccgggattgatttttcgacaagtaaaagaaacattacttaccgggagagaggtattatttattggcgttccatgtcaagttgacggattaaagaaatatttaaataaggaatacagcaacttgctcgttgttgatattatttgtcatggagttccatcccccaaattatggagagattattgtacctatctggaagaagtaaatggagcaaaagcagtcaatatttcttatcgatataagaagcccaattggacaaggtttagcctaaaagtggattttgataataataaatcttatgtcggaagcaaatttgatgatccttatttgatttcttttttgaaagaaatatcaatgcgagaaaactgctactcctgcgaatatacaagtacaaatcgaacaggagatattacactcgcagacttttggggatatcattcttatgactttaagatgagaaatacagaaaaaggaatttcacttgtaatgatcaacactgaaaagggacaaaaagcctttgaaaacattaaaagtgaaattgcgtttcaggaaagaacaataaaggaagctattggtggaaatagaagcctaaaggagccgtggaagaagaatcccacatcagaagatttttggcgtgagtatatacaggggaaaggcatgaacaatgcttttgaagagtattgtaaaccttaccgtttcccagctaaaatgcgtgtatcatggtttattacaaatcatatgtttttaattccgaagcctattcttgaaatgagaaaaaaattcaggggggggggtaagtaagaacccacataaaacatcaataggtatatgggcatactgcactggtcgaaaggcggtgcctgtatgttgaatatagataagaaacggtgcactggatgtggaacttgcgaaaatgtgtgcagtcaaaacgcaataagaatggttgagtccgacagaggctttttgtatccagcatttgatgagagcctttgtattgaatgtggactatgcgagaagaaatgccctttgaatgttgatacaccagttcttgagtataagcagcgtgtttatggggcatggagcaaagataaaaaaattcttaaagcttcaagttcaggtggagtatttgttaatttagcaaaagaagttttgaaacaaggtggtgtggtttgtgctacgcgttttgaaaatgattttgcaggagtgatatttgatagctgcgactgtgagacggacttgtcaaaattttgcggatcaaaatacattcaaagcacgcccaaaatgatttataaagatgttaaaaaatatcttattaacaaacgacgagtactttttgttggcacaggatgtcaggttgctggtttgaaaagctatttgggaaaatccgatgagaatttactatgtgtggatttgatttgccatggagtgccatctccgttggtatggagaaattatatagctgaacttactaaaaagcataatgcgaatggcgttaaatgtataaccttcaggaaaaagaaaccatcttggaaagaatatagcatttatattgaatttgataatggaaagaaatatgaggcaaagaaaacagaagatccatatttgattgcatttgcaaaagattatatgcttcgcccgtcctgcgagcattgtaaatatgcttgtgtaaatagagaaggtgatattacactggctgatttttgggggtatcgttcatttaattataaaaccagaaacaaggaaaaaggaatttcttgctgtattattaactctgacaaaggaatgaaagcctttaatgaaataaaaaatcaacttgttgtaacagataaaaatatggaggaagccattcgaggtaacagaagccttgttaagccatggagttctaatcctcagtccgaagaattctggaagttgtatgaagaaaaacaaaatgatgcacttttcgaattttgtaggccatataaaaattcggctaaaatgaaaatggattggtttattcaagatcatctttggatgattccaaagccgatccttagatacttattaaaaagaaaagagtaaattaatatgattaaaagtaaaaaagaactgaaattttgtattagtgcagactatatgatgaatagaggatattttaaagaaccgatattaaaaaaaatcatatcagttatatatccagactgggtaatgaaatatttgatagcattgcgtaaagtagagttctattctaacgggggggggggtactgcagtactactataaattcaaagttcgcatgtcaggtatgaaactggggtttaccattgctgaaaatgtatttggctatggtttggttataccacattatgggacaattgtggttggaagcggtaatcgtataggaaattatgcagttcttcatacgagtacttgcattacagcagggaagaaaaatataggcgatggattgtacttgtctacgggagcaaaagttctgggagatattgaacttggaaatttcattacgattggagcaaatgcggtcgttaataaatcagaagaaggtaattgtttactgatcggaattccagctgagaaaaaaagatatgaagatgcatggatgaaaggtttatacagagaaaggtatgaagcttgtgaaaagctgagacaaacgatgtttaatagtttgtaaatgtggcagtgggattgagtaggaagggatgaagggtattgtgcagatagtaaagacagtaattaccaatatattaatagctttataccaaccgttttggtatgcagctgtagcgtcagtgcttctttgttttctttatctttatgcatatcatccagtcgatacgggaaatgggctaaagtcagcttttaagacgtggatagaagaatttaagcgttctattttcttccgtagactctttctcttgtccttctttacaataatgatactttttcaaacgctttttaacagaaatatgtgggctaatccgctatcggatgtgttaggaggatggtggatttgggatactgtaaatggcgaaaagaaattaaccacggagtgctttgaaaatttagttttaatgcttccgttcactttttttctgtttttgacttttgaagaaaagctgaaaagaattagtatgaaaggaatcattgggacaggacttaaagtagcttttatattttcttttaccattgaaatgcttcaattgttttttagacttggaacatggcagctatcagatcttttctacaacacagtaggcggtggcattggaggtctattgtattatgtggtctatcgagtgaaaaagttttctggtaaatagtagaagataagactgtgaactgctataataacaactgtgggaatcttcccacggtagctgctcaaaacttcacacagctctccgtggtgagcagcaggcaacggtcttatgactggctgagatgtgaaggcgcatacaacgtaaaaataagggaggtcaaaatggtgtcacgatcaaattataagaatctcataattataggaaatggatttgactgctggcagggcatcccaacatcatatgaaaaattcagagtttattataatgaacatattgaagaagctgcaagtaagcttggatacagcttttatacaataaaagatactgctggaatagaaaagaaaatcactgcggtcgaactgatatatgggaatccgtttgagccagatcagctggaaaatgattttttctggaatttggaagcgagaatggacaagatagatgatcagattataaatctgtattttggaagaagtgcggagggtagaaaaaagttaagccaagcggttgatgaagccataacgcttatacgccgattattctgtgattgggttatgacatttaatatagaggaaaagagcagtggttttagattcccagatgattgctttattataaactttaattacacagatacattggaaaagcggtttggcgtgaaatctaagaatgactttcatattcatggagttgcaactgatccagaatcgattgttgttggccattccacacatccagaagaaccattcaaagagttgattgaacgaaagataatggaaccgttagatccaacaaagggattgccaagaattgatggattatatgcagtggaagatgccctctacaggacagacaagcatacagcagatcggattgatgctttgtgtgttgcgctgatgaaaaacggagttcatatcgaagatatagagaacatttatattttggggcattcttttgcagaagcagatatgccatattttgaattcattgatgcagtcacaagatgtgggtgtaactatgaaaaattgtctgcggtaggacatattgatctgggccttttacaatcttttgaagaagatggcggtgatcagttcttcttggattttatggtgcg

SEQ ID NO: 823 - DNA, 31182 bp, unidentified
  source 1..31182: mol_type = unassigned DNA
cgtctgcctctgctccaactgcggtctttacgatgttcttggtttccacaacctcagtcaagttgttatcctcgtccatcttgcagataccacgagtcacaccgccattatcagacagggtattcttcagcacaaagcctgccatgcaggacttgccgccatttaccaaatactcatggacagccttaaagccttccttgccatagtaatcgtctgcattaatgacgataaacggagttttaattacgtccttcgctgcaagcacagcctgaccggttccccacggctttgtacggccttccggaagttctcccggaatatcgttgatatcctgaaaagcgtagtccacagttacattatgagcggagcagatagaagcaatgcggtcaccgatgacctctttgaactccttctcgatatccttacggatgataaataccacatgattaaaaccagcctcaatcgcatcatgaattgagtagtccatgatgatatggtttgcatcatcgaccggctccaactgttttattcctgttccaaatcggctgccgattccggccgccatgataagtaatgttgttttcatattctctcctatgctcgtgcttcttttatcggacataccttaatgcactgatagcaacgaacacatttactttcatctatctgtggatattcaaagccttcttcgtcttccaccatagatatagcttctttcggacagatagcataacaggctgtgcatccacagcattcttcttttcttttatatagtactggtatttctatttccatatccaatcactccaccgtcacactctttgcaaggtttcttggcttatccacatcgaggccctttgccacagatacatagtatcccagcaactgcagcggaatcacggccagactgccaatgaaatgctcgtctaccttcgggacatagactgtgaagttcacctgatcttcaatctcgtacttgccataagtagtcagtcccatcagataagccccacggctcttgcactccagcatattgcttacggtcttttcgtacagctcgctctgagtcaacacgccaatgaccaatgttccctgctcgatcaggctaatggtaccatgtttcaactcacccgcagcgtatgcttccgagtggatatagctgatttctttcagcttcaagctgccttccaggctgactgcatagtcgataccacgaccaacaaagaacacatcatgagcgttggcgtactttgccgcgaaccactgaatacgctctttgtcttccagaatcttctgtatcttctccgggatagtctgcagttcagaaatataatagctgtactgctcatccgtgattttgcctctgaccttcgcaaactgcactgccaggcagtacatagcggcaagctgtgcactgtatgcctttgtcgtagcaacagagatttccggtccagcaagtgtgtagaacactttatccgcttcacgcgcgatgctgctgcccaccacattaacgattgccattgtggtgatacccttctcttttgcaagacgcaatgctgccaatgtatccgctgtctcaccagactggctaacaacgatcaccagtgccttctgattgagcggcatcttacggtagcggaattcagatgcaagttccacacgtaccggaatgtctgccatatcttccagcacatactgagcagccatgccaacgtgccatgcagaaccgcaggctacaatatatatctgctcgaagttcttgatttcgtcctcaatgatctccacgctagacaggtctataatgccattcttgattacagaattaagggtatcctgaacagccttcggctgctcatgaatctctttcatcatgaaatgctcaaagccgcccttttcagccgcttctgcatcccacttaatctcggtggtctgcttttcgatttcatcaccatcaagattataaaaatgagcctcacccggagtcaattttgcaaactcaagattgccgatgtaatatacattacgagtatatttcagaatcgccgggacatccgaagccacataggtttcaccatccgcaatgccgatgatcatcggactgtccttacgagccacccagatttcgcctggataatcacggaacatcagctcaagggcataggaaccacggacacgaaccatcgtcttggcaatagcatcgatagggccaaggttgtactttttataatagtaatcaaccagtttaacaactacttccgtatcggtctggctgtagaacgtatagccatgtttcagcagcttttctttcagctcggtatagttctcaataataccgttatgtacaccaacgacctcggattcgaccgggccggaaccagatctggtgcaattaccagatacatgcggatgtgcatttgtctggctcggctcaccgtgggtagcccagcgggtatgtccgataccacaggttcctttcaatgccttaccgccatctgtcttttcgatcagattggacagacgaccctttgctttcacgacttgtgccagattctctccatcacgtacagccagtccagccgagtcatatcctctatattccaactttgacagaccgtccaacaaaatcggtgctgcctgtcggtatcctgtaaaaccaacgattccgcacataggtttatccctcccgatatttacttctctcgtctattatactttccctcttatgcaaaacgactccgggaactgccagagtcgtcattgactttatgccttatatcccttttcgcagatcacattgaccacttcatcaacatacttctggcatgtatcgtggtcaggtgcttccaccataacacgaaccaccggctcagtgccggactcacgcaccagaatacgaccggtatcgcccagagcctcagctaccgtatttacagtttcctgcactgccgggtcattctgtgcagctttcttatcagtcacacgaacattctccaacacctgcggatagatcttcagcggtgctgccagttcactcatcggcttctttttcgccagcatggcttccatcatcttcaagctggtcagaataccgtcaccagtgcttgcatacttggagaagatgatatgaccgctctgctcaccgccgatacggcagccgttcttagccatgtactcataaacatacttatcgccgacagcggtcttagcgtaaccgataccttgctcatcgaaagccttgtagagaccaaagttggacataactgtggtgacaacagtattatttaacagcttaccacgttccttcatgtagcaaccgtaaatgtaaaggatatggtcgccagtgataacattgcccttttcgtccacgcacaggcagcggtcggcatcaccatcgtaagcaaaaccaacatccaagcccttctccacaacaaacttctgaaggccctcgatatgggttgaacctgcattgttattgatattcagaccattcggattattattgatgacataggtatctgcgccaagcgcatcgaacacggactttgcgatactccaggagctaccattggcgcaatccaaaccgaccttgacacccttaaaggagtagatgcctagcgagatcaggtagcccatgtagcggttgcgacctgccacatagtccacagtgtagccgatgtgctcacgatgagcaaagggcagctctggccagtccttatcaaagacatggagtttgccgtcgatgtagtcttccaccagcagcagagtctcctcaggcattttctcgccgtagcagtcgattagcttgatgccattgtcgtagtacggattgtgactggcggagatcataatgccgcaatcgaagtcatccacgcgggcaatataggccacggacggggtagtcgtaacatgcaacaggtaggcatccgccccggaggctgtcaggcccgcaaccaggctgtactcgaacatgtacgaactccgacgagtatccttgccgataacgatacgggcagggtcggtatcaccattgcgctcacgtaaagcattgtaataccagcctaagaagcgaccaaccttataggcgtgatccgctgttaatgtaattccggcttctccgcggaagccgtccgttccaaagtattttgacattttttattctccttacaatcaaacacgaaacacaaggagtaatccatattctgtattactctctgcccccccgattactcgaagcatttttttaattattttctttactttcctttttgctcttgttttcaaggaatattttatcagagcagcatactttccttccagctcttcgaaactcattgtgtgcatatcatcaaaaaaagtatctctttgtgacggccttgcacatgacttgtattcagcaggatttccttttacaccagcttcgtatgtcacctcttttaatttcattttgcaactgatgtagttaaatatttcttttcctttttgggttcgaatcaatacgagagaggttcctaatccatcattcatttccggggcagcttctttaattccccagaagtccgcgactgttaaatcagacattttctcttttttagccacacactcatagcaagaaggacgtaagcagtaatctctcagaaacatttgcatatatgggtctttatctttagatatgtaaaacttttttacggaatcttctggaatattttccaaaacttccttcatgccaaaatcagtccaactctcatctttgcagcgaaagttaattcctttcagctttccaccagactttttttcttgatattgtgcgtattctctccacaatgcaggtgatggtgctccgtgacaaatcacatccatgcagattaagttttcataatcttttcccaaaaacttctttaacccgtttacttggcaacctgttcctgtaaatagcacaagttttcctgcttgcaattctaccttaactttcttaaatgtatccccaacttttgcttgcaggtattttgatccacggagttttattagttcacttcgatccgtaactgcaataaattctgccgaatagcaatcctcagacatcgcgacaccatacacaacaccttgtttattaagcacatactctgccagagaggaaaaaactgccccagaagaactgttcaatctcaaatctttatttatattataacaagcatatactttttctggcttcattcgcattcctcttctataatcatttccttaaaatttttctaattggtcccatgactagctgtttttcttccgcattcatccctaagaaaaacatcgaaaatgcatacacagcagtataaacaactgcaaacactcccaatttaacgaaaccagtaatattgacaaagttcataataacaataccgaccgcacaaggcgcaatcaatgccgggataaactttgcaatctctttccaaaaataaatcatgttcattccaattcgggcatgataataccagttcatgaagatggcattgcccgcaataagagaaattgccgtaccaagcgcagcacctgccggccccataagtttaatcagcggaatgctgataaatacgttggcaatcgcaattgccaaatagacaactgcccttgccttatgcatattcttggctctttgaatctcaattccaagattttgtattaagggaactgtaacaggaataataagcaacagtgccacagcatacgaagcaccgtattctggcccagcccaaatttttacaaaaggaattccaaaaaaaataaatccagacaaaatcagtcctaaaaccataaactgaattcgaccaacctttgtaaaaagtttagttaattgattattatcatttgtctcggcaacaatacgattaactttgggaacaaaaacatttgacacggacgaagaaaactgaagatataatgtattaatctgtccgcctactccgtatatggcaactgctgtcgtaccagcaaatctacctaacaaaaatttatctaagctccaattaatttgatctataatctgattcaggaagatgaaaaatgtaaatacccacatttccttaagcaaactaatttgaagtcctctaaaagcaaatctgatatgtaattttctaaaacaatagaacatattagatatcaataacgcaaatgtaagaaatgttgttacggataccatacctattgatccgtaccccataataagtaatggcaacgtcaaaaaaggactaaataaattctgaagaagtatcagcagtttttgaaacagaaacttttcgtgcgccgtaatcgagcagttaaatacactgttcggaaacgtcattgcaaggtttataatgagtagtcccatcaaaactttagcagtagcatattcgctttctgtaaggcccgtaccaaaaatgccacgaatatttcctatcattacgagtccacataaaacacagataatagaaatagaacagaaaataagcatgaacattccgttcaactttgcaacgccatcttcatctttctgtgctttataccttgaataaaaccgtaagtaagaacttccaaatcccaaacttaaaagactcaagtaagaaaccacagaatatactaactgatataacccatactcactttgccccaaaaggcgtagcattatgggtgtataaattaaactaactaatatttttactaattcaccagcatatgatagtataacaccggcttttcgctgattaatcatatttttcatttttcaaaaatttctattctaaacctttcatttattagactcattcactatacaaacctcatcctgtttaaaccccaacataatttttgcgacattcaatcaattcttcaatgcgctactcaaaaattctctagaagatttttgcatagtcagaacatttttatcgacaatcgagtaatcgattggattaactgttttggtcactaaattttcattaacagaaacgacacgatccggcgttccgtacaatttcactaaatcatatattctaacgttcatcacgtcttcaggattacttgttggtctctctaacaaataaaattccttgtgaaaaacataggaaaatacacctgcatggaatgaatctgttacaacaatttctgcgtgctggataagactaagaaattctggaattccaatatcatataactgtacatcaccaaaatgccaatcctgtgtcttaaactgaaaaacactgctattaacaatgtgtggaagcgtgacaagctttaatccctttttcttagcaaattcttttatttgttttctttgatttcggtcatcaccaagcatataacaaaaaatatattttccattgatgcgccgctttcctgctaactcatgccagctttctctgtctactaaaagtgtcggatctaatacatgctttgtgttttcaaaaatgcaccttttaaattgctccaccgttgcctcttctcttaacgaaacagcagaatatttagccaatgcctttttcatatattgaatatacacacctggcagattgcttaccgatacgcttgatgcatatgaaaaaacaattttatgatctctagcatttaaaaaattgaatacatatccatcatcaaccacacctggtttccagatctgatcgcttccacttataaaaatatcatattcctttttacactcagaaattgtttcttctgtataaactttagaatgcctaatagatttttctctaaattccgatactttttctgtacgcgaattcaagcgttctgaataccgctttgcaaagaatcttgttactatcttagaatatacgcgccatacaacttcagcaatgcccatttttaccagtttctgcattttcgtctgttgcggcggcagatataacggctttatattctctcttttataagagattagttcgctatcatatcccaattcactaatatacttattcaaagcataggcttgcaataagccaccgtagtttttactattatagtaaagtgaaattatacctacttttttcatctaatcttaataatcctctcacttactatctatgaacagcattcaaaaagctatcataaagagtaaccaatgttattttgcttgaatcaatgttataacctgcttcacttatttcatccaagtgtgatatccttggctttttccaatttgcttgctcatctagcatctttttagcccattcagcaggagtatcatttaaagaataatacctgatattttctgtaagttttgtgtcttctggaacttgatctgaagcaatacaaaacaaacccgatgtttgtgcctcgactgcaaccattcctaatccctccattttagaagggaaaagaagtatgtccattgcagaataccacttttcaacatcacccacacttcccataaacaaacacttatcctcaacctcaagttctttagctaactctttaacaggttcatccagttcccccgctcctagccataatagtctggcatttggcactagtttctggaactcagcaaacaccttaattgaaaaaaaaggattctttaaatagctcattcggccgactactcctactacaatggcctttgtcagtccaagggcttcacgaatttgatttctattttccatgttgaatacatatttttcggcatggattccattggggagaatcttaaaatttcctgttccaaagatttcgtcacctgctgctgtagaacaagctaaatgtgcattagacaacgttgaacacaaattatcaaaaacaaaagatttgattttatttttgtaagtatctgccagcttctgagcatggctatgatacactctaaccggaactttgtttttgtaagcagacaatagaacggccgctccattatgattcggcacatttacatgaacaacatcataccgttgcgccataatttcatccaaaaatttcatcttctttttgctaatataagaatctgcttttggtattaaatacaatttacttccatttttaatagcctttttttcgttagctgtatcaacattttttagcactaaaaaatcaacacactttgagcttttaatcagttcatcgtaattattcatgatactattcgttactccattattttgagtaaaactgctaaccataataagtatttttctatctttcatattttcgcactctcacataaattgatatggtactactccatagaattctgctgccttagttatcgtcagccaaacaaagtaaaagccgaacatgaaatatatgcaagctctaacaattggcttattggatttcaacttcattgaactgattgcataagggcaaagaatcaaaacaaaaggtgtaaagtatagcgaaaatctgttcagaatattcatgcgaaaaaccagcaagttaaatgtcgacgctatcaaaaccatgtatagtaaaaagctctcatttttcgccaaacaatacatactctcatcatctttaaaaagatgcttttctgttttcttttcccataccaaaacataatagcctagtaaaaatggcacaaatgcaaggatgaaattataaatcgtctggagatttatatgtccaacaccttccgatgcacttgtcaaatatcgttcataattatttcctgttccaaagaaattgagtgcggccgtatagaaattcatataaaacaagtaaaaaaccaccattactcctacaccaatgattatttgcttttttgtgaaccttagccgatcaaacagaatcatcagtatacacaaaatggctgagctgtgaaaggttgatgccaacaatatcaacaatgcaaattttatataatcctttagccttctttcgctgttattcatcaatgtataggcaaccaatatgattgaaatcgccagtccctgcctcatcattgtcataaatcgataataaaaacaagtgaatagcataagctcagtgcttagtataacatccatcgactccttataaataaaatagccgaatgccgcacacatcagaaaagaagttgcaaaaataaaaaattgtacgtcgcttgaaaaaacatgtaagaatctagtaaaatagcaatatccaatttcatagccaatcgtagcagaaaatgtaggaatctgtgaccagctataatctccgatcatattaaaacgttttgcatagtgccccgccaaatccgttccaacacttggagctcttaatcctgctactaaaatcaaagcaccaaaagtcacaatcagataaatctttcttcgtctatcggaactatttgctcgatacaagtttccgtatatatatataaatacagctaatacaaaatatattgccatctttactctcctctttaacctttcctcaccagttctttcagcttcttttttagcccaatcggaattgatgcttttaatgtcagcgccactctttttcttcccaatctctttttaaattctttatcgaccgcatcatacccatccgtatgatacagtctcagaattttttctcgttcctcgctataatgggatggttttctcagttgtccattatttgccgaaattcgtgtatagttggatgcgactaattccaacgaagctgtatctgctattagctccatacctttctctgtattagccaaaacgcaagaaatgccatcatatactctgtctttccactttttatctctaaaaagttccggatgttcatgttcgatgccccaataatctccgatcgtaatatcgctataccgcatttcagacgcatatttacagctataacaattctcgcgataagtctcaccctggagaaaatactcgtaaaatgaagagactcgacaatgaatatgccttgactttttatttataccatatttgatataaaaatccttccagccttttttcttatccctaaattcaaaagtctctacgctatctgaaagcgtgtggatgtaatcattcaaaagtttctgactaggaacaccatgacagattatatcaaccgtaatgagattgtcatatttcttttttaagtaacccttcagagcatccacctgacatggtgtaccagaaaaaagaactttcttgcctgattcaaggtcctttttaatacatggcaaaacatcaaaaatatagctctgcacatatttggaaccttgaacttttggaagttcctcaagagtattaattcttatatgctgcaatgtatagtttccgttcttcatctcgtaggatgcaccatatacaacaccaccattgcgaagtatttctgtcgcaaatgcgctgaatgcacctccagaggatgatttcattaactgatcatgatctgtatttgttgcagcatatcccgcaatcggtttaaatgcctcatggttcttttgataattacataccatcttgcataaaccacattgcatacacttgtctttatcaatctggggataaataaatccgttttgatcttctttcatttttatcgcttttttcgggcatatactataacacgcaccgcatccgcagcaatttttcttttcatgaaaaagctctatgttgttcatccggttcacttctcccctttctacttctcaatcaaaaatttctctgaataaaagctgttgctttcactctttcgcgttcaagcacatcattgacctttgtaaagtcaatcggctcgtatttcttcttatcattcattacacgatgttctgttcctgtcagttccagcacactctgcaatctggaattatatttgcctggataaaaaatgaaaaactctttattgaaattcaaagagaaagctgtacaatgaaacgaatctgtaatcacataatccgcatagttaatcagcgacaagaactgatttactgtcggtgtgtagatcattttcccttgttctttcaagtggttcagataataactcattctgacaatcttacaacctgttttttcagaaagttctttggcgaaccgttccatctctgaattaggatttaaacgatagatgatgatgtatttctcccgaatcattcgtggagcaatcatgtcactccactcctctttactcagcacaagcgtcgggtcaaggatgtgttcaacatttttatatccaagttcttccaaaagttctttagctctattttcacgcaccgaaattgcgctgtacttgtgtacataattactcatttcggcacgttcatcttccttaattgagttcataccaatgctgaccgcataaccaactcgtttttttccatcgggagcaaattccaaatagtatgctggaagaacgccaccattgtattcgctattccaagtctgatcgcttccagtgcaatacacatcggctaccggtggattcttttttaaatcatcatagtctttatatcttcttgtcagtgatacattttgtgctaaaaaattcacacagaccttatttctctttatattttctattttttttaatgcgacatacgctactgacttcaatacattttttccaaaatgcttgctcttaagcccatctttgagcatagcatcttcttccgcattcggtctaacatagtcaataatctcaaccttatgccccatcaactccagctttttttgtgtagcataggtctggagcacagagccataatttctaatataatgtaaagttattactgcaacctttgacatattttctccttattatccaaccagctttttcttcataaccttcatatacagtgctgggctaacaataaacagcaacatctgaactttctttactgcatgaagttctgatgtcataatttcccatatattattctttaaatctttcttcgcgagcttcacagcctctgaatccagttttcctgcacgaaccatcgcatttgcaatagaaagatcgccatttacgcatttatatcctatagctagttttttcatagaggcacagttctgtgcaacttcatccattatggaggtaatgttgctgttctgttccaaataccatgcgatgctgtgatcagcatgaaatgttgccgcaccctcacgttgcgcataatacgcatagagcgcatacggtacataaacaaccgttttgcttctaaataaagcgcgcatcaaaaattccaaatcctctgccattcttttactggtatcaaaacgcagattctggataagttcgctcctaaacagtttattccataccgttacctgaaccggacagctaaaatcagctatgagctcaaaggctttcttattgtcaaatctcagcacattgaagtcatcacccgaaaacctatgtacaagttgatcagtcgcaccatcagtaattgcaaattggcacatagccatctctgcatcagccaagactgcttgccgatacatatcttcaaacatcgtagcggcaacgtaatcatcactatctacaaatccaacgaattcacctgatgccacttcaagtccactatttcttgctgctgataccccggcattctttttgtggattacgataactcgcttatccttggcagcatactcatcacagattcttccacaattgtcaggtgatccgtcatccacgagtataatctcaatctctttaagtgtctgtcctagcacagaatccagacatctgttgaggaatttctccactttatatacagggatgataatagaaactttaggtttcatcgtaccccccccagtaattcttccttatgtttaataacagatcctgttggaacatccttataaattaagcagtttgcgccaattacacaattatcgcctatatgcactcctgcaaggattgttacattgctagctatccagcagttatttcctatagagacctccttgcttgtgaatccttgcgaatgaatcggaattccagcatccttctctctgtacttatggttatggtcataaatcttaacgccctcaccaaaaatgcaatcatttccaattttaatttcttttatcgacgtcgctgaaaaataattattcacaaaacaattatcaccaaattcaatacatcctgtaggttcaatatacagtttaaaattccctctgaatttaaaatgcttcccatatacaaatctatctctatatataaaacgataatatgcagttaccgctatccgtctggcatttattaaaactctatgaacaaaaaacatgatttttactcctcgctaagcattcgttcatagcactccatcagttttttaacatgatgttccgaagaatacttttctctattgaaatatttttcaatgttagactgtaacttaattacaagctcatcattttccatacgacagatagattcacaaagtgcttccacatttttcccagagtaaatcagtccgttatattcctgttcaatgtagtctctacctgctgaacaatctgatacaatacatggcaggcaatagcctcccattacctctggaatagtcaacggagcaccttcataccataccgatggaaaaaccaacgctcgcgcctgaaggatatactccttcatctctgtctgttgtttccagccaacaaattctatctttggatatttctttttcaaatcttccagtctgtcaccagagccaattactattccactcactccggcctttgtaattccctcacaaaagaaatcaatccctttttcatatgacaaacgaccaatatataaatactttttattattgctagcaggaactatcgtttgcaatttgacattgattggattcagaatcatcatttttttatagtgaaatggaattcttttttcagaaacattcttattaaattttgagataaatgcgatatacaattctgttccattcaccagcctaagcataccaatctggcggataattctgtacaatttatatatatagcttcttttgtcgcagttgcacaatacacaatcaaggctcattgcttttctttcacatatctccttcttttgaaagtcatagcaacaaccgtttggacattgcaaaaagtaatcgtgcattgtcacaagaaccttaaatcccatcctcttaatcggaataaagattgaagaactcaatacctttgaccaaccatgcatatggataaccgtatcatttggatcatactcttttagaagtttctctatctcctgccgtgcagaacgattgtaaagacctctaatgattccacgtaacctattactatcttttatcgcttcttcctggttcagacatataacgcgtacattgctatttttcagttcatcacatactggaccttttcctgtaaacatgacaacattgctgcccgtttctgcaagtgaaacagcacttgtaatagctaccctctcagcaccaccagttatatttgcaaaatcacaaacaacaataacatttttaatcttcatgtctacactcttcccacctgattattctatcaacagttcttcaaatttttttcttgcaacgtcccaagtgaaattacatttaataaagtcacttccatttttgccaattgataatctcttctcattatcggtcagcaaagtcgcaacactgtctgcaaatcttacattttcatcctcgaccatccaatctttaccattcacagcatttatattctctgcaccgatattagtcgttacaacaggaagtcccatcgccatcgcttcaagatttttcgtctttattccacttccaaatgtcattggacaaacaaaaactttacactgttccaagtagtctcgaacatcttccacacgtccagtaaaatgaacatgttccgattcaagtttacgcaattcctccgatgctccgccaccaataaccataaaaacagcattcggaacctttttcaaaacaattggaagaatttccgaaataaaatggtacgctgcattttcattatgagctacactcattgctcctaaaaatccaacaatattctttgttgcctttgattcacgataagagaaaaaatccacatcaacacctattggaacagcaacagccttgttttgttttaattcctgattaaattcacgaacttctttttctgcaacaaatatcgttttttcgcaaatctctccgatttctttttcatatttatccagcaaagcaatctcattcttcatcactgccaatttcaatggtttggccagcattattgctcgtaaaactttcggcacagtataaagaaatgccccatatggatttattccatcaatgtcattgtcaagctgtcttttgtagcgcaatgaaattctatcatccagatctgcaattctaaaagaatctatgtctcttatgtattcagtactgcgaaccatgtctccaattacgtattttggatgttctttttcagcaagttcatctaccatctttttggcttcaggactccagtacaatgctacctgcatcggtttttcatgcaagataatagaatcttttacaattcccaatatgcggctttttgcagacgcttttggtaggacgattaatttatcaataaattccggtttttgtgtaggatcatcaccgctctccaaaaatgcagcgacaaccactcgataacccaattcttctgataaaattctgcaataatgatataaagatgtctttctgccagaagatgccggaaatggaagtcttggcattacaaataatattgttttttctttactcatccttaatttctccaaaaaattcattctccagcatcagacacaggcaatggtaaaccggaagatgcatttcctgaatcatatatgtctcagtctgtggaactttgatacacacatcactcatttgtgcaagtttactgtctttttctccagtcaggccaagcaccttcattcctttggcatgagcagtcgtcgccgcatacaaaacatttttactgtttccacttgtcgaaatgccaagaaacacatccccagtcttgccatagccatttacctgctgtgcaaaacacagaagcggttcgcaatcattcatatacgcagtagataatgccggatgtccatccagtgcaatagcaggaagcgcaccttgcaggttttctgcaagagcagttccaagctccttattttccttaacaagtttatctgcgaaatctgcgtctggttttcgagggagtttgaagcctttcattaattcaccaacaatgtgttccgcatctgcagctgatccaccattgccagcaatcagtaactttccaccgcaactatagcagtctctaagaactttatatgccttcaaaatatcatcttttgccactaaaagttcaggatatctttttacaagtatctcaatctcattcattcgatttctccttaattattctggaaggattccatgcaacaacgacgtttggaggaacatcatgtgtcactacggcgttagcaccaataaccgcatcgtcaccaattgtcacattgcctaatacacatgcacctgctcctatcatcacatgatttccaactacaggtgcacctccctcattaattcctcctgaccatttgctgcctaatgttacatgttgaaaaatggtacatttttcgccaattatgcatttagggtgtacaacacacccaattcctctatggtaaaaataggttccttcacctattgaagcctttgcgctaattgaatttgcaaagagtatgtgctctaaaatatctaagaatcttcctatcttctgtagcccccccatctcgattaatgagagcatgtgcccacttccacaatatgttcatttctctcctcacttcatacctgaatttacaaatgaagatagcgatttaactgtaaccatctgaccgtagttttcatcaacttcgctcaaaagcacagtcttgcatccagcattgataccagctttaacatcgttttctccatcgccaatcatccacgactgtgacaaatcaatgttaaaatcttctgctgctttcaacagcattcctggcttcggtttacgacagtcacattcgatcttcagttccggacgctcaccttcatatcccttatgagggtgatgcgggcaataataaatggcatccaaatatgcaccttcttttccaaggagtgtttccattttattgtggatttcttccagttcttggaatgtcacctctccccttgcaattacaggttgatttgtaactacaattgcaagataaccagatgcattaatcttcttaatcgcctctgatacaccatcaattaattcaaagtcgtcaatatttctaagaaatccaacatatttattgatagtaccgtctcggtcaaggaatatggctttctgcttgttagaaaggttcttagccgatactcttccggctttgaaatcttcttctacctgatggaaacgagcaggcgtccccatatcttttacatattcaggagaatcatagcagaacatcttaccagatcccgccaacggcttcaggagctggcgatctaaatcaacttttacagtcttccctgtcgtctcgtccacagtgccaattttgtctgcatcaattgacaccatatcaagggttttaggatcaatcacatgcaaacccgcattgactctatttttataatatatcggacgtacatcttcttttgccagccaagattgaaccgacatattcttttccgcaatgatgagaccgctatcgtaaggatggttattaggatgagtgaacagcgtcactaatccaccatgttcctgatggaacctaaccatgcggttaaaatcaacatcaaaaacagcatctgcgttcaaaagaagaaatggttcatctccaagttgctctcgtagtttgaaaagagctcctgcgtttccgagtggtgtaacttcattgtagtactgaattgacaccccaagtttagagccattcccaaaatagttcatgattttgtctcccatataggaaactgtcatgataaaatctttaaagccctgattccttaacgaaacgagttcgcgttcgagaactggaacaccctcgattggaatcaaaggtttaggaatatctggaaacaattcagatattcgagtacctcgccctccggccataatcactactttcatgtttttaatccttcggtgtatagtcttccggtgtataatggattacacgcgttccaccatcttcaaatttgaacggaatatagagtaggtcgcgcatcgcccaacgaacagcatcctgtcgttccggctgtacatagaatacaagaaatccaccaccgccggcaccaaggagttttcctcccaaagcaccagcagccattccttttgcataaagttcatcaatgctatttgtggacaccgcagatcctgtctgacgtttcaacttccacgtgtgatccaacaacctaccgaaatcatcaagattcttttccttatcagtcagaactctctctgcatcatcaactaaagacagcatttcttttaactgtgctgttttatcagccttacctgaagcatttgctttctgaacgtcagaagaaaagcgagtaaagccagtaaagaacatcattaaattctgattaagttgcttctttctctctggtgaaataataaccggcaagacttcatatccatccgcactaaagttaatacggttgaatccaccaaatgatgctgcaatctgatcctgccagccgcctgcttcctgacacagatttcgttccagataaattgcctcgtctgctagtttcttcttatcagcatattttccttttagcgcataaaaggcattcagcattcctactgcaaaagaacttgatgttcctaacccggaacgtgccgggagatcagcttcatatgtaagacgaatttcgtgcatatccagcatcttcatcgcattacgaattgctggatgctgaatgtcatcgatatttgtcacacgctcagtctttgagtaagacagctcagtagaataatcaaagaaacgtggcagatgacgcacattcacatagcaatacttgtcaaatgtggttgacagaactgctccaccgtgctctctaaaaaaaccttccatatctgttccgccaccaaaaaaggacatacggaaaggtgtttgcgtaataatcatttgtttactcctctatcccttgtaggactcatgccttatttttgtatctatgtacacatccatatggatggtatttctctctagtttccgctgtgtgataaccacactcggctaagtgttttcttatactgtcgtatccaactaccccagcaatcatatttcccttgttttttacttcataaaatatccgttgagtacactcgtctctatttctctatagccgaagtgttgatttatacagtcgaaccccgtataccctacaatgacgttttttctaagtgttggattattgaatcgaaccctgtcggtgcatgagttttgttaaaaccgtatatatcacctagccaatttctcgccattcattgttcactatgaacaaatcattcactctcaccgcacaaaacatgtaattatcatcaccattcatgctctactcaacagctgttttttgaagtagaaatcatctgtttttctctatttttcatgactcaacaaaccgttatgatgttggtgtcattagcgggttagatagtgtactcaacagcagtttcagacgttaatgataaactcatggatttttgttgttttcacccgtttttcgccatttcctcataacttctgaaaaagatgtgccaattttgtgtcgcaggggtcaaaagttcagcgttttgtatatatttttcgtgttttcagttcatgtagctgtgaaatataaccaattttagcgccccatatagtgtgcaaaacaggttcttttcgacgatgctacgtcaatacggtttgttgagtagacatttacatgaactgaaacaagcccacggctcgttgctcaacagcaactgacacccgtgggctcaaattgttcttcaagtgctttttgctcgttttccagggcgcaacatagtatgtgagcgcgcggataccttcacaatcctctttctgatacttcaacaaatgagatacttgaaggacaattcaagcctctaaaaagtatcatccattttgagaatggatgatacccatttccacagaagcccatatataatatgtataaacataataccacacaatgcgacacatttcaacagaacgagttatatcaaaccgtacccgaacacatttttgtcactttcaccatattgggcacattttttcctatagaatagctgaaacatataaaagcaatgttacatcattacaaattgaacaaggaggagcattatggcaaagcgtggagaaaacatcagaaagagaaaagatggtcgttgggagggtcgctatattaagggacgaaagtctgatcgaaccgcaatctgggggtacatttatggacattcatacactgaggtcaaggaaaaactcgccatcaaaaaaatggaggtgcaacaatttgcactaaatgtcgaaaatccaactttttcagagctttctctaacctgggaaagctccatttttttaggtgtcaaatcttctacagcagcacactatcactacacgctccaacactacattttgcctgtgcttggtccatatcgtgttcaagctttgaatgaaagcattctagagaacagccttctggaaattattgctcctgtagaccaaaaccacaagaccctgggcaacgcaataagcaaggagtgcttgacacttgtacggagaatttgccgctatgcggtacatctacatattatgcgctccgttgaaattgatctcaaacttccaactgtgaatgcatccaacacttcagttctaaataatatggaacaaaaatctgtttgtgcttatgttcgctcttcgccaacacccaggaggcttggtatgctactgatgatgcagatgggtctgcgtatcggagaagtgtgcgggctgcaatggggtgatttcgacctgcaaaatggggttctctctgttcggcgcacggtcaagagaatttatatggcacccggaaaaaccaccttggtaacacaatcccccaaaacgcaaagttcggagcgcgatattcctatcccaacaggtattctcaaccttctaaacgaagaatatgtcgggcagagtaacgatgtctggtttctatcaggcaccgaccttaggccagttgaaccgcgctgctattacaagagcttacaaggatacttaaagcaggctcaagttcctgttgtccgcccacatgcgctgcggcatacatttgcaacaacctgtctgcaagcgggctgcaatgtgaaaacgctgagtgaattaatggggcattcaaatcctgatataacgttaaaacgctatgcacactcctgctgggaatggaaacaaaatgaaatgaatcggatttacgggtgaggggtcaaagggggagtcagctttatataaatttacatagtatcgatgcttaaaatcaacagccttccattctcaaaatggatgatactttttagaggcttgaattgtccttcaagtatctcatttgttgaagcgtccgaaagtggaattgtgaagggtatcagtggtgcttgctatacacgtgtggcactctgtaaaaacgaatggaaaacacttgaagaataatttgagcccacgggtgagttgctgttgagcaataagccgtgggcttgtttcagttcatacaaatgtctggtcaataaaatcagttgcgttctgatggcctatggtggagcgtaaaacacatgcgaaaatgggcgattttgcatgaatatacgtccctattttactcggaaaatcatgtattgtgcaggttgtctagtctgcaatgtgcatttatacagcacggtgttgggtaacggtaaaaaaatactattttcttattgtgtagacatcataatagatgaacatttcattgtataagttgcaacaacgatgatagaaacatataaacgcttgctgtataaaatgacggatgagctagatttcaataaagtgtccatgtaaaaacaggtctattcaacaacttaacacttaggtgtagtggtagatgccccggcgtataaatatgcgccgagaaaatgagggataagagcgattaaaggataattgccgcactgatgggctgcgacagcataagaaaacacttagccgactgtgattatcacacaggagctttatgaaaaagaaatactatcctgaaacacaggatgtgtacatagatataaaatttacctttcaaggggatgggtccgaagaggaccggaggagtaagaattatgagctacagagaaagatacgagcagtggctgaacgatgattttttcgatgaagctacttgtagagagctgaagtcccttacggacgaaaaggaaattgaagatagattttatcgcgatctggaattcggtactggcggtctgcgtggtgtgatgggtgcaggcacgaaccgtatgaataagtatacggttggcaaggcgactgcgggtcttggaaaatatcttttagatacttacggtgctgaggagtgtaagaatcgtggtgtggtaattggttatgatactcgaaataatagtgagttcttttctagaatggcagcaaatgttctgagcggaatgggaattcgtgtttatctccatgcccacgcacgtcctacgcctcagctgagtttttctgtgaagttctggaatgcactggcaggtgttgtagtgacagccagccacaacccgaaagaatacaacggttacaaagtttatgacgagtttggatgccagcttgttccttggcaggcaaaacaagttataggctatgtggacgctattacagattaccatacgatcaacttcaggtccgatgattctctggttttcatggccgatgtcaccgataactttgtaatggcagttatgaagcagagccgttataagaataccgctgctaagaatgatttgaaaattgtatacactccgctgcatggtactggcaatgttccagttcagaaagcacttcgtttggacgatttcacacagctggatgcagtggcagagcaggtcgtgccggatggcagcttcccgaccgtagtttctccgaacccggaagaccgtcgtgcactggaaatgggtattgctcaggcaaagcgtaccaatgcagacattgtactgggaactgatcctgatagtgatcgtgtaggtattgccgtgaaggaagctgagggcgaataccagctgatgactggtaatcaggttggcgctcttctcatgaatttcgtattgagccatacagatatggcacagtatgctcatccggcggtagttaaaacagtcgttacttccgagcttggtgcagatattgctcggaagcatggaatcaaagttttctctacgttgactggattcaaatttattggtgagaagattactcagtttgagcaggcaaagaagaacggtaagaaagaacaggattacgatttcctctttggttatgaagaatcctatggttatcttgccggaacacatgctcgtgataaagatgccgttgtaagctctcagctgatttgtgaaatggcagcagaagcaaaagcaaatggtaagactctgctggatgagatgaatgaaatctatgcggagtatggttactatcgtgatgcactggatagtttcaccttaaagggcaaggacggtctggaaaagatttcttccatgatgacggaactgcgagaggccggttctccgtttgcaggcactctgtctgtgacagattacagtaagcctgtagatgcagaagaaggtttcggaacgctgccgacatctaatgttttgagatatgtcttggaagatggttcctggattgcagtgcgtccgtccggtacagagccgaagatcaagatttactacagtatcaagggtgcagataaagatgtaactgaaaagaaactggaagagattcagaatacaattcagacgaaacttgggctgaaataagagaggagaaaaaattatgaatattattttactttctggtggttcaggtaagcgtctttggcccctttccaacgatgtacgtagcaagcagtttatcaaactgctcaagaataatgacgagtatgagtctatggtgcagcgtgtgtatcgccagatcaccactgtggatgctgatgcaaagattaccattgcaacgagtaaatctcaggcaagtgccatcaagaatcagctgggggaaaaggcttctatttgtgtggagccctgccgccgcgatacgttccctgctatcgcactggctgcagcatatctgcacgatgaactgggcgtgacagagcatgaagctgttgttgtctgcccggtcgacccgtatgtggataatacctattacgaagctgttaagactctgcaggagctggcagagcagggtggagcaaatttgactctgatgggcattgagccgacttatcccagcgagaagtacggttacattattcctgaaagcggcgaaaacgtcagcaaggttaaggaattcaaggaaaagccggatgtggaaacggccaaaaagtatctggcccagagcgcactgtggaatgctggcatctttgcattcaaactgggctatctgctggataaagcacacagcatgatcgactttgaggattaccgtgacctgttcaacaagtacgatactctgactaagatcagctttgactatgctgtagttgagaaagagtccagcattcaggttctgcgttacagcggagactggaaggatgtcggtacctggaatatgatggccgaggtcatggcagataaaactaagggcaaagccattctggatgaaacctgcgaaaacaccaatgtggtgaatgaactgaatatcccgattctttgcatgggctgcaaggatatgatcgttgcggctagcggcgatggtatcctgatcgctgataaagaacgtagtggttatatgaagccctatgtggaaaaaatcgagacagaagcgatgtatgctgagaaatcttggggtacttatacagtaatcgatgttcagcctggttctatgacagtcaaggtttccatgagagctggcgaacacatgacatatcacatgcacaattaccgtgaggaagtgtggactgtcgtttccggtaagggtaaggcaatcgtggacggtatggagcaggtgctccgcactggtgatgtaattacaattgcagcaggctgcaagcatacggtagaggctattacagcactggatatgatcgaagttcagctgggtgaagaaatcagcgtttccgataaggttaagttcccgatggcataaaaatagtgggagataaaacaatggaaatcatgaaattgactccgactggcaaggactatctgtggggcggcacccgactccggaaagaatacgggaaaaagatcgatttgaacccgttagcggaaacatgggaatgttctgtacacccggatggtcctagctatgtggcgaatggaatctataagggacaaacgctggcagaggtgctgagtgctcacccagagtatcttggcacgaaggtggaaaacggaaaactgcctgtattggtgaaattcatcgatgccaagaaagacctgtctgttcaggttcatccgaatgatgaatatgcaagagcacacgaaggcgacaacggcaagacagagatgtggtatgtcattgatgctgacgaaggagccagcttgatttatggtttccagcacgaggtaacggaagaaatcctccggaaagcgatcgagactggaacactgggcaagcatctgcaaaaggttccagttcacaaaggcaatacctactttgttccggcgggcacagtacacggcattggcaaggggacccttgtggcagagattcaggaaagctccaatgtgacttaccgcgtctacgactatgaccgtgtggataagaacgaaaaaaaacgtgagttgcactttgacaaagctgtgcaggtcatgaatatgaaggttgcaccggatgtgagccagaaacctagaattgtgaaatactactctggctgctctcgtgagttactttgccgctgcaagtactttgaaacggagcggattcaggtcacgaaaggttttgccttttctgtgatggaaacttcgtttcaggtgttgatgtgcttgaatggttacggtgaagtgcagacgatggacgcagagcagaaaccgatgcgattcagcaaaggtgaaactctgtttttaccggcagaattgggcagatgtctggttgttggtgatacagagctaattaaggttcggtgctaaatcagcggaaaatgggggttcgtaaatggcaagaatgaaatttatgaatacagaaatcgataatctgacaatgcaggaaacactgcaggcaatcgatcaactgattcgagaaaataaaagtgcttatgtggtcacgcctaatgtagaccatattgtacaacttgagacaaataaagaactgcaggcagtttacaagaatgcgtctttgattttgacagatggaaagccgcttctatggattgccaattggtatggtacgccaattaaagagaagatatctggatcggatttgtttccgcttctctgcaaaatggccgctgaaaaaggatacaaaatgttcttcttaggtgcggcagagggtgttgcagcaaaagctgctgaaaatcttatgaatagatttaagggtctacaggtcactggtacatattctcctccattcggctttgaaaaagaccccgtggaaatggataagataaaatcgatgattaaggcatctggagcggacattctgattgttggcttggggtgcccgaagcaggaaaagtttatgtatcaccattgtgcagagcttggagttcccatttcttttggactgggggctagctttgattttgaggcgggtaatatcaaaagagcaccacgctggatggcaaaccatggcttggagtggctctttagaattacacaagatccaaagagaatggcaaaacgatatttggtagatgatcgtaaaatttttggtcttgcaattaagtataggaggagataaggaatggggaagcttggagaagctttgaaatcatcagcagtgaatagtgcaaacctcatcacattaaatgataaagacttaaaacggatgcaggacaatttgtacgcaatattaatagacattaaagacgtgtgtaaaaaagagaatatcaagtgggggttgattgcgggaagccttttgggggctgttcgatacaatgattttataccgtgggacgatgatatagatatttacatgttacgaagtgaatatgagaggtttaagagtatttttaataaagaacttggggataaatatgttttgaagcagccaggtgaccccaattatatcttccattttcctcagattcaaaaaaaaggaacaagccttcagttgcttgaatcccctcaaaatgatgattcgggtctgtttattgatttgtttatatatgataatgtttgcgataatatacttgctaaaactttgcatgggttggagtgcaccatacttctttttatcgatagtgccttaagaatgaaagaatgttcgtacaatatatttaaatattgttcaagtgatgaggtggttcatctagtaaatgcccgtgcattttgggcagttttttttgaatataaatcctttgagagttggcttaaattatctgataatgtatttggaaaagttaagaaagaagggaagctattagtaaacccaagtggagcaaaacacttttttggtgaaatgtatcatacagatcaaatgaaagatattacgtggattcaatttcgagatacgaaacttccagttccaaaaggctataagtattaccttcgagagagatacggtgaaaactatatgattccaccagatgtgaatgcacgtgaagcacataaatacatcaaagttgaaatctaacataagtggtttggaagggtaacagtgtaatgcgtcaaagaatggtatatctgtttactgcagttaattggtatcgactcgagctatttaagaatcttgctatgatggtagatttaaaggtatatattttaaatggctataaagttggatatgatggaataaattatcttcctaatttagaaaatcttaatattcaaattttagatgaaaaacaaagtcaatttaacgagcttgtaaaaataatagacaaggaagaatttgacacaattgtcgttccttccatgaattccatgcattttattcggcttaccacaatgctatgccattattatcgtcaaaaagggaaaaaagtactatatttttgggaatattggccaatggagaaggaacgttcttctctttcaaagaaagtcaaacaatcggttagacactgggcagtccgaattaacaaaagctatattgacaagtttattgttccaagtatttacactttttctttttatagaaagcttggaatttcggcaagcaagtgtgttcgatgtttcaattcaagtgaagtagagcaaaagcattacacgagagatgaggtaagaaatttatatggcataagaaatgaagacaaagttattttgtattttggtcgattagaaaagtataagggtattgatgaattagttcgagcttttgaaaagttgaacttagaaaattgccatctattaatttgtggccccggaaaactagacacaaaaatcgcatccagcagaatccatattgcgggaagcatccctccaaacgaaagaggaaaatattacgcagctgcggatttgtttgttttgcccaacacatataaaaataaagtagaaccatgggggctaacagttaatgaagctatggcttttgctttgcccattttggtgaccgatgcgacaggaagcgggttggatttggtcttcaacggcgttaatggattcgtaatggattctaataatattgaagaggaactccaaaagtatttacggttgattatgaatgatgatatctttcgaaatagtctttctgaaaattcaaaaaagattatttcgaattatacatttagcaatatggcaaaagcatttcgatgggcataaaggcataggactgtgagatgcaaaggagacctatatgagaaaaattttattgtttgatacagcaattgatacaggaaatttaggagatgaaataatactagaaagcgttaaaaaagaattatcaacgattcttgatagtgcgtctgtgtatcgcatgggaacacatattgaaaactattctccgattcaaatgattgctcataagttcataaagcccgatacaaaaattagggacattaatgaaactgtagactacaagtttatagggggaacgaatctcttcctcgacaatttgcatggaattcgtccacaatttatgctaaatctttttaatatgagcttgtataaaaatgcggtttttgttggagtgggtagaggaagtgattttgaaacggttaaagatgcgtatacgcgttatttgtacacgcattcactttcgagaaatattacacacagtgtcagagatgaggaaacgaaaaaagcattggaagatatgggctttaaagcaattaatacaggttgtcccacgctttggcgttttacggaagagttctgcaaatcgattccaaaagtgaaagcaaaaaatgttgtatgctctgtaagtggtcatataccacaaagagatataaaaaaggataaacagatgattgaatgtctcaaaagtaactatgataaaatatatgtttggattcagaccgcgattgatgaggaatattttaagacattaacaaatcaagataactatcaatataaatccatatattcgttgaatgagtttaaacgagttttgaagaacggtgatgttgattatatcggaacgagactacatggaggaatatacgctttgcaaaacagagtccgttcaattattattgcaattgacgagagggcaaatggtttctatgaaagcaataatataccaattctgcaacgtaaaaatatggactgtttagatgctataattaatggggaaattatcacagatattcatcttaacaaagaaagcataagatattttctaaatcaatttaattaaattatgtaatgtacatatttaaatactggtaaaatctattgtatggaggtt

SEQ ID NO: 824 - DNA, 7332 bp, unidentified
  source 1..7332: mol_type = unassigned DNA
gccacgatatgctcatcgttgccacccgcaacggtcaggccatccgcttcaacgaagccgatgcacgtcccatgggccgcagcggccacggcgtgcgcgccatccgtctggccgagggcgatgaagttgtgggcgtgtgcatctgccgcgagggcggcacggtgctcaccgtcaccgagaacggcaagggccgccgctccgacatcgacacctaccgcatcaccgcacgcggcggcaagggcatccggaactacgacgcctccaaggacaaggtggcagcggtcaagatcgtggatgacatcgacgatgtgctgctgagcagtcaggagggcatcatcatccgcctgcacgccaacgagatcccgctgcagagccgctacggctccggcgtgcgggtgatgcgcttgggtgagaacgataaggtgatggtacttgcccgcaccgaccacgacgacgaggcccagaccgagcagatcgacacctccgatgctgatgcagagccgactgccgagcagcttgccgccatggaagccgcggatgctgccgccgctgcagaagccccggaagcagacgataagggcgaagagtaaaccttgaaaacacaataagatttgaaagaagccgccgcacagagatttctgcacggcggcttcttttcaaatccatccaaaccatgtataatagaaatagcgtgtgaggaataaaaataaacacagaaagtggtttaaggaacatgacagagcaaaaaaaatccccggagatcagcatcatcgtgccggtgtataaggtggaaaaatacctgaacgaatgcattgattccattctggcacagacctttacggattttgagctgatcctggtggacgatggctccccggacaactgccctgccctgtgtgatgctgcggcagaaaaagacagccgcgtgcgggtgatccataaaatcaacggcggtgtaagcacagctcgcaatgcgggtttggcagctgcacagggaaattggatcggctttgtggacccggatgactttgtagacaagacttactacgaaaaaatgctgcgggcagcaaagcaggcaggtgctgaacttgcagtctgcaacgaagtttttatggaagaggatggaagtctttgtgattatcaggaacagcctttacgtacagaagtgctttcccgtgaggaagcaatacaccgcatccgccttacgccgttgattcaggcagcaacaagactgcatcggagagatgtgctggaaggaatcgtttttcctgtgggcaaaaactatgaagatgcatttaccacaccggaaatcattgaacatgcaacagctgtggcttgtataaaggaaaaactgtaccattaccggctgcatccggcaagcattatgcatggaaaggtcaccttgaaaaatctggatgagatcgatgcaaactacggccttcttgcttgtgcactcaagtatggaaaaaaagacacagcattcctgcagtatgtactgatgaaacgcatgctccgaaacacaaaaaaaaatctgccacccaaacagagaaacagcgaacgggttcagcaggcggaagcgtgcttgaaaaaagcaggcagagaggttcgtcaacagggggcctgtaccctgcgcaacgcagcagaaaccgcactctgcattgcaaacccgcagttctacttcaacttcaagtaccggaaataaaactgaattccgaatgggagaaatactgtgagtgaaagaacagaaagtggaaaaccggagatcagcatcatcgtgccagtgtatcaggtggaaaaatatctgaatgagtgtattgattccatcctcgctcagacctttacagattttgaactgatccttgtggacgatggctcaccggacaactgccctgccctgtgcgatgcagcagcaaaaagggacagccgcgtgcgggtgatccacaagcaaaacggcggtgtaagcacagcccgcaatgcgggtctggatgcagcacagggaaattggatcgcatttgtggattcggatgatacagcagcaccagaatatctggaaaaaatgcataaggcagtgttggaaacgggtgcagattttgcaatctgcagcagtcagtgcattgatgaaacgggcaaaacacttgcaggcggagaacatcgccttttgaacgagtttttgccgcaggaggaagttctgcgccggatggtggtgtcggattttcaggttccgtggaataagctttatcgccgaaaactgctggaaaatctgcgctatccagaaaacaaggcgtttgaagatacctgtctcatgccggtcatttacgcaagagcggcttctgcctgcggtgtatgggattttttatacaattaccgcatcgttaccggcagtgccatgcaccgcaagactaccttgaaaacactggactgggtggaagcatggtaccgcctgtttgatgtgctgtaccaaaacggcatccgggatgctttgtgtgcagcctatcgcccgattttgactgccgtgtgggacatctggctgcacctgacaccggaagagcgcaaaagcccccggatgaaggaagcctttgcgtatgagcgtacagcccgccatcggctgatgcaagcccgcggcgtaacactaaaaaatttgtgggcggcagtggtctgcgctgcatcggcctgcagttatctggatctatgccgcaaaagggcggaaagacggcagaaaacgacctgaagcaatgaggagtttattgtgcaggaacaacataaaaaacagccggagatcagcatcatcgtgccggtatataagacagagcgttttctgagcgcctgcatctcttccatccttgcccagaccttcacggattttgagctgatcctggtggacgatggctctccggacagctgccctgctttgtgcgatgccgcagcggcaaaggacagccgcatccgggtcatccaccagaagaatcgtggcctgagcggagcacgcaatgccgggctggacgcggcagagggcgaatggatcgcctttgtggattcagacgacaccatcacgccggacttctgcgcaaagctttaccatgcggcgcaggaggccggtgcacagatggccgtgtgcaattaccggcaggtggacgaagccctgacccccatccgggagcagtatctgcatgtgcggcgggaggtgctgaccccggagcaggcgttggagcacagcacccttctgccctacatggtggtgtggaacaagctgtaccaccgcagcatttttgcgcagctgcgctttgcagagggcaagctgaacgaggacaccctgctgatcgcctacgcctacgaaaaagcggacagaatcgctaatatcccggatgcgctgtacctttaccgcaaggtggcgggcagcatcgtcaacagcaaagtcaccctgcgcaatctcgaccgtgtggaagcaaactataccgtgttcgagtgcgtccgccgccatggcatcacgggttcgctgtgtgagctgtactgggcactgctgcactccctgatcgatgtgggaatgcacctgaccgccgaagagcgccggagtgcccggatgcagcaggcgcgggagtacgagcgctgcgcccgccgggccttgcgtcaggaacatgctgttaccctgagggcactgggcaacaccctgtgttttattatttcacaggactggtattttgcccgccgatggaaaaataccgtgtaaccgcgcaggtttgtctggacttccctgcaaagatatgctacaatggcaaaacaatcacaaatacccgtgggggagtagcaggcgcttttgcagggcgcagcaagtcaacatgatgaccgttggttccggtctggcttgctttcatttgcgagactcatgtgtttttggcgcatagaacagcgcccgtgcacatggagttggtttcaaaaaaatcacccggtcccggacgtacatgtgcgcccgtgaccgggttttgtattgcccgatattctggtcagattcaggaggcagacaatatggaatggagttttgtatttttcctcaacagtgccctgctgggcgtgggccttgcaatggatgcgttctcggtgtccatggcaaacggcctgcacgacccccgcatgagcaggggaaccatgtgcaggatcgcgggcacctttgccctttttcaggccgtgatgcccatgacgggctgggtgtgcgtgcacaccattgtggagctgttctcttcgtttgaaaagttcatcccgtggatcgcgctggctctgctgggctacatcggcggcaagatgctggtggatggcatcaagggcgaagaggccgaagaagcagcagagctgagtgcgggtgcactgctcatgcagggcatcgccaccagcatcgatgcgctttcggtgggcttcaccatttcggaatacggctggctgatggcacttgcggcatcgctcatcattgcggtggtcaccttctttatctgcatggcgggcctgcgcatcggcaaaaagtttggcaccaagctctccggcaaggcatccattctgggcggcatcatcctcattggcattggtctggaaatttttatttccggggtgttctgaaattcagacagcataaaacaaaagggcacggcgctgcaatgcgctgtgccctttcgtttcataaaatgttccacatagaacaattacttttccggctcaaaataatcggcatattcctcggtcagcttggagccaagccgccggatgccgccgtacaggtgccgttccaccaacggctcaaaggcagcaaggtcgcaccgctcgatggcgttcatcaggttgcggtggtctgcgatcacctcggcaaggccgccggtggtcatggtgtccagcatccggaagcggctgtagtcggcgtgggcgttctgcagggtgctccacaggtacattttatccatggccgcaaaccatgtcccgtgcagggcacggtcggcctcgtacagcttgttgtaatccgggctctccatggccgcaagggcctcgtaggcttccacccgcctgcggatcaacgcccgctgctccggggtgcaccggggcgaaaaatcccgcaatacgcgggcttccacggcggtgcgctcgtagatcagctcgtccacgatgcggcggttcagccgggtaacggtggtgcccttgtaaggcacgatctttaccagcccgttttcctgcagcttctgcagcaccacccggatcagggtgcgcggtgcgccaaagcgggcacagagcggattttcgctcagcgaagagccggggcggatggtcaggtcaatgatttcccgctccagcacagcatagatctcagcatcagttttgtattgttccatacctctcacctaatgaaaatgcattattcttcaaacggtttccagaacgcaccctccggcagcggcagcgtgaatgccatgggctttccggtctccgggtgcaaaaactgcaggccgcagctctgcagggcaatgctgccttttacgcggcttccgtatttgccgtctccggtcagcggatgcttccgggatgcaaactgcacccggatctgatgggtgcggccggtgtgcagcgtgatctcagcaaggctcatctctcctgtcgttttcacgatgcggtattccagcacggcttcccgcacgcccttgcgggggcggctgaccgggaacacccggccccggcggctgtccttgaacagccagtcccgcagggtgccttcgacgggcagtgcttcgtccggcccgcctgcaatgacggcccgatatcgcttgatgaactgcggcacttccggctccccttcggccctgccatcctgcacagcgtaggcgttctggctctgggtgatctgacggctgagtgcggccgcagccccgggcgttctggcaaacaccatcaggccggaaacgccggtgtccagccggtgcaccacccctacaaaggcatccggctggccccacagctgccgcagggctgcgggcacgccctcttcgctggaaagtccggcgggcttgtccagcaccacaagggcggcatcttcgtacaggatgttcacagcctgccctcggcgatcagggccttgagcttcaggataccggcaatggtcttgccgtcccggatctcgccgctcatgaccatctcataggctttatccagcggcacacggtcaggggtcaggaattcatcggcatccaaatgcatctgggtcttgtgcaggccggtggcgacccatgtatagatcacttcggtgtcatagcccacggtggggaaaaactggcccagagagatataattgtccgcggtcaggccgcactcctcgcccagctcccgcttggcggcttcaaaggggtcctcacccttttccagcttgccggcaggcagctcccacagctcctgctgcatggcgtagcggaactggcgcaccatgcagatggtgccgtcctcaaaatagggcaggatgcacgcaccgccgtggtgatgcaccacttcgcgttcggcggtcttgccgttttccagcagagcagtgtcttttgtcagggtgatcacccggccctcgaagagcacctcactggtgagtgttttttcgtaatgcacggtcttctccattttattaccctctttgcccggcacagcgccggttttctatggcttcagtttacggcaaaatgaggtttgttgtcaataaagagatgataaatataagaggatgggacgatttgaaatgcgcgccgcgtttgctttgcgcataatcagcggaaaaaatatttataatttcgcaattctggaaaatctgcggagcttgtcggggcaaagcccctccatctgctaacgcagaccgctctgccgcttgaaagccctactggggctttcattgctacacaaacgcggattttccagaattgccttttcacgggaggggtcgtaacggaaagcagcatttgcagcgccgctttctgcgaaagcgcggcgctgcgggaaacgaatcctctcaggctcactgcgttcgccagccgtgcctgagagggtccattcccctttttgcgaaaaaaattacaggatctggcaaagcaggcaggccaaaaccggaaaatccgcgccagtgctcactttaacgaactaaagacgtacaaaagcgctaaaaaaatttctttatttttggtgcgtttgttgagcggtttgcgtttactttatgggcggaatttgctattatagtatacaagcaatagtgcctttatggggttctccggtcccatgtggggcatattgccccgcgcaaaaggtaccaaattctgaataatggaggaagaaaaa

SEQ ID NO: 825 - DNA, 7375 bp, unidentified
  source 1..7375: mol_type = unassigned DNA
ttatttctcgtcgttcttccggatttccacacggcgtatcttaccgctgatggtcttgggaagttcgtcaacgaactctatgacacgggggtatttgtaaggagcggtcactttctttacgtggttctgcaactccttgaccagttcctcgccggcgcggttcttatagtctttggacagtacgatggtggctttcaccacttgtccccgtatttcatcgggaactccggtgatggcacattctataactgcgggatgcgtcatcagggcgctttccacttcgaacgggccgatgcggtaaccgctgctcttgataacgtcgtcggcgcggcctacaaaccagaggtagccgtcctcgtccttccaggcaacgtcgccggtgtaatagatgttgtcgtgccatgcttcgcgggtgcggttggcgtcgcggtaatattccttgaacagaccgagcggcttgcctttgtcggtacggattacaatctgtccttgttcaccggcctctaccgaacggccgtcatggtctatcaggtctacgtcgtattggggattgggcaatcccatgctgcccggcttgggttgcatccacggcatggtggctacggtaagggtggtttcggtctgtccgaaaccttccatgaggctgatgcctgtcagtttcttgaatgtatcgaatacggcggggttcaacgcttctccggcaatggtgcaatactgcaatgaagagaggtcgtacttcgtcaggtcttcgtgaatcaggaaccggaagatggtaggcggtgcacaaagcgaggtgacgtgatagtcctgtatctttgtcagaatatcggcaggagtgaatttctcgtggtcgtatacaaagatgttggctccggctatccattgtccgtacagtttgccccatacggctttaccccagcccgtatcggcaatggtgaggtgcaggctgttttcgtgcaggttgtgccagaaacttccggtaacgatgtgccccaacggatacgtgaagtcgtgcgccaccattttgggttcgccggtagtgccgctggtgaagtacatcaaagaaatatcgtcgttgctgttgggatgctccggtcgtgcgaaaggggcggcatcggcaatgcctttgtggaagtcctcaaaaccttcggctatctccgggcctacgctgaccagcttcttcacactcggagagtcgggcatggcagccgtgatgtggtcggtaatgacgctttcgccggcacagacaatcatcttgatgtctgcggcattgcagcggtatacaatatctttcttggtaagcaggtgtgtggcggggataacgacggctcccagcttatgcagtgcgatgatgctgaaccagaactcatagcggcgtttcagaatgagcattaccatatcgccgtggccgatgccgaggctctggaaataggaagccgtcatgtccgtatagcgtttcatgtcggcaaatgagaactggatgtgctcgcccttgtcattggtccagagcagtgcgggcttgtcgggatgttcggccgcccaggcatccactacgtcataaccgaaattgaaattctccggtacgttaatctttaaattcttgatgaagtcctcttgagatgtaaaggacgtttgcgataaaaatctttctaccataacttttggaatttcttcattcaccgttcttcatttatgtgttgttacatgattacagcaaggaaacgtactttctttccgtccagcgctttcatgccgtgaggcagtttggagttgaaatacaaactgtctccttcgtttaaaatcaagtctttgccgtcgatgctcagcatcatgcggccttccagtacaaggttgaattcctgtccggagtgactgttgtagtgtatcggctcgttatccggcttgggttcgacggtgacgatgaacgggtcggcgttgcggttcatgaagccggcagccagtgactggtatttataggcttttgtacgctcgatgctggttcccttgccggcacgggtaaggaagtagctgctcatcttcggctcttcaccgaacatcagggcatccagtgcgatgccgtaacggcgggctatcttttgcagcatgcttacggagatgtcgaattctcccgtttcggcaagacggtactcttctgccgggatgtcgcaatcgcgggcgatgtcttcggcattcaattccaatacgtcgcgcagtccgcgcaggcgttcggctatttgtttaatctgttcgtccatgtggtttttattaagtggattagtacggttatttacttgctttgatggcattgataatggcggaagagaatccttgatgttccagttcgttgatacccttgattgtaattccgccgggagtgcataccttgtcaatctctatggcgggatgcgtgtcgttgttcagaatcagttcggcggcgccttttaccgactgggctatcatgcgcatgccgtccttggggtaaacgcccagttctattccggcctgcatggctgcctggatatacttcagtacataagcgatgccgcaggaagtcatggcggtggttgccgctatcttatcttcgggaatcagcatggcaagtcccatttggttgaagatgtcgagcaaaagctgttcctgttccttgctggcgttacggcttgcaatgagcgtcatgctttccatctcgctgatggcggtgttggggatgaggcggaacatggtcatctccttgtctgccacgtagtgtgccagttcttcgaaagggatgccggcagctacggagataagtatctgcttgcttttcagcttgagttcgcttaccaccggttttatcagccacggtttgacggcgagtatgatgagctcggcgccggtaacggcttcctgattgtcgcgtgtggtttgcaaagtggggagctcagcctttaacgcatccagtttgccttgcgtgggattagaaacaatgatgtcgctggcggggatgatggttccttttgccagaccgcgggcgatggagccgcccatatttcctgcaccgataattgctgttttcatatcatcttgtcatttaaaaagttgtcttcgggcaaaggtaaagattttaatgaaaaaacgaccgaaacaggaaggtattcttctttcggtcgtatcttttgccggctgattatccgtaaattgtcaaagtgctttcttaaaacgttccaggaagaggttcgcttcgtccatgccgagacacaggggcggcaacaggcggagtacgttcgtgccgctgacaccggtaaacacatgctgttctttcagtaacctcaaacgcagttctttgacaggctcttcaaattcgaggccaatcatcagtccgcgtccgcgcacttccttgatttgcgggaatttcttcagctcttccatcaggtatgcgcctacttgggcggcattctctacaagagcttcctgctctatgacatccagtacggcaagcgcagcgctgcaagccagatgatttccgccgaaagtggttccgagctggccgtaaacaggagtaaacatcggactgataagtacgcccgccatcgggaatccgttgcctatgcctttggccacggtgatgatgtcggccttgataccgttgtactgatgggcgaagaacttgccgctacgtccgtaaccgctttggatttcgtccagaatcagtaccgtattgtgctctgtacaggccttgcgcaaggcttgcataaactcgtcggtgggcaactgtatgccgcctactccctgaatgccttcgatgattacagcgcatacatcgcctttcgccagttcggctttcattgcctctgtatcattcagcgggagataggtaacgtgtccgcagttgttgatgggagcaatgattttgggattgtcggttgcctctaccgccaatgaagtacgtccgtggaaagctttcgagaaggataccacgcgagttcgtccgttatggaacgaagcgagcttcaacgcgttttcgttggcttcggctccgctgttgataaggaaaagggaataatcattgtatccgcagacctttcccaaccgttctgccagttgctgttgcagttcgttgataacggagttagaatagaatccaagcgtggctacttgcttgccgagcatctctacatagtgcggatgtgcatgtccgatagagattactgcatgaccgccatagaggtcgaggtactccgtacctttatcgtcccatacatggcagccttttcctttgacaatattgatgtcaaaaaggggatatacatcgaatagtttcattctttcagtaactgattacaaattaaagatactttagaaagcactgggtttcagtctcaaaccgacagtctcttccagattgaacatcaggttcatgttgtgtacggcctgtccgctggctcctttcagcaggttgtctatgcaggagatgataaggagcttgtcgccatgcttttccaaatggataaggcatttgttggtgttgacaacctgcttcaaatcgatgttcttgccgacgatatgcgtgaaggagtctttggcataatactcttcatacatgcggacaatctcttccaacgccactttggtctttatcacgatagtggtaaaaatgccgcggggaaaatcaccacgataggggatgaaatcgatgtccgaatcgaaactgttctggagctgtttgagcgattgcttgatttcgggcacgtgctggtgctcgaaagccttgtacacactcaggttgttgttgcgccagctgaagtggctcgtagctcccggcttgacgcccgcaccggtgctgccggtgatggcattcaccataatatcaccgttcagcatcagatgcttggcaagcggaagcaggcccaactggatgcaggtggcgaagcagccggggttggcaacatgctttgccgtgcaggtggcacggcggttcagctcgggaaggccgtagatgaagtcatggtcgtcgctcttgatgcgatagtccatggagaggtcgattatcttcaggtcttccggtacgttgtggctttccatgaattttctggtgtcgccatgcgccgtgcagaagaaaagcacatcgatttcgtccaacggaagttcgtcggtaaacgttaaatccgtctctccgtacaacccttcgtgtacgtcggttattttgttgccggcattgctcgagctgtttacgaatacgatttccgcttcgggatggttcagtaacaggcgtatcagttcgcctgccgtgtatccggctccgccgatgattcctactttaatcatgttgataatatctattgggttcttctggtattataactaatagtatgatatatataagcgtacctgcaaacgcagtgaagatcgtagcaaaaacgtagatgatgcgtaccagtgacacgtcgagtccgaaaaagtttgccagtcctgcacatacgccggaaagcattcttccgtttcgggggcgcgttaatttttgcttccggttcatcatttagatttcttcgtctttgtggtttgagtaataggcacgcagtgcggtagaagtcaccttgatgaagcctttggcgtcttccgcagtccagcctttctgcatttcaccgtattcgccgaatttattctttacaaggtcgtcgtcgctttccacgcctacggtagagaaacagagcggatgaagttcgagaatcgcagtaccgtttacattgcgttgcgaagactccagcatggcttcgatgtcgcgcattaccggttccagatactggctttcgtgcaggaacataccgtaccagttggctacctggtctttccagtattgctgccatttgcttaatgtgtatttctcaaggaacttgtgtgcgccgataatcagcatgggagcggctgcttcgaaacctacgcggcccttgataccgataatcgtgtcgcctacgtgcatatcgcggccgatgccgtaagccgcaccgatttcctctaccttctggatagccttgatggggtcgtcgaatttttcatcgttgaccgctttaagctcacccttctcgaaggtcaggcgcaactgttcgctgccttctttggtgcaatgtttcagataggcgctttcgggaagtccctgtgcggagtccagaatctcaccgccgcaaatggaagtaccccacagacctacgttataggaatatttcagtttggcgaagtcggctgcaaagccgtgtttgttcagataatctatctcttcctggcggctcaaagccatgtcgcgtgtcagcgtgatgatttccacgcccggagccatgacaaggaaagtcatgtcgaaacgaatctggtcgttacccgcaccggtcgaaccatgtgcaatggcatctgcgccgatttcgttggcgtagcgtgcaatggccagcgcctggaatatacgttcggagcttacggaaataggataagtaccgttacgcaatacgttgccgaataccatgtatttcaagctcttttcgtaatattcctgcgttacgtccaaagtaatatattttacagcacccagtttgtaggcgttctcttcgtttgtcttcagctgttcggggctgaaaccgccggtattggcacaagccgcatatacctcgtatcctttctctttggccagatacataactgtgaatgaggtgtccagaccaccgctgaatgcaactactacttttttcttcttttccataatacttatgaattttgaatgttgaattataaattgggaatcaggcttgtaaacgagtctgtgtgttcccattcataattcaaaatctataattaattatattttatcttcctcgtgtaacttcgggtcgtaaagcattgccgtgcaaatgcagaacttccggtttttggctaccagtatgtcatggttgatacagccctcgcagcctttccagaaagcctcgtcgtctgtcagttcattgaaagtaaccggtacgtagcccagttcggtattcattttcataacggccgctccgctggtcagactgaatatcttggctttgggccaccgcaggcgtgccaggcggaaagaagccgtcttgatacgttttgccagtcccaagccgcggtaatcgggatgtacgatgaggcccgatgttgccacgtactgcttgtttccccagctttctatgtaggtgaaacctgcaaattcgtctccacataaagctatgatagcttttccttctttcattttagtcgccacatattcgtgtgtgcgttctgcgatgcccgttccgcgcaccttggcagcttctcggatggtatccaaaatcttatccacgtaaacttcatgtgaggcgtcggccaccatcacatcaatctgtttcgaatccat

SEQ ID NO: 826 - DNA, 15875 bp, unidentified
  source 1..15875: mol_type = unassigned DNA
agtgatgacattacccttctcgtccacgcacaggcagcggtcggcgtcaccatcgtaggcaaagccgacatccaagcccttctccactacgaacttctgcagaccctcgatgtgggtggagccagcattgttgttgatattcagaccgttcggcttgttattgataacgtaggtatctgcacccagagcatcgaaaacgctcttagcgatattccagctggaaccattggcacagtccaggccgaccttgacacctttgaaggaatagatacccagagagatcagataacccatgtaacggttgcgtccggccacataatccacagtgcagccgatatgctcacgatgagcgaaaggcagctccggccagtccttgtcaaatacatggagcttgccatcgatgtagtcctctaccagcagcagggtctcctccggcattttttcgccgtagcagtcgatcagcttaatgccattgtcgtagtacggattgtggctggcagagatcataatgccgcagtcgaagtcatccacacgggcaatatacgccactgacggagtggtagtaacatggagcagataagcatctgcaccggaagccgtcaggccagccaccagactatattcaaacatataggagcttcggcgggtatccttgccaatgacaatgcgagcaggatcggtgtcaccattgcgctcacgcaacgcattataataccagcccagaaaacgacctactttatatgcatggtctgctgttaatgtaattccggcttcaccacggaagccatctgttccaaaatactttcccatttttattttccttctaaatctatctattttttcgttctttataaagagaagtaagccatgaaatcataagcgaaccactggcggtaataaaaaaggttttgaaattgtggtaatcacttttatacaatatcaatgcacataaagccacaaagtacatatgtacaaaataaattgtttcgctccaatttctcagacgcacgtagaactttccattcaaatcaatcttcttgcatgccgaaattacaactgcaaacaggaagaaaaatgtcgggagatctagtatcttcgagaagtactgccccccccccgattaaacttgttgctatctttgtaagatacattaatgcaactgcaattatgctaccagtacttatacggagttttccaagcttttctatttctgctaccagcattccaattgaaacaaatattaaggactgaaaaagaccatttcttgttgtcacaaaggcagcaaaatataatttaactgcagcggaaactatcattggaagtttatttaaatgcccttcaaacattgtcaaaataattccaagaacatacattacacttccgaatttcacgatttgttttatcgagaactttctcagcagcaaatcaatgaaaatcagtgcaaaaaccagtccattcagataccataatgcccatgaatagaaattatctcctacgagaataaaatttctaacgctacggagcaaatatacaggttccctatttccctctataatccatccgcagaatgtcagcggcagataaataatcgaccaaatcacatatagtcgcaaaaccttctttatccgaaagcatattttttcatgcacacccttgttttgttgtctgataatcaaaaaatatcctgtgcaagcataaaagaatggaactgcataatttgaaatatcataataaaacagcttatcagccacatcactgacgacctgaaatggtcttgtatgtatccctattacaagaaatgcacagataaatttcatcaaatcaagcagtttgtaatttgtattttgtatcaccgcactgtctttttccacgttatctcccctgtatctacatttaaatcacgctttatgtaataatttcgttttgaacttttgaatcatttcaaacatcaaagcgtttttcatcatcagattaattgcaatgtaaactaaagctccacatcccacttcgacaataagtccaattgtattaggcaactccagcagcatgagtccaagaacgcatatagacatcactgcggtactaaaaatacctgttatgagtgatttccaattgacattgaacttcacttttttcttcatataaataaactgaatggcatttgtgacaaactcactaataacggatgccacaacggcaccattttgtaaaagtgttggaatcaatgccgcatttgtaatgacattgattatggacgcagaagcagctgccggaagaataattttctcactcttcgtactataaacaagctgatagcagaacaaatccccaaatcctttgatcagaatcaatgggcacatcagctgaattgtcaaggctgctggagcaaatgcttctccatagaggaactgcacagtctgctccgctactaaagccataccggctgctaatgggagagtcatcaaacacagaatctgaaaccctttatccaataggcggtaaaatccctctctatcattctcgtaataataacttagccttggaagaagtgcagccgttaccgcattcgccattgtaagaaccatgttaacagttttttgtgcgtaagaataataaccaacagattcatcagttgccatcatattcagcatcgtaacgtcaattttgttgtagatgcttgataaaaatataatacaggcaattaaaagtactggtttcagatgttttataagcttaatgcccgaaagtcgtatttttacaaatttccttgcatgtatcacattgaaaacatagttgcctcccgttgcaaggcttgaaatcaatgcgtaagctacataatcctgtcttgtcttaacaaacaaaaatagagccaataacgagataccctttatcgccagacttctacctgtgatataaccatactcttccagtcctttatacatccaatcgatgttcagataattgaaaaatatagctaacccacacgcaccatacaacgcccactcaccgttaaagcctgcatttataaatacaaggacaaagaaacctactacagctaaagttgtcgaaatgatattcagcaatagaagttccgtgaacaatttatctctttctgctttattgtcccgaacctttgcaaattcacgaacaccatacgatggtagtcccaatgctgcaagtgttacaaagtacgatgcaatattttgagcagacgcaacctttccgacaccaaccggaagaagaattctcgaaacgtagattgatgtcacaaatgggaataaaatatttgcaaccgtatatataatgttgtatattgaattttttgctagtgatttttgcattttttattcgtatggcaatacactgccatcatcctccatttagactaccaatatcatcaaattggttgattcattttcattctacaactactataccattccgatttatcgaaaactgattttatactctattgattttgcccccccccgaatgattttcgtctttatcagaatttcttttattttttgcttataatatacctttggagcacacttcgaaagagatttataaaagcccttattcaaacctgtaaaaaaggtttcgcgagtatctggtgcaacagatggatgccttaactgatgatttgcatctatcgctttatctatatcgacctcttttaattgcatcccggaatttttcacaagggttttccccttatcagtctggcatagcaataaggagatgcctcttccttgctctttctgcggcaaatcgcttccccacgaatctccaattgttatgtccgccactcgttctattgtggcatactgacaagaatagcaattttcggtataatccaaagatgtcaggaatgcatatgtatacatatcttgaacgcctgcaggggtcaacgtcttatatacttgtccatcgtcttgtgacgaaagtccaaagttcgttttatttctgaaccgaatctgtgttagtttctttatgtcgattcccttttcctctaaagccatattcaatatacgcggagacgggcttccatgacaaatcaagtcaatcgtatacagattatctctcatttctaatggcaatattgctgttgaatttttcactgccgctacttggcaaggtaatcctataaataagaccttttcgctgtgcttcaatttctctatgactttggcgtaaattccaataggattactcttcacatatttagaacctgcaaaatcattcagttcctcaaccctatttgtaatttcaaagacaaattcaccttgtttgaagacgcaggctgccacatagcctccattttccacaaagtacttcatcatagccgatgccgcaccaccagaagatgcacgacctctaatattttcagaagcccacccttctttccaatcgataggctttctcttctctgctacttggttatttggacataccttcacgcacatcccgcagttaacgcacttatcttcatcgataactgcattatatgcagccatactatctttgattgttatggcatttttcttacactttccaatacaggccatacatcctgtacaggaattctctctacacacagttctcattttctcatacccacaactcttcttattttcaattgcaaagctggttacagtaattttcaagtttttccacttcagctttgtacgaaattttgttaaaatccaaactgctcagtagccttgtattattcggattttcaagaagatagtctattttgtttgcaatctcattttcatccattggatcaaagataacatcgtgttccgttacatttaatagttctaatgctccggccacattagtgacaagaacgctacatccacaaatcaatgcatcataaaccgaaagtgcaaaaggctcataaacagagttcaaaatgtacaactcgcttttccgcatttcttcatacagctgtgtctgtggaaccagtcccttgaactcaatatttttgccttgaggtaaattcttcggattgtataagtgtccatagactgttagaactctatctgtccccaattttgccatcgccctggccacagtaatgttgttcttgagctttctatctccacctactgctattattcttcctttctcccgctgcactcccccgtgttctaaattcattttttccacaccattatgtaagtaggctgttttccctttgcagaatggatatttctcttggattatctggctatatcgttctgataccggaagtagtaaatcgacagaatgaagaatatattgctccatctgcaggctgttctcgtctaccgctgattcatttaatgcacattccatttcataacagccgtgcataatgtaaactgtttttttgtttaacagtttagccaacttaatagcacacactcctactttagacattcctgaaacgactatcactttgcaacgtactacgcctatgaatgcatttatatattttttgaccttatttacactatccgcaatgcaaaaagcgtctgacaagttagctacaatacctttgtttacgtttgccggtccagtatttccgtttgtatctccgacaaataaaaatttcttcatttatccacctactatcttcttttatatgttattctgcaaatattgcaacgactttttttgttccttttttatgcaatcattgaactccgctttgttctctgcaataccatatttagcatccaattcttcgatgctatccatcaaatgtgctttcatacagattttatcaactagatccagcaacttatttttattactatctcttgctaatactgcaaatctctttgcatattttgctgagaaaattgttccatggaatgtatctgtaatcacaaaatctgcctgccggaaaatttttaaacactggaacggatcacagacaacataattcttcacccaaaactgtggtgctccgattgcaactggtgttaaattgtgttctttacagaaagtttcaattgcttcaatttctttttttgtgtgaattcgattataataggaatataccacacaataatgtgccggaagttcaggaagtattgccgcttctacttctttatcaaagttataaattaaaacagggtccagactatcaactaccgtttttggggtcaatttttcaacaaatctgtgtgtattgttatcccgcacagaaaacgcggagactctgtcaaaggaacttctaattttatccgccacactttgtggaagttcttggtactttgttgatccacatgaagctgcatatgtaataaccttatccgcattggaaacattaccaaacaactgtgaagtaaatccccatgcaccagaattcaagcaattaaaaacctcatcactaccaataacgcatacatcatatttcgagcttcttctatcaataaaaagttctttttgacgaaattgttcaaagacattttcctggtctatactcttcttttttattcttagacggttcagtgtatatctatccgttttctttatttttccaatcaagcctgtcgtttctttttctttatcatacttctgcttataatcacccaacagtttatagtcatcttctcttttttcaatatctataaattccacttgatgaccgagtctttcaattgttgtcttcagcgcatacgattgaagtagagaccccatattaccaacccgttgcatcgacaaaatacacactttcacttttatgttcctccttcgttcctacacgcttttatatgctaaacattctttaagaattctttcatattcgaaaacttcttttggttttctctaagtttttccttggaatactcgtaatttcctccgagcctcatcatactatcccaacatcccggaagctcatcctttccgcctgtgaataaccaaaagaattcatgtaacgcatgttcatctggttctttctcataacgttccctatatagctttaccaattcctttgcttcatcaacttgggccgcttttctcttctcatggtattcctcaagactcattataactttacagggattaccagctgcgacacaattatctgggatatctttattaactaacgaattggctccgataattacattgtttccgatatgcacaccttttaagattgttgtctgcataccgataaaaacattgtctccgattttgaccccccccgatgatccaagaatgtcgccatagacacctttcaaaacagaccaatcaaatccatgcgtcaaaatcgttacgccctctgttatcttcacattctttccaatatcaatcaaccaaggacgagttgtatcaatttgtgtctttgtcggaacataaattgttgattcttcgccaatcttcataccaatattacgaagatatttaatataagtttctgaggatgccttatccccatatataaattttctacatatattcctaatatattttcgaatcacaactgttctcctctttcttctcgtccgctaacgcctgccaggttaataccgcaaaaaccatatatgcaaaattcgagcgcaatgtagaattatatacaatgattatcataaacactattggaaagaatgttccaagcaggttataataagagcttctcttttggtacgcaacaatagccttaatttccagaataacaaagaaggaaatatatacgattgttcctaaatatcccacctcaacgaacaaatatcccaatgacaaccaagtgtaatgcattatcccatatacagtatagaatgcactattcagcatcggaatcgcatcagagtagtcgccatttccaagtccgataccaaaccatacagcatgttgccctgcccatttcgtaatcacgggtgtcaatttcgagaacactgctgtccgacctacatccatttgattcgcgtaaacttcctgatccgagatcattgtcataatattatcaaatgataaatagtttgcccaaaagggaaagacataatagaagatttgcattccaacatacaacgctataacaaaaaatagtgctaggatcatacctcttcccttgcgctttgacatcgccagataccatactacgagaaggctagccaaaacaaacaaaaacttcagttccgataaggcagcattaacgaatatcaacaggaggtagcacacgaattttttcgtgctaatttttttatactcaaattgacatattacaatacacaggataacggataagtagatcatcaagcctccgttaccaccagctgtttttccaaacaacccacttaggaagtcttgatttaatccttctacaacatactgaaatgcaattaaaatcatgtgaatcggaaaaatcttcataaagaaattttccatcgtctcaacatcttcaccgttccacaaagatcttccaagcaagaagaataaaaagaatctgccataatttctcagaccccaaagcgcactcggcaggcgaacagtattcagcccccatccaataagcgcaacaattgcaaacgccagaattgatatatattcaatgttatttgtcgttttatttagcttcacctgctttctgcaaagcattacaacaaggagcagcaccaagagaacatcacacagataattcacttgtcgaaaaccgagataatctgatattatgccttgaaacaagcatattcccagtactccgtataaaatattcttgtatttaataacaaatggatgcatttcagattatttcaactccttcataatttatatttgaggtaaagcattgcatagcatactaacgtttgttccttcagcaatcccatccgaataaaatttctacttttactctcaattttgggattaacttttccaagcactgtctttaaatgagaatctttttcgatagctttaatatgactcagtttttctgttgtactctcttctgataagactatcatttttaatgttgcaatcacaaaagcaagataaacactcgaaaaccgcgttttcactacttctggaaaatctaggttctgacataagagaattgtctgatcataaaaatcttttattttctcatatctatcttttcgatacactcttgttaatgacgtgttattttggcaataaaaataaaatgcttccggaacaacagatacacaagtgacgtttccaaagagtcttgtcaaagagtatacatcttctgaaatgatgtctctttccgatacaaatctccaatttgtatcgtttattaatttcattgagaataatgccgtacatgcactcagcattaagttcattttcttctctttagaataatctggagatatcaactctggaaaaataatatttgtgacttcacttcccgtatagatcaacttatcaatttcaggtttaaacacttgtgtaactttaccatctgagtcaacaatattatatccataatagacgatgtccgcttttgactcaattccacttttatatgctttttcaatagtatcagatgcaatataatcgtcactgtcaacaaagcaaatgtactcgcctgtcgcattttcaattcccgtattacgtgcatatccaaggccgccattctttttgtggataacttttattctactatctttcgcggcccacttatcacagatttctggacatttatctggagattcatcatcaaccaagatgatttccaactttctgtagctttggtttacgacactttccaagcatctactaagatacttttcaacattataaatcggtaaaacaactgatacaacgccttttctcatcaatacaatcctccaactatgattcacaagaaacgacgtctgctcttacaataactttattacaaactttcgcttctacaatttcaaattatctttcattcatattttccaaaccagatgcaggcaaggtttgtttccatgaattgtatggctctctctgccgtttttatccacatacacctgcaaagggcaacaacatttttacatcttttttatcaccctcgccggactcccaactgccacacaatagtccggcacatctttagtaaccactgaattggctccaatcacgcaatgcttaccgatctttacattacctacaatcaccgcattaattccaatgtaagaaccttctccaatagaaaccatctgtcctctttgtacaattccttgatctatcacaggaacatttatatcgcgatactcatggtcgcaatcagttatgtacacatttggcgagaggagtactttctctccaatatccagagaattggcaatagatatccggcatcgctcaccaatttcggatccctttccaattcttaccgtaccccccccgaccagatttgggtatagggacgtaccgttacggaatcttccaaggtaatatgacgttttccttttaagctgcaatgcttgccaatatagacattctgtccagcagttacaccaaagatttttgctctcatcaatccaaggatttccttggcctttcctttaagtcccatccttacgatacctttctaataaatttattcggatacaggaagaactccaaccacttcgttttcttcataatccaagctgcaataatcggacctgcaaagctaattacaagccccagtactacatgaatcacagcattttcaatgccaatcttcatcagaatcgatctcagcggtgctgcaaacaatgtgtgcagcaagaaaatcggcattgtgtattttgctagaaagtccatacctctaccaaacttttcctcaaaacctgccacaataaggattacagctacacaagccaataatcccatagcaaaagaaattgcactaccgctaatttccgccgtatataccacaatgctcaaaatcataaatagcaatccgcatatcgttccttgtacttttctgcctttcagctgcacatcaaacacgcaaatactcataccgagcacaaaccagatttcgtttgagagaactgttgatactgcgtaaacgctgtaccccccccccagtcaaaattaggcctttcacaactattgcaactaccaacccaactgcggctgctttcacactgctaaaagtcggcgtaacaagaaaaataaagaacaatgcgtacagataccaatacggagcagttggatgaaggagcagtgtatcacctaaaccaccaatctggtcattgacactgcttgagaacatctttttcagcacccatgtagcagtcgtaaaagtcgcatagggtacgccgagtgctaacgcctttttcgccacattcttgcaccagctactaacaccgtttaccttgctgtacttctgatacaaatatccactacaaataaagaacagcggcacatgaaagtagtaaatcgtcgtttcaaaccactcatacaaatcattttcaggcagaatacttgcctttgtcatactttggaagaaatggcccagtacaaccaatatacaggcaatgacttttacatcatcgacccatttttttcttgttcttaccgctgtcttttcacccattactttgtctccatctgctgtgcgatatcagcatccacgatttcctcgccagtcttatgcttcagctgttccttggatgcctcactcagaccgttgttgatcacgcagttcatatcgcaggtactgcacttatccagttcctctttggtaacttttccatcacggtagtcacggcagattttcagctcatacatgctgtacggatgcttggtgaacagagccttaaacttgtgaaccagaacccaggtagcaggcttccagatgtacttgtgcatagccggggaaacagaaccgatcatccagcaatcgcggtcacagcaacgaaccttcgcacgaaccttctcggcttccgggctgttccacagctcatcccaggtctgattgttcaggttgcccatgacttccttatccttggtaccattgcaaggcataacatcgccatacggatcaatgaagaaggtatcaaagctcatgtcgcaaggcagcagacgcttctggccgtagatgtagttgatcaggccgtggttgaagtaagcacggaaccacttcttcgggctattgctgcggagtagttcattgaccaaattctcgaagttcttggcaaccataggacggtcatggatgatgttcttggcctcaacaaagtagaagctgttgtgcagagaagccgttgcgaactccatgcccatttcgttggagattttgtacagaggaaccagatcaggagcatttttgtcctgaacagtcatgccgaatccgacatccttcatgcccatctcacgcagtttcttcagcgtaccataaccacgctggtagccgttctgcagaccacggatctcgttgttggtctgctccagaccctcgatagagatacgaataccgatctgagggaactctttgcacaggtcaacgatacggtcagtgaagaaaccgtttgtggaaataacgatacggtcagacttcttatacagttcacgcacaatatctttcaagtcggtgcggatgaacggctcgccgccggtgatgttcgtgaagtacatcttcggcagtttcttgatggtttcgatgctgatttcctcttccggcttggaaggtgctttataacggttgcacatggagcaacgagcgttgcagcgataagtaacgatgaccgtaccattcaacttcttttcttcagacatgattaactctcctaactctctcttttaagaatgttttgattttatttaagaaccacttggcacataccgagaacacaaccgaaccgcagataactgcaaccgctgtgaagatatatgccagcagaccaatttttcaaatataagggttaccggtgttccgcaagcatcccccacagtgtctttgcatatttttcctctgagcactcactttcaaggaagctcttaaacttttccgcactagcattagcttctcctctatgctgtaagtagtactgaattttatttttccagtcttctacatccttaccacataaagcacctctgccatcggcaaaatactcctgtgtagttaccgtatccgacgtaattgccatcttcccattggctgctgcctggtaaaaagcaatcaatccggccggtgcctccgtatccaacggcgtaactaccagctgtgactgacacatgaactcaaggaattcctgttcaggaatatccgacttcaccaccatatttttgccgaagttctctttgtactcttcaaatttatccttcggcataacgcagttgaatgtaacttccggcatcgcctgtgcaattctaatcaggaactcccagtcgcgaccgttccgaccgccgcagaatacagtattcgacacaactttgccttcatatccgatgctataaccaccatgataggtatcatgcaacagcgtgtacttcttctggattcctagcatttcgttcaagtgctcaccgtacttcttagaggtcacagtcgcttgaaccttttttgatttcagaaccggcttgtataaaagcttcgccactttgttcttagtagttgctttatctttgagtaatatattcagtgcgatgatttttctgttcttaaactgcactttacacagccaccagcacaaaactgccatgaagtcataccagcagatgatcgtgtcacactccgccgactgtttaatcatgtctttgcaggcagccagcatttccttggttgaattacatttctgaggtggataaacctgccgaatcttggctgtttcatagctgttcagaaatgccatattctgtttatctgccgggttatcaaacagcatataaaccatcgacctgtcctcctctcttactgatacaccttcataattttctcgtaatactcatcaatggtatcgaagctgatgtccttacagttcgcactatactgctcacacagcttcttatcaccccagagcttctcgatcttcttcttcagatcttcggcattaccgctctcaaacagctcgccggtcttgccgacctgaatcaactctgggatgccgccgatgtttgcacccagcaccggcgtgccgtacatctgggattccatcacggagaacgggcagttctcataccactcagacgggtagatggagaaccgtgcctcacggatcagcttctccagtgcctcacctttctggaagccaacgttcttgatgttcttaataccatttactgtttcttccagcgggccagtaccggcgaagatgaactgcacatccggcagttctttacaaaccttgatgagcgtgccgatacccttctcctccgagaaacggccgaagtagagaacgtaattcttcttctccgtctctttccactccaccttgtcgatgaagttatgcattgccacagtctttgtcgcaaacagtgggttgctgtccatcttgctcttcatgaattcggagcaacagatcatggtgtcaatgtacttataggtacctttccacttccagaactccgcttccatcatgccgatggcagattttgccgtggagccgtggatgcacttgcctttcatgcagttcacgaaatggccgccgaggcacttctcacagttctggtgggtgttcggattgttcagcatgtggttcgggcagaccagctggtagtcatgtgccgtgaagatgattttacaatttcttccggtctccttacgccacttcacaatttccaggatgatggaaggtgtcagctggtagttgaagttgttcaggtgacagacatccggcttgaagtcgtccagaactttccgcagctgcactcttgcttccttgctgtagatggtcttgattgggtaggtcagcttgctcagtttgctgccaccgtggaagtccatatcagatgtataagcattgacccggttgcccacgcagcggccttcatgctccataccgaagtactgaacctcatgtccgtgctgctctagcgcctcacccagcttaaatatgtaggtttctgatccaccgtttggatatagaaatttatttattatcaatactctcatctattattttctcctgtacagtttcatcgtttcctttacaacttcatcccagttatatttctcgcagataaagtcagctgcctgattcttcattttcataaccatttcaggatggtcacaggcatcttgcaatttttctcgcaagtcctctacatctgactttttgaaaatcaatgccttatcttccacaacctctgcgcactccggaatatccgaaaccaaacagcagttgccgtagctcattgcttccagtagacttagcggcattccttccaaatcagacggcagcgtgtagatgtaagcgttgctgtatagttcatccagcattgctccctgcacaaacccagtaaagagaatccgatcgtcacccttcgccagttctttcaattcctccataaaggaatccgtatcactagagccgcctgcgataaccagctttttatccgtcttgacattcttgaaggcctcaaccagatatcgaatccccttttctggcaccagacgaccgaggaacaatatgtatgagtcttttttcatcccgaacttatctgtaatcagacttgcttctcgaatctgcggcctattcacgccattagggataaaatgtgtctcccttccgtaggtctccaagaaatacttctgcacgtctttgcttagaacaatgatctcgtccgcatatttcacagcattcttttcgccgccacgaatgaacttggatgcaacgcttccgcgccacttctcgcgatcccagtccaaaccaatgtaatatcatgggcaacttcgcctttttgaaattcaatccatgctgttc

SEQ ID NO: 827 - DNA, 20972 bp, unidentified
  source 1..20972: mol_type = unassigned DNA
ctccgtttctgccgacggtattctgtcggggaaacgccgaggtgttcgcggacataacggccgaagaacgaaaggttggggaaatccagctcgtcgcaaatctctttgatgctcttcggcgagtttttcaggcggtcggcgatttctgccgcaacggtttcgtgaatccactcggatgccgttctgccgctcgtctgtttgacgaccgtcgacaggtatttcggtgttttgcaaagtcggtccgcataccacgtgacggagcgctgtttcggcgaggtcgaagccagcagatcgaaaaattgtcgggagagatactctttcgagtgtaggtgatcgggaatatcggtcgaaccgagcaggatatcgagcttgtcggaaatacgatacatcagagcctgtatcagacagcgcatcgtgtccatgtagtagttattgctttgctcgacgatacgacatttgatataatcccaatcaatctccagatcttcgatgaattctttaggaagcgagatgctaccttgttgacgcatttcaaatgcctgtcgccatattttggcggaattcgggaaaatctctttgttcaggcgtcccgaaataccgatgatccgtcccttgaaatcgggactcatcattgaatggtccatgattgtctgcggggtacaaaacaacaggtcgtttttgtgaatcaaaatatgttttccattcaattccgtatcgcatcgtccctgttcacacagcagcaatgttatccattcatcgttttttttcggaatatccagatcgtgaatatcgtcgaacagcatgaaattttcggagataaacctaaatgttgtgtctaatttcttgtgcatatttttctctttatttcacaacaaaggtagtctataattcgcattgggcagtgaacaataccacgcacatagtgtcctataattcttttttagccggatgtgtagcaatatcgtacacttatcatcctaatcagataacctctaaatgattgtgaatatccaattttgctctcgaaaattaaaaaatcaaatgaaatgaaagtaagttattacgcaatgattgccgcaatcgcgttgttgtgcgcatcctgtgccagcggcgacgtagaatccgggcagtcgtccgtcaaggtcaagacatggaaggttaccgcatcggaaaacagtattgcccgcatcttctccgggacggtggaagaggaaaacggaacagccgtcagtttcccgatgggcgggacgatccgtagcatcgacgtcatcgtagggcagcgggtcggtgcgggtcagctgttggccaccgtcgatccgacctccgtgcagagttcgtatgaagccgcgaaagcgacgcttgaacaggcgcaggatgcctatgcacgaatgaaacagctgtacgataagggcagccttcccgaaatccagtgggtcgaggtgcaaagcaagttgcagcaggccgagtcgatggagcggatcgcccgcaagaatctcgacgactgcgccattcgcgcgccgttcggcggcgtgatctccgccaaggagatggaggtgggtcagcaggccgcaccgggcatgccggtcgttagggtcgtgaagatcgaccgcgtaaaggtgaaaatcgccgttcccgaggccgagatcgctgacatgaaagtgggacggaaggcagaaatccgtgtcgcagcgttgggagacaagacgttcgaaggacatgtggtcgagaaaggcgttgccgccaatccgctctcccatgcctacgaagtaaagctcctcgtcgcgaatccgactttcgaactgatgccggggatggtgacgaaaacggcgctcgcacccgaagaatcccttgccgcaatcgtacttcccggacgtgccgtacagttggacgagcggaaccgcacgttcgtctggcttgccgacaacggccgtgccgtgcggcgattcgtcaagtgcggtgttcccacggcgcacggcgttacgatccggtccggtctgaatccgggcgacgaggtgctggtcgagggacagcagaaagtgagtgaaaatacggtcgtcgaagttatctgataaatcatgcaatccactgaaaagaaaaaacggggcatcgtcgaatgggcgatgcactaccggtcgatcatcattctgctcgtcagcgtattgtgtgtcttcggcgtatggggtctctcggacatgcgcaagaacgagtttcccgacttcacggtgcggcagggaatcgtcgtagtcgtatgtccggggcagaccgctgccgaaatcgaagaacaggtcgtcaaaccgctcgaagactatatcttccaacagaaagaggttaagaaagagaagacctactccactacgcgcgacggtatcgcctacattcaggtacagttgaacgacaacctttacaacaaggacgagttctggtcgaaattcaagcacggcgtgacggatttcaaggcgcaattgccacagaacgtattggccgtacaggtcgtggacgactttggcgatacgtcggcgctgctcatctcgatggagagcgacgagaaaacctaccgagaactcaacgattacatggacggcctgaaagaccgcctgcggcgtattccgagcgtcggccgcatgaccgtgagcggtatgcagaaggagcagatcaccgtctgcctggataacgagcggctgtcgcaatacggattgaacgaccagacacttgcagcgactcttttcacaaagggcttcgccacgatgagcggccggctggacagtgaggagtatcgctcgccgatctatgtcgccaagtcgttccatacgctgcgcgacgtgcaggaactgatcgtctggtcttctccgtcgggcgacaacatccgcctgaaagatatcgccgacgtgaaacgggagtatcccgaaccggattcctacatccgcaataacggtcgcaaatgcttgttgctgagcgtcgaaatgaagaaaggacagaatatcgtgcagatgggcgaggcggtcaatgccgagctggaggcttttcaaaagaccctgccgcaggacgtgacgacgttccgcatcaccgaccaaagcgaggtggtttcggccagcgtgacgacctttctcaaggagttgatgatcgccatcgtggccgtagtcatcgtggtaatgctgctgctcccgatccgtacggcattggtcgctgcctcgaccattcctatcacgatattcatctcgctggggctgttctacgctctcggcatcgagttgaacaccgtgacgctcgccgcattgatcgtgacgctcggcatgatcgtcgacaactccatcgtcatcatcgacagttatatggagcgtctggccgaaggcatgtcgcgctggcacgcctcgattgaaagtgctgaacacttcttcaaatctattttctcggctacgctggccatcagcgtgacgttcttcccctttctgctgacgaccaaaggcatggtcaacgatttcgtccacagttttccgtgggcggtgaccatcgtcctgatgatctcgctgctgattgcgctgatgctcgtgccgttcatgcagttctggttcatccgcaaaccggttgaaaacagagcgccggaaggcaagaaaaaaccgttctcgttcctcgactcgttgcagtcgggttatgaccgtgcgctggcggcctgtttccgccatccgtatgttacgttagccgttgctgccgtgtcgatcgtcgccggactcggcatgatgacgaaactgccgcagaaaatgctgcccgtggccgagcgcaaccagttcgccgtagaaattttcctgccgacgggttcgtctaccgaaaagacggcgttcgtcgccgactcgctggaacacatgctgcgctgcgacgagcgtgtcgtatcggtcgcatcgttcatcggctgcacctcgcctcgtttccaaaactcctatgccccgcagatcgccggaaccaacttcgcgcagttcgtggtcaatactatcggagccgaagcgaccgaggagctgctcgacgagatgacgccccgttatgccgactattttcccgaagcggtcgtgcggttcaaacagctttgttacagcgaagcgacttttcctatcgaagtgcgcgtgagcggtgacgaccgtgggcaattgatgacggcagcgcgcacgatcgaagctgcgatgcgcgagatgcctgaattgcgtcaggtgagaaccaacgtgaacgagccactctacggcacccgcatccgattggacgaggaggaatcgacccgtttgggcgtaagcaatacggcgctcgaaatgacgatggccatgcgctacggaagcgggatgccggtcgctacgctttgggacggcgactacgatacgcctgtcgtcgtgaagagtacgaaggccgacgcagcctcgacggacgacttgctcgacgaacccatacctgtcatgggcggtcttgcgaccgtgcccctgcggcaaatcgcatcattggaaccggcatggcacgacggacagctgggccgccgaaacggaattccgaccgtgacggtcatcgccgaaacggcccgtggcgtcaacgtcatgtcgatgacggccgaagtcgggaaacggttgtccgccatcgaactgcccgaaggcgtcgtcctctcctatggcggcgagttggaagagaacaacgatacgatgcccgattgcactgcggctcttgccattgccatcgtgctgatcttcttgattctgttggcccatttcaaacatatctccgaagccggattcctgctttcgagccttgtgttatgcctcttcggcgcctcgttgggcgtgctggtgcagggtgtcgatttcggtgtcacctgcatcatgggactcgtggccctgatgggtatcatcgtccgcaacggaatcatcatgctcgactacgcacacgaattgcaggccgaaggcatgtccgtcgtgcagtcgatctatctctcggcccagcgacgcatgcgtccgattttcctcacctcggcggccgcttcgatgggcgtcatcccgatgattctgggaggcagcggcctgtggatgccgatgggcacggtgattttctatgggactttaattacgatgttcttcattttgctggtgattcccgtcgcctacatgcaatttttccacggcatggaaagtatccgcgaggagcgccggaaactcgaactcgaataaaacgaacgatctatgaatacgataaaaatcattttgctgtcggtatgctgtgcggccatcgtgccggcagctgcccagcgggtctataccctcgacgaatgccgcgaaatggcactccgcgagaatgcccgcatgaagatttcgcacggcgatctttcggccgccgtgcaggagaagaaagaggctttcacaaatttcctgccttcagtatcggccaccggtatcggtttgaaagccgacgacgggctgttgcagatggagatggctcccggacaacggatgaaactcgtcgaggacgggcttggaatcggggtgactgctacgctgccgatttatgccggaggcatgatatataacggaaacaagctggcgaaaatcggcgtcgaggtcggtgagctgaaacttcgccagaccgagaacgaggtacgtctgaccgtcgaacaatactattggcagatcgtcgtactcgaagcgaaactccggacggtggaggctgtcgagcagcagctcgcccgcatcgcggaggatgtcgcggcagcggtcgaagccggcgtgacgaaccgcaacgatctgttgcaggtcaatctgcggaaaaacgacatgcagagtacgcgcatggatctggacaatacgctcgccttgtgcaaaatggtgctggcgcagttcatcggtgcggagcaatcggccgtcgatgtggcttcgtcgatcggtgacgagctgcccgcagcacccggctatctgcgaacggatcacgatgcggcactcgggcagacacccgaataccagcttttgaacaagaatgtcgaggccggccgtctgcaaaaacgcatggcgctgggcgaacatctgccgaaggtggccgtcggcggcggatacctctacaacgattttacgggcttttcgcaaaaccgatttctgggattcgtatcggtatcggtgccgatttcgtggaaagcgcctcacagcgtccgcaaacagcgctatcgctaccagaatgccctgacgcagttggacgacggcagcgaacagctcgtcattcgcatgcagaaggcgtggaacgacctcgaaaacgcctatcaacagatattgatcgccgccaactccatcgagcaatcgaccgagaacctgcggctcaacgaggattattacagcgccgggacttcgacgatgagcgacttgctggatgcccagacgcttttccgtcagagccgcgaccgctatgccgaggcgtggtcgcagtacgaaatcaagaaaacggagtacctccagtcaacgggaagataggccatgtataacgtgttatgtacagctgtacataacacgttatatgagtagtaaatcattatgtgaagtatttatttgtacatttattaaatatgctgataactaacttcttgactctttaagacaaacagattactatacataatatttagaatgattttagccactgcaaaagatccttatctttttcccataagggttcaacatcaggagctacatttttataagctttttgtattgcttcacgtttttgcttggagtccgcacgagcatagacctccgtcgtttgaatcgaaacatgtcccaatatatcacgtatataaacaagatttacacccgcttgtaagagatgcatagctttagagtgtcgcaaagaatgacaactgacaatttcaggtattatatcaggattaacttttctggccattgttacgtattttttaagaatgtatgtaattcctcctctggttagtttctcctttcgattattcataaataagggataaggtctccaggttttctccgtcagccgattttctttcatgtatacagataaaacgttcaactggctctcagtcattggaactgttctaattttatttccttttccacatacattgatataaaacggtttatccaaatgaacatcttctaccttcagatcagccatctcttgcactcgggctccaatatcatacattaaagatagtaaagccaagtctcgtcggccatttatactgtgtttattgggcatggagagaaggagcgatattccttcaattgtcaaataattgatttttccttttgtatgctttttatttcttatactcagaatacgttgaaattcatataggttatcagggtactggtattgtacatactttatgaaagaatgtattgcagcgagtctgttgttccttgtctgaatgctgcattttctttctttttctaaccagtcaagaaattcaatcaccatattttgggtgatcatgggaaaatcaaatctgtcaatttttatattcttatgttctgatatgtacgagatgaattgaacaaaagtatcacgataggattttattgtattatgactgaatccacgttcattaaccatgtatactgtcagaaattcggataaatattttgcaaaatttgttgttttcatactatttattattctgttttattgtcatcaatggaaggaaaaacatctgtatatattgtatcaatattatatacaagatctggatacatttctttggtaagacggacatatttattcgtggcttctaaggattgatgtcccagataagttgaaagaatcggcaatgaacagtaaatatccattccgttttccagcatatgaactaaagatctgacagcaaatgtatgcctaaaatcatgtactcttggtccataatgattccctttgaatggtattcccgctttgtgtaatatccttttaaaacagacatatatatcgcctggttcaagacttcgaccccgtgcagaaaggaagaagtgagatgttgagggactggggtttagccttacccggtgtatacgatattgggttagaatagttgctaaagaatccgaaaacggaacgagacgctctttcccattctttgagtctctaattataagcattttattttgcaaattgacatccgtatccaaaagttcaagggcttctcctattctcagtcctgtacataataaaaagcgtaacaaggcaggcattacaaacataacagaatctcttcttatgggcatacatacttgattatcacatacagagaaaatctgttctagttctttcgagctgtaaatatgtgggataaagtatgttttataaggaggaacatgacatattgaacaaggtctatcttgttgtcttaagtacaaagcaaactgattgaatacaacacttcttttatagcggtagctttcggtttcattaggtctctttaccgcccatgcccgagctaactcaatcccgagtgaagtatccgtttcaccacgttcaattgtcagtttgtcaaatagtacaagcattttctcggctgttacatacttgaacccacattggcgtttgaactgtacaaactcttccagtaggtccttatagaccccattaaatcttattttcctcatgatgttaccatttaaactgttcataaaatgaatttcttaattctggagcatccaatgcgcaaagttttaaagatgttgtatcaatacgtaaatagaacattgttgatccgctattagtatgtcccaatacctctgagattacaggcattgtagttaaactttccaacattctggatgataacgaatgacgcaaggcatgtggcccatgtttcctgtctagaatgctaattccagctcgtttgaaagccttcattgttatccgatacactctgagcggcttaagaggctcataaggaggtatgctagttagaattatgaatggagaatcggactcgggacgaccatattttaaatagtcaattatggcatttccaatctccggaagcaagggtagttcaactggatgtcctgttttgacttgtataagtcttataatattctctttccaaaagatattggaaaatttaagattacgtatatcggaacttcttaatgccaatcttgcagccaacagtaaacataaataattccttttgccgactggattgcctctgtctattgtatttagaacttttgttatttcttctgttgagtatacagaaggtagtttgggctgttggacaaacttgggtgaaggtatgtttatcgtaatatctgtttccattaatttattacggaacaaccattttagaaaaacttttgtataatagacactttgatagagcatgcttttatattcactgtctaactgatttatatattgtattacatgttcttttttaagttcatacacatgtctgacattttgagaatttagataatctaaaaatcttgaaagattggttttgtagattctaatcgtagtttgacttacatgttgagtttctttctcagaaataagatccagcatttttgcaccaattggtcctgaaaaatcgaatgtttgacatcgttctttaagtttaccattaagaacgaattccttcaatattttgaacgaattcaaagccgaccgtagatcagtcgctgatagagttacagataggaggtattgacttatcaattttctaacagaatttatggattgaaaatcaacgctcaaaccttctttctgcgcataatcatataggcgttgccagttcttattatgcgattttagtgttttggatgtggaacctcgttcctccagatagctggagagttgttcagtaatcttccatccttgaattttaatatttttattcatatctgctcttattgggggatgttatcccaatatagaactaaaatacgaaatagttatgtatagtaatttttctacatgcctttttttattatctgattatcattgtgttataataatttcaaagatggtacttcacataatgatttactactcatatatcaacgcaacaggattctacatccccgaaaaacgcatcggcaaccactattttgccatgttgaacggcgtgaccgacgaatggatcgcgcagcgtacaggcatccgcacgcgctcgaaagcacgggatacggagacctcggattcgatgggaatccgagccgtgaaagatgccctgccgggccttccgtatggcatccgggaggttgatctgatcgtttcggcctcctatacgccctacgatacgatctgtacgacggcccatcgggtacagcacgagttcggcatcaaggataccgcggtgttccatctttccgccgcctgctcttcattcgtcaatgcgctggaagtcgtcgagggctatttcgccgcggggaaggcttcgaaagcccttgttcttgcggcagaaaagaattcggcctacagcgacgaaaccgatcccaaagtcggccatctgtggggcgatgcggctgccgcatttttcctctcccgcaaacgtctctccgacagggatgccgaggtatgcgatgtccatacgcgcggactcggatttctgcccaaggcgccggaggccgtgaatctgcgtcccgcgcaggacgggctgacgatgagagagggacgcgacgtatttcagaaagcgtgtgtctatatttccgaaaacgtacttcatattttgcggaaaaacggatacggattggaagatctgaactatctgattcctcatcaggcgaacatgcgcatcattcggacggtcgcccgacagctcggcctgccggaagagagatgcctgcacaatatcgaggaggttggcaatacgggttcggtgagttcggcgctggtctatgcgcagtgcgaatcgattttcaagaaagacgatttaattattctgtccgtattcggcggcggttattccacggggagttgtttgattaaatattgaattatgagagaaggtttcatttctccaaaccaaagaaacagcaacttctgaccatcgatacctcatcgatggtcgaataaatatactgtttgcacaatggccatgcacttgactaaatgttagtgatagttaattttaccatattgtatagattctttacctcatgaacaagcatgaacttatacaagcgatatcccgagaaattgataatgatatttctcaggaaaaaatcaagaaaatactgaatacaacagttggtattgtttccagagctttgaatgatggtaaatctgtaaaatggtcaggattcggttctttcgtcgttaaggacattccacccaaacggctttactctccttcattgaaaaagtatatcgtaactgaaggggtacgaaaaatcgttttcgtggaaccccgtcggaggaaataagacataggattcatttatgaaacgacctcggtactgttggtgccggggtcgcttttgttgtaaccgtttccggctgccgtaccgctattctttgatgtaactctaactgcatcaaagaatgaaactacttctcagacgcaaatacaaggcggaaaactataccatcggcgacctgtcgatcgacgggcgtttcttttgccataccatcgaagataaagtccgtgaattgcctgcccggtgtcccgatacgccgtcgggacgctcgtgtcgctgcaaggagaaagtgtatgcctgcacggcgattccggccggcacttatcgggtgacgatggaatactgtgcgcggttcaagcgggtgctgccgtacctgcatgacgtgccgcattttttagggattctgattcacagcggcaatacggaggaggattccgccgggtgtatcatcgtggggaaaaacacggtcaagggcaaagtcaccgaatcgcgcaagacatcggacgcactgaatgcccggctcgccaaggcttccgacattgaaatcgaaattgtggaagtatggcgctgaagaaactgaaggctcccgaaagtctgaaaatcgacttttgtccgtcgcccaagcaatacgaactctggaaactgctccagcccgaatgcccgttgtgcggcggcgaggtggagcagatgcttatcgggtatgacgccaaccacaatccacgttacaaaccttactgcaagcgttgcaacaaccagaacattccgcagttggttctgggaggcggagctgccggcggcggcaagtcgttcgtatccagcgtgtggcttgtaagcagttgtatccgcttcccggatatccgtgccgtagtggcccgaaagacgctgaaaagcctgaaagaatcgacgtggaacaccatccgcatggtcatcaaacaatggggactggtggaagacgagcactatcacatcaacaacgtggccggtacgctgcggttctggaacgattcggtcatcatcatgctcgatctggccgaccagccgtccgaccccaatttcgagcggttcggttcgatggaggcgacgattgccgcctgcgatgaggtgtcggagatcagccagaaggccatagaggtgctgttctcgcgtctgcgctggaagacccacgaaaccttcaaggtctcgaaaatgctgctcacgacgaaccccacgaccaactggatacgtggacggttcgtgcaggacgacaacggcgaccgggtgacgccccgtgagggggaagcctatgtgccgttctcggtgttcgacaaccccgatatcgctttccgccagacctacgaagccgctctgaacaaaatcagcgaccaggcaacgaaagaacggttgctttacggcaactgggattttgttgaggccaacgacatggctatctacaaccgtttcgacggagccgtgcatttggtcacggggctgaaagagcaggtgtacgaccccatgcggccgctgattaccgtgtgggatttcaatgtggctccgcacatgagcgtgctgcttgcccaaattgactacgacacgcggaaagtctatattttggaagaggtattaggcacggctgccgccaaagagaacaacacgccggcattggcccgccggatgaaaaagaaactgcttctgaataaacagatcggcggtgtggacgtaacgggcgacccggccggattgcaacgctccacagcgtccgaggacggtatcaacaactttacggtcatctcggaaacgctcgaacaaggcgtactgcatccccgcgtgaagctgctcaagaaacaacctccccagattacgcggtgcgagttcgtcaatgaactatttgacggttataacggctgggagctgcgcatcgacctgcgctgccgcaaactgacggaagacctgatataccagacgaaaaacgaggacggcaccaagtccaagcagaaggtgaccgacccgaaaaccggtgtgaaatacgagaagtacggccacctgtccgattgcctggattatctgctctgctactacctgcgtgatagctggcacaagtacaaaaacggcaatgcgggaaactaccaggtggtatcgacggcaatgcttcatgatggattcaactattaaagaaaaagatgatacatgtacagaagatttcttaataacgaggactattggggcatcatcacgcaagaggccctttcgcagatgaccagagggaacagcgaccggtttatccaggcggaggagtcggccgagatgagcattgtggagtatctgtcggagaactatgaaatcgagcgggaactcggcaaggggaaatatatcgcggaatacgaccgccggattacgtttcccgtgggggcgcatatctaccatgaggggacgatttgcgaggtcatccgctccatgagcggttataaaatgccggcggtaaagatctactggcaggaacatgtggatgtcaatttggacacggcaaccgtcgagcgttattcgcagttcggcacctattatccgaatgacctcgtgctgtacaacgatgcggtgtatatctgtacggccgagaacgggtataagttcagcgagatccgcattccgatggtcgagggctggttagaggcggaatataccttgtggcagccgataaactacctgctgtgggatgtggtggagttcgagggagcgttctatacgctgatgacattggacgggttcgacaataatgtcacgccgatggaatccgactgctggggagccattgcggactacgatcccgcctataacgactatgagttttcggaacacgaatatgtggtgtacgaggggcgtgtgttctatcccggaacggatgttaatgccgacctgccgcagcgaggagtgaacctcacgccgcatgacccgcgcaattacaacctgaagaaacacatggtgcggctggcgttgtacgagctgacgaaactcatcgccccgaataacgtgagcgtagtcaggatgcgggattacgaggattcgatgaagtggctctcggatgcggcaaagttgcggttgaatccgcagattccccgaaaagtggcggaggacaacaagccagtgacggactggcagctcgctacgttccagacggactacgacccgtggaaaaatccgtggatgacgtgattttttgttctgttcaagtctttttgtatatatctgaatgcagccagttagtaatcaagtatttgcctgatttgtgatttgcaaaagactgtatgtaagcatctgcatctgattgcggaagtgttaattatcagcggtttattacacgttttttcattatctttgcattcgtaaaacgaatatatcactaaaaaaatatcgagcattatgacaaaagctgaaatcgttgcagagattgcaaagcagacgggagtggaaaagacggtagtaacgaatgtcgtggaggcgtttatggaaagcgtgaagggttcgatgattactggaaatgaggtgtttctgcgcggattcggcagcttcatcatcaagaaaagagccgagaaggtagcccgtaatatctcgaagaacacgacgattacgattcctgcgcataacattcctgcgttcaagccggccaaatcgtttttagccgcagtgaaggaagctaaatagcgagccaagcgtaaagcgaaataaaggatttgaaaggcgtgggatggttcatttcacgccttttttgtcggcaggcttttgttctttgtcgggaatacaaatgaatgccgtgtcggagaaggttacttctgcggcttcgtccagagagaaaatgccttcggtgacgagttgctgcatgatttcccgggcttgttgtacacgggaagagctattaccggtaacaggttctgattgcgatgcggacgggtgtttctggtttttgtccattgccttgtaagggtggctgttgcccctacagaccggttatgttattgatacgaaaagcgtgggacatcagcttgccgtaatcgaggttctggtaaaccctacacataacaagtaacgcccacgcataacgtgagcattcagtcttgttatcccatgtgtagtgaatttaccagattccgatttacgggataaaagccaaacgctttccaatatttttcttaaaacaccgcaaagatagcgattatttgccgtgtttgcataaagaagccgcaagaacttatgaaaatacctcatttatcagttcttacggctcgttttccagtgtccgaaaactatatatgtcagcggactttgtacaaggcaatcagccggccgttttgcatatcggcgatgaatgtaccattgtagagggtgcattcgtggatgtgcgtatcttcggggtcggattgaaggagggattgccgggcggtttcgtcgattacctgcatggcaacaccttgtacggttgcggtggtggcatcgacgggcaacatcctaagctgctccaagagcgatttttccattgacctgaatgttgagaccttatgtccctctcaggtccggttatacatgcgaaaagcgtgggacattacacttgtcgcaacacaggctctggtaaaccttctcccgcaacagataatgcccacgcataacgcaggcgtctatctatttgcattgcgggagatcgaaatttaccagacttcgtgttgcaaagcaaaagctaaacgctttctaaaatatcttaaatctgttgcaaagataggtattctgcctgaaaaaacaggaaatataacaaagaaagctatcggaattttcccgatagctttcctatttgatagttggttgtacgttattttgttcttgacggaacaaacgtgattcgctttgtgcctttggaggtggtgtattttcccaaataagtggaatagaatagtcgaggcggaacgtctttcatgacgaaagaaccgaatcctgaccattttacggattcgcctgtcgcaagagtgcgcttcgtgatttcgacagttttatcgagcaccaaagcgactttgtcttgcgacatgtgcgggacaagttcccgggatatagcgcggatcagttctttcttgttcataccgcatttatcgaaataaactttattgatgatatatttatataatatctccggctttatcccaaccttgttgtaataacagactgatagtcgatatgcaggtaaaaattgttttcagtcattaaactgccgaccaaaagacgttgattccttatctggtagcggagatataactggcttaacaaagtaatattcacgctccaatcctgattgtcgaaacgatgcctgtaagagaaacccagcatgaatggatacgttcgattcagtcaatgggtgtatgctttcggacatcaccttcaaactatgcgaactataacttcagacaggtgcctatttcttcctcgcctgcttgatttaccgcaagtagatcaagttgaaagcgaaccgatactatctatttgtttataaaacagaaattttgtatgtcagatggttttcgaaatgtccgtttcggattaatgaacgtccgatatgtcgttttaatatacgaatggtattatcgtacaatccatgagtgaaaaagataactgccgtatcgtgcagaattagttgctttgctacacgaaataaacaagacaaaacaaatggaaggatacatttcacaaatcattggccctgtagtggatgtccatttcccggatgtggaaaagaaacgacaactaccggccatcaatgaggcacttgcgattcgtagagagaatggtgcggagctgattgtagaggttcagcagcacatcggcgagcatacggtgcgcacggtggcgatggattccaccgacgggctgcggcggcacatgcgggttacgccgctcgaccgcgcgatttcgatgcccgtgggcgatcagatcaaaggccgtctgatgaacgtcacgggagagagcatcgacggtatgcgcgggctcgaccgcacgggcgaggcttcgatccaccgcgagccgccgaagttcgacgaactggccacctcgcaggaggtgctctacacgggcatcaaggtcatcgacctcctggaaccctatgtcaagggcggcaaaatcggtctgttcggcggcgcgggcgtgggcaagacggtgctcatcatggagctcatcaataacatcgccaagggccacaacggcttttcggtcttcgccggcgtgggcgagcgcacccgcgagggcaacgacctgctgcgcgagatgatcgaatcgggcgtcatccgctacggcgaggcgttcaaaaagagcatggaggagggtcattgggacctctcgaaggtcgattacgacgaggtggccaaatcgcaggccacgctggttttcggccagatgaacgagcctcccggagcccgcaagtcggtcgctctgtcgggccttacggtcgccgaatcgttccgcgacagcggtgaggagggggcatcgaaggacattctcttcttcatcgacaacatcttccgtttcacacaggccggttcggaggtttcggccctgctggggcgcatgccctcggccgtgggctaccagccgacgctggccaccgagatgggtcggatgcaggagcgcatcacctcgaccaaacacgggtcgatcacctcggtgcaggcggtctacgtgcctgccgacgatctcacagaccccgctccggccacgactttcacacatctcgacgccacgaccgtcctgagccgcaaaatcgccgagctgggcatctatccagccgtcgatccgctggagtccacctcgcgcatcctcgacccgaacatcgtgggcgcggaacactatgaaacggcccagcgggtgaaacagattctgcaacgcaacaaggagttgcaggacatcatcgccatcctcggtatggacgaactctcggacgaagaccgcacgatcgtgaaccgcgctcgccgcgtgcagcggttcctttcgcagcccttcgccgttgcggaacagttcacgggggttcccggagtgatgacgcccatcgccgagacgattcggggctttcggatgattctcgacggcgagacggaccacctgcccgagcaggcgttcctcaatgtgggtaccatcgacgatgccatccgcaagggcgaagaattattacggaaatcgtgatagcgaaactttaaaaacatgttgatatgcagcttactattgtggctccgtgcggtgtattgtgccacacgaccgtcgaaaaagtctccttgcccggagcgttaggggcttttaccgttttacccggccatgctcctttgattgcccaactgtcagaaggcaaaatatcctacacgagcgggccaaaagaacatgaacaggaaatccggcgaggttttgtcaaaatagagcgagacacggtggaagccaatgtcgaactcgctgaaccttgatcgcaaaaataaatatcatgcaatggaagtataaaatattgttttttatcgctttgctgccgcttccgtttcgtgcggcagcggaacagtcgggtcccgatgtgatcggtgtagtgatggagcatatcggcgacagctacgaatggcacatcacgaccgtgggtgaacgggaatggactgtccatctgcctgtcatcgtccgcagccgcacgaccggctggcactgcttctcctctgtgcggctgcacggcggtgccgaatacgagggactgcgcattgcctccgaaggcgattatgcaggtcgcatcgtcgagcggcaggccgatggggccgatgtccggccgctggacctctcgattaccaaaacggcggcggggctgctgataaacagcgcgctgttcgtcgcgctcatgctgggtgtcgcacgctggtatcgctgccataaggcgaccgaggaggcgccgcgcggggcggtcgggctattcgagatgctctgttcgtcgctgttggacggcatcatccgcccctgcgtcggagaacggtggcacaagttcgcgccatacctactcacggtctttttcttcatcctcgtgaacaacttgatggggttgataccgattttcccagcaggtgcgaatgtgacgggcaacatcgccgtgacattggtgctggccgtggccacgttcctggccatcaacctcttcggaacgaagcactactggaaggatattttctggccggacgtaccgacgtggcttaaagtaccagttcccatcatgcccctgattgagttcgtcgggatcctgaccaagccgttcgcactgatgattcgtctgttcgccaacattatggcgggccattcggtgatcctgatccttacatgcatcgtctttgtcacggcggaaatgggggccgcggtaaatggttcgatgaccgtggtgtcggtgttgctcagcgtcttcatgaattgccttgaactattagtagcattcctgcaagcctacgtcttcacgatgctctcggctgttttcatcggtctggcgcaagaaacacctcatacggaacaaaatatagaaaccaaataaaacacaagtcaaatctcaaattaagttgaattatggaaactttaggaattttcggcgctgccatcggtgcagctttggccgtcatcggtgcggctttcggtatcggtaaaatcggttcgtcggccatggaagccatcggccgccaacccgaagcggcggacaagatccgcacgaacatgattatcgttgccgccctgatcgagggtgtggcgctgttcgccgtggccgtatgtttcatggcattgtaatctttaataacagcaaccatgggactgttacaacccgaatcgggattgctgttctggatgacgcttgcgttcggtacggtgtttttcctcgtagcgaaattcggtttcccggttatcgtcaaggcaattgatgatcggaaacattacatcgattcgtcgcttgcagcggcacggaaagcccggcagcaactctccgaggtcgaaacggaaaaacgcatgatgctgatggaagcggaggctgaacgtacaaatctgcttcgcacagcttctgcggaacacgaacgtatcctgtcggaagcacgggatcaagcggctaaagaacgtgtgcggctggtagcggaagcccgtgccgaagctgaagcggagcgggaagccatattgcaggatgcccgccgacaggtcgccgtgctcgccgtggcgataacagaaaagatgttgcgacgcgaattgcaggacaaaacatcgcagaccgtactggtagaacaactgctcgatgaaatcgaacacccgaaaaacagaacgacatggacaccggattgatagccaaacgttatgccacggcattggccgactttgccgccgccaatgacgaggagcaaagggtttatgatgaggcgtggcatttgatcgccgtttataagacagaaccgtcgcttcgggatgctttgctttcgccagtcttgcctattgcagcgaaagaagcgcttttccggcaggtactggatagcggtagcagtcgcacgctggatggattcttctcgctggtgttacaccgccgtcgggaaaagtatt

SEQ ID NO: 828 - DNA, 19300 bp, unidentified
  source 1..19300: mol_type = unassigned DNA
  misc_difference 9813: note = a, c, g, or t
  misc_difference 9814: note = a, c, g, or t
  misc_difference 9815: note = a, c, g, or t
  misc_difference 9816: note = a, c, g, or t
  misc_difference 9817: note = a, c, g, or t
  misc_difference 9818: note = a, c, g, or t
  misc_difference 9819: note = a, c, g, or t
  misc_difference 9820: note = a, c, g, or t
  misc_difference 9821: note = a, c, g, or t
  misc_difference 9822: note = a, c, g, or t
cagcagggcgcggctcaggccgtgacggatagcgccagcctgaccggaaacaccgccgccggaaacgcggacgacgacgtcatacttgccctccaggcccagcaggaccagcggagaacggacgatcagcttcagggtctccagaccgaagtagttgtcgatatcacgatcgttgatggtgatcttaccggtgccggtgtaaacgcgaacgcgggcaacggaatccttacgacgaccagtgccgtagaaataaggtttggtttcgtacatattcgattgcctccttcttagaactcgatcttctcgggcttctgagcagcgtgagcgtgctcggcaccctggtagcagtgcaggcgggtcagagccttatcaccgatggtgttggaagggatcatgcccttgatagcgtaggtcatagccagatcgctgttctcagccatcagcttgctgtactggaccttcttcaggccgccgatgtacttgctgtgggtgatgtggaacttctgctcggccttcttgccggtcagaacagccttgtcgcagttgatgacaaccacgaaatcgccgcagtcaacgttgggggtgtaatcgaccttctgcttgccgcgcagcagaacagcggcctcagcagcgacgtggcccaggctcttgccggtagcgtcgagcaggtaccacttacgctcgacttcagcgggctttacgagagtagtgctcatatctatttcctcctgataagctttttgtacgtttcaggcacccttttggggcgcgagtgtcagtatacaacacaaaaacgcgcctgtcaacatgatttttggattttttcggtggaaatttttgaacctctcaaaatcgcttgttttctctcaaatcctcccgatttctaaattccgatttttgtaaaagttttttgcccgccccggcatatttttgccatttgcccgctacaaatcccgctgcggttgtggtatactataaaggatatgggcggtgcacagctgcccttgccaacacaaggagaacacatccatgccaaatgagatcgaccgcacttcttcggcgcagcgccgcagctccaagctgctgacggcgatggccattttcatctgtctgggcatcgcagcctacatggtgctcaccctgctggtgaaccggcagacccccgcgacacctgacacccactataccggcacgaacggcgtctctgtctactacgacagcagcgtgtggagcgtgtgccgcatgaccgaggacgcaaccctcggcaccgtgctggagctggctaccgccgacacggcagacagcgaggactatcaggtcgtgctgttgcagcgcggcaccgccgacagctacgaaaactttatcgaggactcggaagccgacctcaagcaggcctacggcgtcatcaagccccgcaaggtcaacctgaccgtggagggtgcagcggtagaggcggtgcgctgcgatatccgcacctactacgccgtgctggccaccatcacctacgacagcggcgatgtggtctatgtctcggcgctgacaaagctggcgtccatcagcgatgtggtcaatctggtagaaagcgtgagcctgtcatgagtgatcttcgtgcaatgcagcggctctgcggtctgatgcgcaaggccgtacaggactatgaaatgattgcccccggcgaccgggtgatggtgggcgtttccggcggcaaggacagcgtggcgctgaccatcggtctttccatgctgcgcaagtatatcggcttcgattacgaggtggtggcggtcacgctggacccgcagttcgaccatcagcccatggactactccgcgctggcagagctgttccggcagcacggcatcccctacgaggtgcgccgcaccgagatcggccctgtggtgttcgagtaccgcaaggaaaagaacccctgcgccctgtgtgccaagctgcggcggggcgcgctgcacaccgccgcgcaggagctgggctgcaacaaggtggcgctggggcatcatctggacgatgccgtggagaccttttatatgaacctctggcgggagggacgcatcggctgcttctcgccggtgacctacctctcccagcgggatctcaccctcatccgtcccatgctgttggcaaccgagtacgaggtgcagtgcgccgtgcgggaggcgggcttgcccatcgtgaaaagccgctgccccgccgacggcgttaccgtgcgggaacagaccaaggaatttgtgcaggagcgctgccgtaccgaccacgccttccgccaaaagaccctccatgctttgcaggagagcggcattgacggctggcgtcccgtccacacgggccggggcagctttatcgtaccaaaaaaggaaacagatcatgcagaaacaaccgtttgaaaaacacgtctgggctgagatcgacctcgaggcccttcggtataatttccgggaggtaaaggcccgggcaggggcactgcccctgtgcgcagtggtcaaggcggacagctacggccatggcgcggtacagtgcgcccgggtgttcgccgaggagggcgccgcatggctggcggtcagctgcctgaccgaggctgtgcagctgcgcaaggcggggcagactttgcccatcctcattctggggcatgtacagcccgcctacgccgccgccttgattcagaacgacatcaccgtggcctgctactcccttgcgcaggcacgcgccttgagcgaagccgccgtggcggcaggcggcagggtacacatccacctcaaggccgacaccggtatggggcgcatcggctttgccctgcgcaccgattttgacgccgccatccgggagatgctggaagcctgtgcgctgcccgggctggaaatgaccggcctgttccagcatttttccgtggccgatgataccgccccggagaatgtggcctacaccgccgagcagcacgcactgttcgtgaaagccttccacgcactgaaggccgccgggcgggagcctgcccttgtgcactgcgataactctgccggggtcatgctgcacccggactggccggagggactgccccgggagcgctgcatggcgcgccccggcatcatcctgtacggctacgaccccagcgacgaggtgcgctttgggcgctttaagccggtaatgacccttaagaccgtggtgagcatgatcaaggagatgcagcccggccagtgcgccagctacggccgccgctttaccgccgaaaagcccaccaaggtagccaccctttgcaccggctatgccgacggctacccccggcttttgagctgcggcaagggcgtggtggagatccacggcaaggcctgcccggtactgggccgggtgtgcatggatcagatgatggtggacgtgaccgatgtgccggaagtgcgcgaggacgatgaagccatcctgtggggcggcaccgtgagcgacaccgcagagaccattgcccgcaagaccgacaccatcccctatgaagtgctgtgcggcgtttcccgccgcgtgccccgcgtctaccgcgaccacggacagatcgtggccgtggaggactggatcttagaagcataaagctgcccggaggaactacatggcaagagacaacatccgcaacttctgcatcattgcacatatcgaccacggcaaatccaccctgtccgaccgcattctggagctgaccaagagcgtggacgagcgcaccatggaggaccagatccttgacaacatggatatcgagcgcgagcgcggcattaccatcaaggcgcgtgccgtgaccatgaactatactgcaaaggacggcaagacctacgagttcaacctgatcgacaccccgggtcacgtggactttgcctacgaggtcagccgcagtctggccgcctgcgagggcgccattctggtggtggacgccacgcagggcgtggaggcgcagacgctggcaaacacctatatggcactggagcacgatctggaactggtgcccatcctgaacaagatcgacctgcccagcgcccacccggacgaggtggcgcaggaggtggaggacgtgatcggcctgccctgcatggacgcgccccgcgtctccgccaagactggcctgaacgtcgatcaggtgctggagcgtgtggtcagcgatatccccgcccccaccggtgacccggacgcacctttaaaggcgctgatcttcgacagcatctatgacagctacaagggcgtcatcgtttacatccgcgtgttcgagggcacggtgaagcccggcgacaccatccgcatgatggctaccggcgcagagttcacgctggtggaggtgggtcacatgggtgccacctccctgaccccctgcgcccagctgcaggccggtgaggtaggctacctgaccgccagcatcaagacggtgcaggacacccgcgtaggcgatactgtcacgctggcagagcgccccaccgcagaagcgctgcccggctaccgtcaggtcaagcccatggtgttctgcggcatctaccctgccgacggtgccaagtaccccgacctgaaggacgcgctggaaaaattgcagctgaacgacgcctccctgacctttgaactggagaccagcgccgcgctgggcttcggcttccgctgcggcttcctgggtctgctgcacatggagatcatcaccgagcgattggagcgggagttcgatctggacatcatcaccaccacccccagcgtgcgctaccgcctgaccttgaccgacggcactgtggagatgatcgacaacccctccagctacccggaccccagcaacatcgtcaagcaggaggagccctttgtggatgtgcatctgtacactcccaacgactatgtgggcggcctgatggatctgtgccagagcaagcgcggcgtcctgatcgatatgaagtatctggacgatgtgcgtgtggacctgcactatgcgctgccgctgggcgagatcgtgtacgacttctttgacgccatcaagagccgcagccggggctacgccagctacgactacgagttcaaggagtaccgcgagagcgatctggtcaagctggactttttgctcaacggcgacctcgtggacgccttgtccatgatcgtgttccgggacaacgcctacgccaagggacgccgcatctgcgaaaagctgcgggacaacatcccgcgcaacctgtttgagatcccggtgcaggcagccatcggcggcaagatcattgcccgcgagacggtcaaggccatgcgcaaggatgtgctggccaagtgctacggcggcgatatctcccgtaaaaagaagctgctggaaaagcagaaggaaggcaaaaagaagatgcgtcagctgggcagcgtttccctgcccagcgaggcctttaccgccgtgctcaagctggacagcgacgacgattgatctgcaaatatacaaaagggatgctgcgtgcgcggcatcccttttttgatgggaacttccaaatgtgaaatccgctcatggcagagacgcactctttgcttttcctactaaatatgttataatttatttatatatcagtttttgtatccgtttttggagagatgggctgcggccttgtgctgcgcccttctctatgcaacgttccccggcagaaaggatgtggcctttatcaaagcaaaacacggaaaaggcgcagcgcaaaacagcagacacacacacagcggcagctgcgcacagagggcaacgcccctctggaagcaggtgctgctgacgctgctggttcttgttgccctgctcaccctgctgggcggggcgctgtggcagaatatctgctataaccgcacccactatacggcagagttctatcagatccattcccgcaagctgacccagagctgccgggtcgtttttctgaccgatctgcatctgcgggagtacggagcagataactgtgagctggtgcaggatgtccgcagccttgccccggatctgatcctgctgggcggcgactttgtgacctacggcgaaggcaccgactatgataatatgctttccctgttccgtcagctgagcgagattgccccggtatgcggagtgctgggcaaccacgaggacgagctgtattttctggacaacgaccgggaactggtggaaaagtccaccgccgccggggtgaccgtcctgcgcaatcaggaggcgcgctataccatccacgacaatgttatcagcattctgggcgtggagggcagcccggcggatttttctaactacggtgccagcacctttatggacagcgtggagccgcagacagactacgacctgcgcatctgtctggcacacgttcccacctactttcccgagcatctggaaaactattcctttgagctgggactggccgggcacacccacggcggcatcgtgcgtctgccgaagatcggtccgctttataccgccgaggagggctttctgcccgactatgccgggggcagttatacacttgccaacaacgccaccctcattgtaagccggggactgggcgattccagccgggcgccccgcatcaacaatgtgccggagctttcggtcattgacatcgactaagcagcctgcgctgcgcgtgcaggccgctgcaaaagggtagaatgccatggatgacatcaaagaaaaaatcaaacaggcgctacgtcatatctggacaaataaataccgcctgtttctctgcctgctgaccttgtgctgtctgttcgggctggttcactatttcaaaagtgcggacagcgccactgccagcatctccttcaattactccgaggcggcgcttggcatgaaccccaacaagacccgcttcaacgcctacgagatcgtgtcggacgaggtgatggagcacgccatccggcgggtgggcttgcaggacagcctgactgcctcccagctggcagagtgcctttacctgatcccggacggcaccggcagcgccaacggcagcgagtatatcagcaccaactactatctctccatcaacacccgcaagctgaacctgggcaaccgtaaacccacagatcttttgcagagcgtgtgcgaatcctaccgggagatctttctgagcaactactgcgacaaccagagcatcctcaaggaaaagctggaagtgaccaccgcatgcgagccttacctgcgactgaacgagctggaggtgcgcgccgccgcgctgaaccgctatctgaacgcccgtctgggggaaaacaaaagctttacggacgaggcaaatcccgacccttccaccaacaactttaccacactgggcaaaatgatcaacaatctggtggattacgacctgcccaacgccatggcctttgtcatcgagggcggcgttgcccgcgacccggccatgctgaccagcattctggaatacaagaacaagatcgacgatcttgccatgcgcacccagcaggcttactatgacgcggacaaacagggcatttccatctacgaaaaatccatgacctccatcatgatgatccccaccgtggatgaagcgagcgagtactatatgtcccgcaccaagaccgccatggatgcgctggcgcgggcggcagacgcttctctggccgatgccactgactaccagtccgagatcgtgagcacgaattatgtgatccagaagatccgggagctggatgccggtcagccgcgtctggccgaggcgcaggccatggtgaacaagctggagaccgccatcaacgagatctcggagcagctgtttgtactggacaaggcgtatatcaagtacaaatcccagaactatattacctttacctacggctcggcctccttcctgcagcgcctgagcctgaaaaagaccctgatggagtccgttgccgtgatgctgggcagcgcatggctgctccacgaacgtaaacgcagaaaggcaaggcaccgcagatgaaaaagtttgagatcctgcgctatctgaagcgtttcagcctgctgatctttctggtgtcgctggcaggtgcggccgccatctacctgtatgcggacggtcggcagaagtacactgcatcggtcattatccgctataccaacgacggcatctcggacggctacaccccggacggcagtgagctggacgtcaacgagatctactcctccaccgtcatctcgcaggccatggatgcactgggtgcttccgggcggctgagcaccatccgttccaacatctcggtgaccccggtgatctcggaagatcagcagaccatcaacgaggcactgctgcaaaagggcgaagaggtgacctatttcccggatacctacaaggtgagccttgtggtggatggagagcagggcgcgggttatgcccgcaatatgctggatgccatcatccagagctactgcacctattatacggaaaaatatgtggagcagaaactctcgctcaacccctcgtccggcctgctggataacggctatgactactacgagtgcatccgcattctggaaaacgataccaacgagatgcaggactatctgctgagcaagcgggagcactacccgaattttcgctcctcccgcaccggctacacctatgcagacctgtgcgatatctattccgacttcaaaaaatacaccatcccggcgctgtacgcctatgtgctcaacggcccgcaggtgcgggacggcacggtgctgcaggaatatctggccaacaccatcgaaactgcaaagcagaacgaacagatcaccaccgagcagcgggacagtctgtggagcctgaccgaccagtatgtgtacaagaacgccgatctgctgcaaaactactttactgaccggggcgaggtggtgtcctcggactatatcctgaataacatcgagctggaaggtgctggcgataaggcacagaccacctacgacggtctggtgctgaaactggtatcgctggaacagcaggtcgcatccagccagatcgaccggcagtttcaggaggagatcctgcaaagcttccgcaacgtggattttggcggtacaggcgagcagcacgccaagatggaaagcatgatcaacgactacgaggcgcagctgaaaagctactacgagatcatcaataccagcagcaaggagctgaacctgtacatcagcgcggattatctgaagatgatcagctcggtgcaggtggctgccgccatcaatgtcaagctgtatctgatgctggcgctggtgctgttctttgtcatcggctgctgcggtgcaattctgctgggccgcatctcggatgcggtggattatctgctgtatgtggacaaaaagaccggtatgcccaaccgcgaaaagctcaacgtgtatattaccggcatggccgaccgcatcctgccggaggactatacctgctttgctttgcagctggacaacctgaccgagatgagccgccgcttcggctaccatgtgggtgacggcatcctgaaggatttttccggtcttttgcagctgatgggcgataccgacggcacggtgggctacaacggcgcgggcaagttccttgccttctttgatgaatgcagcacccggaaggcagaggtcatgatccgcatcctgcaaagtcaggtggacgagtacaataagctcaacccggagtaccccatcctgttcaccgccgcatgggccaccacctcggaggaggagctctaccatgtgcgcgaccttgtgcgctgcgcacagaaaaagatgtccctgatcgcagaggagggcggcgctgtccttgccggaacggagcgtggtgaagcatgatccagaaccgacgcgcttatcagctgatccactgccgcacccgcagccgtctgctggcgggnnnnnnnnnntgccgccgtgtgcggcgcagcctgcggccatgcagaccttgggctgtaccatctgctgcaccggggcggtgccccgctgccggacagcacacaggccgaccgcgccgcgctggcagccctgtgcccgaaacctgcagcagaagagacctgcccgctgctgccgccgcaggacccggcggtgaccctttcggtcattgtgccggtgtacaacggcgaagctaccatcggcccctgtctggacagcattttgcagcaggagaccagctgcaccgtgcagctgatcgtggtggacagcgattccaccgacggcacagccgccgtgctggaacgctaccgggcactgcccggggtgttgctgtgcaattgcagtgcgccccgcagcgccgccgcccgcaacgagggactgcgccacgccgtgggccgctggctgatgttcgtggacagcgacgatctgttattgcccggtgccatccgcaccctgctggaggccgcacagcgccttgacgccgatgtggtgcaaggcggctggcagtacctgtacaccgacggcacccacggcccggtgcagcgctacccggcggcagtctacaccggtgccgccgcgccggagcggttcgagctgcccgggatgccatggggcaaggtgtaccggcgggaactgtttgcacaggtgcgctttccggcttactatacctgctttgaggatgccatcatccattttctggtattccggctggcaaagactgtggcctctgtgccggagatggtctatctgtggcgcaaaaaccccaaggggcttaccgccacaagtcagcaccgccctgccgccgtgcagagctactggatcatggagcagctggcagtgcaggatgctgcgctgggcctgccccacgatgcgttataccgctgcaccctgacgctgcagctttcggctttctgctatgccactgtatccggcctgccgccggaaacgcagcaggctgttttccggctgtgctgtgctttgtacgcaaaggcgctgccgcaagagggcgcactgccccgccgtgcccgctggggtgcccgggcgctgcggcagcaggactttgggctgtggtgccgctacggcagaagatttcagttgttataatataaggagtacccatgatacgagtgctgcattcggtcagcaatatggaccgcggcgggatcgagaccatgctgatgaactactaccggcatatcgaccgcgaaaaggtccagtttgattttatcgtcaacaagcaaaagcccggcgattacgacgacgagatccgccgtctgggcggacatatctaccagagtccgggattaaacccgctgcactacccggcgtatctgcgctttgtgcagcagaccgtggccgcagacccccgcatccgcatcctgcacgcccacaacgaggcgatggggctttatgccctgaagggtgcggagaaggccgggctgcaagtgcgcattgcccacgcccataatatctggatcgtccgggactacaagtggccgctgaagatgttctgtaagcagctgctgcccggcgccgccacccacctgtgggcctgcggccgggatgcgggcatctactactttggcaaagcggactgggagcgccggggacagatcattcccaacgccatcgagccggagaccttccgcttctcccccgccgtccgcgccgaaatgcgggcgcgctacgggctggaggaccgggtggtgctgggtcatgtaggccgctttgatgtccgcaagaaccacgagcgtctattggagatctttgccgcctttttgcagctggaaccccgggcgatgctggtgctcattggtaccggcaggctggagcaggctgtccgcgcacaggcgcaggaactgggtatcacagaccatatcctgtttgccgggttgcaaagcaatgtggccgactggtaccagatgatggatctcttcgtcatgccctcccgctttgagggtctgccggtggtggggatcgaggcgcaagccgctgggctggggtgcgtattttcggacgcagtgccggcggaggtgctgctttcttcccatgccatccagatcccgctttccgccagcaatgcagactgggcagcaggcttgcagcggatgctccaccagccctgcgaccgctctgctggtgcagaactgatccgacaggcgggctacgatatcaacatcgccgccgcccgcttgcagcagcagtacctgcaactgggagggcaggcgtagccccccggcggctgcgggaacacccacaataaaaggagagcccttttcatgcgcacattggatcagatcctgaccaaaaaggattacagccggaaaactccggcctctttgttttataaggacagcccgctgtggcaaaaactgctgaccatcggttgcgtggtctttttggccggtgccgggctgggagagtggaaaccaatcaacagcgcagtgggcggccttcccaaagccatctctctgggggtgatcgggctggcaatgctgtacaccctgttttacccggacgaaaagcgtctccgggagttatggaagcctaccctgctttatatgtccctgatggcggcgctgtttttctggtcgatggtcatctggatcgaaagctttgccgcagtgtcttccatgatccgaagctgctccaagatcgtgttccagagtattgccatcctcactgccgtggcgctggtctatctgttccgggaaaaagccatcgagctgtttaccatcagtatctgcattgccaacacggccatcatgctgctgagcattcctggctacggttttgcagccagcatccagtctctcgttacctgtctgatcaccttcggtgatgcggatggctatgcgctgcagctggagattcacgacctgacctttgtgttcgggcagatgatcttgtactacgccgtttttgctcctcgtactacccggcaggaaaagcgcaagcgctggctgtatctgctgctctgctgctggttttttctggtcggcatgaagcgcatcgccatcccggcggtggttctgttcgtcctgattgctctgcttctccgcaagcgcaaagtccccggctggttttacccggcagtgggcgtctgctgcatcctgttttttctggcattcctctactgtgtgcgctacggtgttatttcaaggttgctgaacagttttggcattgacatgatgggacgggactacctgtggagcatggcgaacccctactatgaattttctatcacctatatcggccgcggttttgaatatgtggacaccatcatcgcccagtggtataatgacgggctcatcaaccagccttaccccttccacaacgacatcctgaaggtctttgtagaggtaggctttccgggttttctgctctggtccagcatccagtatgttctgactccgctgttctggcagcgctatgcagaccaagagaccacgttgctgtatctgtccgagctaggctatatgacggtgacctacctgaccgataataccgccttttatttctggagcacgatggcgctgcgtctggtgacgcttgcctacgccatggagcgcaaaaagcccccggaacccaaggtgtggatgccggacagtcggcaggagatgcgggaccgcatccatattctgatgaaggaagtgtgacggcaaggagtgaaaacaatgccctgtatctcgtttatagtgcctgtttataatatggagcgcctgctgccccgggcgctgcgctcactgcgggcgcagactttgaccgacttcgaggccattctcatcaacgatggctccaaggacggcagcgccgcgctgtgtgcacaggctgttgccgaggatgcgcgctttcgcttcatcgaccagcccaacggcggcgtagccgctgcccgcaacgcgggtctggatgcagcccggggcgagtatatcttctttctggatccggatgactgggtagagccggatgcggcagaagtgctgtatcatgccgcccggaatgctgatgcggactgcgtggagtttgggctgtatctggacagctatgatgaaaacgaccggctgctgcacacgcagaccagcggcagcaccctctccggcgtgtaccggggcgcgcccttcaaggaacatttcgacgagatggcgtcctcgtatctggtcaccaataagctgttccgccgggcgtttctggagcagcatcggctgcgtttctcctgccatcagctgggggaggacgggctgttctttgtagccttttatcgtcaaaatcccggctgtctggtggtgctggaaaagccgctgtaccactacaccgctgcccggcggggcagcctgtccaacagctaccacccggagcgtctggaggataacttttatctcagcgatgcagtgtgggacaccgttgccgcgtggggcttacaggacagccccatgcaccgcgcaaaggcgagctactgcacgatccgcgacctgatgatgggaatcaagaatcttggatgcagcccgctttccctttccgagcagactgcttggctgcgcagtaccctgcaaaagccccgggtgcgcacggcggtgcgcagcaccccactgcacgccatgcagagccggaacgaccaggtaaagctgttgctgctcaagctgcggctatgccgcgcggtgctgctgctctcgggcgcaaatcagcgtaagaatacctgaagagaaacgcaaaaatccccccgctgccgactggcagcggggggatttgttaccgatttaaatgaaaatcagcgcttagttctgcttcatgcgagcgaagcagtcagagcagtagaccggacggtcctcacggggctggaatggaaccttgcaggccttgccgcaagctgcgcagacagcgtcgaacatctgacgctcgccgctgttgctgcgtgcgccgccgttcttgcgggcgtcacggcagggcttgcagcgctggggctggttctcgaagccgcgagaagcgtagaactcctgctcgccggcagtccaaacaaattccttaccgcagtccttgcagaccagagtcttgtcttcaaacatagtagtatctcctctttagttagttcttgcccacggaaggattgtaaccatacctttggttttgggaccatcgcgctgatcagtaagcttaccaggggcttgaatagataaacgccctcggattgaggactttcctattgtaccgttatttttgagatttgtcaaccaaaaaacaaccgttcgcccttttatttgtacacatggcacaaaccgacagcatatatttgggtaaaatcaccgccttaagatggaaaagcggcgcgccgcacaggttatgcgcagcggcagataatttatgatttgcggttcagaaacacctgcgggtgtttccgaaccactttttcacacaagcaaaaaggggctgccgcacactctgtgcagcagcccctgcaaagccctttgggaaaagcttacttctcgatgacttccttggtgtcgcgggcgatcatcagctcctcgtcggtagcaatgaccagcgtgcgcacctttgcgccccaagcggtgatctcgcacacatcgccaacagggtgcttgttcttctcggtgtcgatgcggatgcccagccaatccatgtggtggcagatctttgcacgggcaatggcatcgtgctcgccgatgccgccggtaaagacgatggcatccacgccgcccatagctgcaatgtagctgccgatggtctttttgatctggtagttcagcatatcggaagccagctgtgcgcgcttgttgccggccgcggcagcctcttccacatcgcgcttatcgctagaaacaccggagatgcccagcaggccggacttcttgttcaggatctcgtccagctcgtggccggtgatgttcagggtgtacttcaggtagttgaccacagaggggtctaggtcgccgcagcgggtgcccatcatcaggccggccagcggggtcatgcccatggaggtatccacgaccttgccctgatcgactgcggcaatggaagagccgttgcccagatggcaggtgatcagcttcaggcgctcaatgggttcttccagatactcggctgccttgtgggcaacgtacttgtggctggtgccgtggaaaccgtagcggcgcacgccgtacttctcgtagtactcgtaggggatggcgtacatataagccttcggcggcatggtgctgtggaaggcggtgtcgaacacagccaccatgggaatgttgccgaacaccttgcgggcggcctcgatacccagaataccggcggggttgtgcaggggagccagcgggctcagctcacgcagcgtgttgatgacctcatcggtgatcaggcagctgctcttgaacttctcgccgccatgcacgacgcggtggccgatggcgtcgatctcgctcacgtcattgatgcacttgcctgcgccggtggtcatcttcttcacgacctcggcaaaagcctcggtgtgggtggggaagattgccggggtggtagccttggtgccgttggcctcgtgagtgatcatgctgctctccatgccaatgcgctcgcacaggcctttgcacagcaccttttcgccgtccatatcgatcagctgatacttcagggaagaagaaccgcagttaataaccagaatcttcatctgtgttgcctcctgaaaatttttgtaccgtccgcatcctgaaaaaaactgcggacagaattttacagattcctatgtttattatataataggcgtgacggcttttcaaggcgcaacccgggcaaagcggtaaaacttgtgtacaaggtttttgtatatcctgcccacaaatcccggaaacggcaggatttttctgtatatccgatataattttaacaatcttttggcgaaaaggagcagttccatgaagtttgcaggcatcattgcggagtacgaccccttccacaacggccacgcatggcagctggcacaggcgcgggcgctgggggcgcagcgggtggccgtggccatgagctgcgggcttacccagcggggcgcgctgccgctgttgccggaggcggtgcgggttcaggcggcgctggcctgcggagcagaccttgtgtttgccctgcccgcgccctgcgcctgcgccggtgccgaggcttttgcccgggcgggggtgcgcattctggccgctgccgggtgcgacgcactggtctttggggcagagaccccggacaccgccctgctgcaaaaagctgcccgggtgctgtgcagcgaagcataccgcaccgcgctgaaacagcagcttgccgccggggcacgcagctttgccgccgcccggcaggcggcggtgcaggcgctgtgcccggggtcagatatcgccgaactgctggacaagcccaacaacaatcttgccgtagagtattgtaaagccatcatagaactgaatgtaaaaatgcagcccatcgccctgccccggcagggcgcagaccacgggcaggcgctgaccgaaagtgctcatgcagcctttgccagcgccagcgccctgcgggcactctgggcggagggcggcgcggcggcactggcaccttatgtgccggaaaaggcgctgaaactgtataaacaggcagaatatgacggaaagtatacagattttgcagtcatggggcactgcgagctggcactgctgcgggcagcctgcgcagggcaagccccctttgccgcagtgcgcggggtatccgaggggttggagcaccggctggaaaatgctgtgcgggagaccgcaagcctgcccgctttgctggatgccctgaccaccgtgcgctacccccgggcacggatgcggcggctggcgatggatgcggcgctgggctacaccgcccagaccccggcgctgccgccctacctgcacctgctgggcgcgcgcaaggagacgctgcccctgcccggggagacggcgctgccgctatcccactcgctggcgcggctggcgcgggaaaacgagacctgcgcccaaatggctgctgcccagagcagagccagcgaccttggtgcgctgtgccggacaaaaccggagccgatgggcgggatatatcgtcaaaaaattatctttttgacgaattgacaaaaaataacacaaaaaattttatattgtgccctcttgtatccggcgcggttcgggtgtatgattaaagcaatgcaatgttggatacaacaagcctgtaaaaaacgactgtccccgcaggggaaacacaaggaggaacccatggcacttcatgttctggacgaagccaaccgctgcctcggctgcaaaaagccgatgtgtcaggagggctgccccatccacaccaatatcccggaagtcatccgtctgctcaaggcaaaccagatggacgatgcaggccggatgctgtttgaaaacaaccccctgaccactgtgtgcagtctggtgtgcaaccacgaaaagcagtgcgagggtcactgcatccgcaaccggatgcccagccacgacccggtgcacttttccatcatcgaggactatatctccaccacctacgccaacaaaatgaccgcaggccctgccccgaaaaacggcatgaaggctgctgtggtgggctccggcccggcaggtctgaccatcgcggtgctgctggcacgctggggctatgatgtaaccatctttgacgcccgggacaagatcggcggcgtgatgcgctacggtatccccaactaccgcctgccggacagtgtgctggacgatttccagtaccgtcatctggagctgaagggcatcaaggtgcgtcccaacactaccatcggcaagaccatcaccatcgacgatttgttccgcgacggctacaagagtgtgttcatcggtgcaggtctgtggaaggccaacgccatgcacatcaagggcgaaagccttggcaacgtagcctttggcatcgactatctggcaaactccaaggccttccgtctgggcgatgatgtggccgtcatcggcgtgggcaactccgctatggattgcgcccgcaccgccatccgcaacggtgcccgccacgttacctgctacgcccgccgggacgagagctgcatcagcgcctctgagtatgaggtgagctacgccaagctggaaggcgtgggcttccggttctgcaaggcaccggtggagatccgggaaaacggtctgatctgccgcgacaccgtcaagggtgaggacggcaagttcacgcaggtagagggcagcgagactttttacccccacaccggcgtcatcgtgtcggtcagtcagggttctgagagcaacctcgtcaagaccacgaccggcatcgagaccaaccagaagggtctgctgagcgtcagcgaggacggccgcaccacccgcgagggcgtatttgccggcggcgacgccgtcatgggcgcacgcaccgtggtagaggctgtggctgttgccaagaaggtgg

SEQ ID NO: 829 - DNA, 5860 bp, unidentified
  source 1..5860: mol_type = unassigned DNA
ctagataaggtttaataattcctcattattccatctttcagcatattcactgcttaagtctgccgtgatacattcgtgcttattttcccctttttgtaaaccgataactctgatgtcaggaacagttttagcatactttcttattgtgagttccaataaaattcctaagcttatcgatttcatatcaggcggataaaacggttccgcactttgagcgtcatttaaacaggaaaaaataacatctattgcctgttcccacgtaataaaaaaccgggtagcttcaggatctgtcaatataagttccttcctattttctaatgcatacttccattttaccaaaacagaccctgtagaatgcaatacatttccataacgaactatcctataagcgcaattcgatccgtttatttgctcaaaatccccaaaaagattctccataagcaatttagtagccccatacgttcctgaaacttgaacagctttatcagtgcttgttgccagaataaattttatgttctgctcctcaacagttattttaagaagattcaacgtaccaagaatattagtctgaacagctttcagaggatgttcttttgccaaaatgacatctttaaacgcagccaaatgaaatatcccatcacaaccattcaatgcctttttcaataaaagataatcttcaatggggcatggaaagatttgaacgcttttaaatttctctctcagagcaatcagttttccttcattcctggctatcgcatgaatagtatgtccttgggtaatcaaccgttctatcaatttctcagccaaataaccggtagcccccgttactgcaatggttcccatactcaagctattttttatcattcatcaacacatccctcgcaacataaggctgtggagaaaactcaatagtcaacacattcgactctcctaaagctgttaatgtatggacgcaccccggtaaagtccgtaccaaatcccccttttcccaaatttcttctattacagcctcactatcatcatatttctgaaaagtggcatgcatacgcccctgtaaaataagcatatattccacctttctaaaatgataatgattgcctctaagaacctttggaacgaattgcaagaatcctatatatttagcggcttccaccgctggaattgaagcactcaaagtagtatcctcgccaattacaaaaccagttcccgcctccagcaagctataatttttcatatcccctacggattccacttttatcaaatccctgacagttatttcatcaaacattttttttgattgctcacgcacgtcaattttacataatccggcacgatattttaataaaaacaacttatgatgaggagcaaggttctccaatctcaaacactcatccatatccagcaagacaaaagattcaccttccaaaatacggatatccgctgcatcgtccatcaaataagtatgatgaatatattcccatctatcatagtctgctctatactcagaccccaaataggttatagaactaaaatgcaccttttgggatttcttgtgttcaaattcttccttcagttctctgataatgccatctagaggggtttcctcctcctcaaggtagccagaaacaagagaataatatccggagtactctatatccgggttctcatctcttttttgcaacaatactctattatctgttgtagtaataatcacagtagtcgaatccatcatctttttcattttcattattttttaaattttcattctgttgtattttcaccacacccacgtgatgaataatattttccttattcagcatatcagtataaatagcatggtttaacaccataataagcaaccaaataagagacaatatggcaaaaaaaggttgggtgtatgatttcagccataactcccaagactttttctctcttttcaaattagaaggaatctttgtgaaaagtttcacatactcatccggaaaagccttttccgcttcacataacatattcttccagtgctcatgataactccataatctctgcattacgtaaatagaccatattgaaaatgacaatccgccaaatgcaataataaatgtcagatattcagaagtttgacatatagagttaaacaagacggtttccaatccgaataaagaaacatttattccgaacataatattaaaacggctccagataccagctccttcatactgtaattgaccaagaaggtgagtataatgttccattaatttagtgttctgcaaggcatccctatcatttaccgcttttttattatctacatccgcataaaagtttataccgcatcgaactaatttcgtcattatatcaagaatatatttttataataaaaaaggagaggatattcttctgtaatcagattcatatcccctcctcgcttgaagttatcaagaagaaagcatatcaaatttaaactatactttctatcttagcccgaatgtttactgtacttttcttgttacagttaccttgaatgtcttggttacaacaccccagtcgtgagtataagtgatgatgaattgaacatcatgctcataaacagtacctgtaggttcgccattccaagtaaggataccgttagcatagctgtattcagccttgtctgcttcagagatatcaactttaacacctgtagattcagagtccttctgatacaatgtagctgcaataggttctgctttagcaagatcattggctccatcatatacaaccaacttattaccaacagcatctttcaaagtcaaatctatccatttcttcttgtcagcagcaactttcaagccattaatcaaatcaaagagattaatttgttcaccagttgctaatgcaggattgttatacttcaagtcaacaacatcagagaatgccaagatcggtgtttgcacagtccattcttctgtatcgaagagtacacgtttagaatcagtatcacctgctgtaatatcgtaaatatcaactttcagtttgccaaccttagccaaatctacacgtggagtaaatacaatctggttagtagtagcccacttgatatcaccactcttcatcatttcctgaacataagcgttctggttctttgaagccatatcaaatttcactatagcatcttcaggaacaacatcatacatttcgtcaaatacctgagattgcataatgaagtctgtgtaatttgctccactcttaacccattcacccatgataatgcggttcttatactgatccttaatcggacaatcgaatgtataagttacagagaagtcgttgattgtaaccttgaacagtttattctcatacttgttgtaaacaccgtaaggagtgttgataccatcggtcatcaccatatcatagtcactgttccaatcatagttattatatgaatagattgaccccatcaacaaattagccttcttgatttgtttctgaccagcacctggtgtcaaaattaagaataaagaatctttatctgcattatttccaccattcttatagtagagaacagcttcatttacaatggcattatcttcaaaatatttagcaacttcagttacatcttgatttcgtacattccagaaggaattgaaacattgactagacttgttagtataacctaccaacttgttggctgtgtcatattcaggtatatacaattgaacaaaagtagaatacaccgtattgttatatgaaacaacatcacgtccttcgatagcattttcaaagtcacgaacatccaaagtgataacttgagattttgcactattgtaagtaaatgtgaagttgtctgtagcgttcaacggtttcaaagcaacagttgagaagttaggattaacagcaggacgaactgctttgataaatactacattctttatctcataatctttaattccttcttcttgagccttaacagtagtagttacttcaatagctgcatattcatcaatagcagaagcttggttagttgatttcacagacaagacattatctttcagttcaaagataccttgatgagtcttaatagtttgacccttaaaagtgtattcttcattctgatccaacagtctgaaagccttttcataaacaatacctgtttcttttacccaaaccttagcactttgaatataaacatcaatagaatcatttacattgtaagtaccttgatagttgaatttaccaaaatcatatctatcataagcattccatccttcagtaataatcttcggataattgttacctgttacggtagtggaagtgaatgcgttcttgatattatcagtagtaacatttgttcttcctactgtaaagtaatcagaagcagaagtgtattgaccatacatagttacatctaaagaagttgcaactactgttccttcacttattccttcattaggtatcatggcaagtttcaatactccgtttgctaaagtagccgaaccatccatatataccaaagccggttctacactacgactcaatttgtatgtatcaacgaacgagaatttagcattgtccaatgagaaatcacccggataaaccttgaaagaagcataagcagggacagctgcaaacaattcattatctgtattatacacattataagcataacaaacatcataggcatcattaacagcctgttttctgtaaactacagtctgcaaccctttgaatgcagaaccttcctgcagcaaagtatagttctgtccgtcgatagtcacgattacagtcttgctttcagcatctacagcaatgttaggaaattcattgttctgcttcaaatcagtaactttgtcaccgatcttgatgtattccacaccatccactgtcacccaagacacgtttgaaccggcagcttcaccatcctgacctctggccggaactttgttaccttcggtatctttcacatccacccaagtagcacctttatctgtgctgacctgccagtaattgccttccacacggaattcagggataacagtagtaccggctgccccatctgttccattcgtaccattcttgatagtaattttggaaccgtcagtgaaaaccagttcatatccaccggtaacctcattacatgactgaacgaatttacctgccttaattgccgagtcaagacttgcaatggtttccttgacttcgctcaattccttgtcgatgcggtcaatgtcatcatcatagtccttacaagacacaaatgttcctgtcgaggtcaccattaaggctccgaacaggattgcacttaaaaactttttgttcataatagaaaaactttaaatttataaatttaaaaaactaaaattggttatacatatttggttcattataaatagcttagctaatttactgcctgcgaatgatgcctccttctttcttgagtctgatatgacaaaggtgataccccgacaatacggctgaaagcagagtagaaagcacttttcgaagcaaagccacaactgcaaggcagctcagtcagcgcacaacgtcgggaacagagaagttctttggcatattccacacgatacgtgttcacaagttccttcaaattacaaccgaagtatttgttcaccacattgctcagataggtctggtttgtttcaagcagtgcactcagtttcttcagagaaagcgaggtgtcaagaaatacctgacgtatctcaagctggtacaatatacctttatatatattacaatccaccttgcgaatgtctgtttcctttccggcaaactcctctttccattgccgctcggcagccttgaaaagcaaagtcttctgtcgctcggaagtagcggtcgtgcgtttacgtctcagaaatagatattccat

SEQ ID NO: 830 - DNA, 21113 bp, unidentified
  source 1..21113: mol_type = unassigned DNA
gcaggttgtagcccagcgcctttacctcgctcagctcccgctccaccgccgcatccgagggcggggtgtacagtccctccggccagtagccctgatccagcaggccgttgagcagaatgggcttatcgttcagacagaagcgcagcacgccccttgcgtccggtgcgcagctccacttgcgcagggcaaagtagctgtgcacagtgtcgaactgctcttcctctccctgcgtagtgcccacggtcaggtcgtacaaaaagggcgtgtccgggctccatgggaagaaatactcgtccgcaatatgcagcgtcaccgtgccgtcttggccggcctcatcgctgccccagtcctcggcaatggtcacgcccccggcgcgcaccaccgcccacaggttcaccgcgccgccgggtgcagaggtatgggctttcacggtcacggtgcgggcatcgtagtccggcgtaacggtaagagactggatgtaattttccggcacgcgctccagccataccgtctgccagatgccgctctgcgcgggatagaacatccctccgggctgcaaggtctgcttgcctcgcgcctgtgtgccgtggccggtggggtcctgcaccgccacccacaggctgttgcggcctgtgccgttgagctgcgcggtgatatccagcgtaaagggccagtagccgccccggtggccgcccaccagatggccgttcacctgcacagcgcaggcgtagtccactgcgccgaaatgcagcagcaccctgccgcccgtcccggcgggcggcgcaaaatatcggtggtagtgcagccactgcccgggctgcaatgtacgccccaccccggaggcgcggcactccggcgcgtagggcactaagatctcgccgtcccagcccgccgggcgctgtgccgaggcggtgatggcgtactgccacaggccgttcaggttctcatagctgtcccggcgcatagtcgggcggggatattccgtcagagggtgcatacactcaccagcctttttctcgtttgctccattctagcacagcccggggcatttgtataccgtggagcggacgattttgaatggccgccgcgtgcgctttggccatcttcagcggaaaattatttttatatttgcaattctggaaaatctgcggattttccagaattgcttcttcatgagagtaaaaaagagccgccgcacggcggcatggctgtgcggcggctttgtgagaaggtgggaaattgtttagttctcggccagattaccggtataaagctggtaatacttgccctttttggcgatcagctcgtcgtggctgccgcgctcgatgatgcggccctgctccagcaccacgatgcagtctgcattgcggacggtggacaggcggtgcgcgatgacaaagctggtgcggccatacatcaggccgtccatgccgcgctgcaccagcgcctcggtgcgggtatcaatggaggaggtcgcctcgtccaaaatcagcaccgggggatcagcaacggctgcgcgggcaatggcaagcagctggcgctgtccctgcgagaggttggcaccatcgccggtcagcatggtattgtagccctccggcaggcgcttgataaagccatctgcgttggccagacgggcggcggcgatgcactcttcatcggtggcctccagccgtccgtagcggatgttctccatcaccgtgccggtgaacaggtgggtgtcctgcagcacgatgcccagcgagcggcgcaggtcggcttttttgatcttatggatgttgatgccgtcgtagcggatcttgccctcctgaatatcgtagaaacggttgatcaggttggtgatggtggtcttgcctgcaccggtagagccgacaaaggcgatcttctgccccggacggccatacaggttgatgtcatgcagcaccgttttttccggcacatagccaaagtccacgtccgtaaaggtgatgtcacccgccagcttgtggtaggtggtagtgccatcgtggtgggggtgcttccacgcccacagaccggtgcgctcggcagtttccaccagctggtcgttgcggtcgtacttggcatttaccagcgtcacatagccctcgtcggtctcgctgggctcgtccatcatcttgaagatacgctctgcaccggccagtgccatgatgacgctgttggcctgcatggacacctgactgatgggcatattgaagcccttgttcaggctgaggaaggccaccacggtgccaagggtcatgccgccaacgccgcccacagccatggctgcaccaaccagtgcgcagatggcgtaactgatgttgcccaactgagcgttgaccggcatcatgatgttggagaaggcgttggcctgcttggcgctttccttcagctggtcgttcagcgcacggaagccggcaagggcctgctgctcatgggtgaacaccttgaccaccttctggccttccatcatctcctcgatgtagccgttcaccttgcccagatcccgctgctgctggatgaagtacttggaagagctttttgcgatctgcttggagcagaacagcatcagcgccaccatgagcatggtaacgatggtcagctgccagctgagcatacacatactgaagaacaccgacacgatggtgatgacgctggataccagctgcggaatgctctggctgagcatctggcgcagggtatccacatcgttggtgtacacggacatgatatcgccgtggggatgggtgtcaaaataccggatgggcaggctttccatgtgggtgaacagcttggtgcgcagattgcgcagcgtgccctgcgttacgttgaccatgatgcgggcgttggcccatgcggccagaatgcccacaaggtagatgcagcacatccgcaccagtgcaccggccagcggtgcaaagctggggttttgctggcgggtcatgggcacgatgtaatcgtccatcaaagtctgcaagaacaggctggcctgcacattggccagcgcactgaccacgatgcagatcagcacaaggatgcagtggggcagatagttgcggaacacctcatccatgatgcgcttcagcagcttgcccgggttttccaccttggggcgcggcccccgtgcgccccgcgggccggggccatgtacttcttttactgccattactgcgcacctccctgcttgtcaaaatcgccgccgccctgcgtctggctgttgtagacctcctgatagatggcgttggtcgccagcagctccgcatgggtgcccagaccgttgatctggccgttatccagcaccagaatgcggtctgcatcctgcaccgaggaaatgcgctgtgcaatgatgatcttggtcgtgccggggatctcttcccggaaggccttgcggatcttggcatcggtcgcggtgtccacggcgctggtggagtcgtccaaaatcagcactttgggcttgcgcagcagggcgcgggcgatggtcaggcgctgcttctggccgccggacacgttggagccgccctgctcgatccatgtattgtacttatccgggaagcgctggatgaactcatccgcgcaggccagctttgccatgcggatgcactcttcctcggtggcgttggcatcgccccagcggaggttatccagaatagtaccgctgaacagcacattcttctgcagcaccatggagacctcgcggcgcagcacgtcaaggttataatcccgcacgtccacgccgcccacccgcacggtgccgctctcggcatcgtacaggcgggggatcagctgcaccagactggactttgcactgccggtgccgccgatgatgcccagcgtctcgccgggccggatggtaaagctgatatcgttcagcaccggctggccgctgccgtgcttatacttgaaggtaacgtggtcaaactggatgctgccgtctgccacctgctgcaccggctgctttgccgggggcaggtcggtgtgctcgtccagcacctccacgatacgcttggcagaggcggcggacatggcgatcatgacaaaggccgtgctcagcatcatcagtgccatgaggatgttcatgatatagccgaacagggcgttcagctggccggtggtaatggcaccgtgcagcacatattttgcgccgaaccagctcagcgcgatgttgcagccgtacaccgccaccagcatggcggggttattgaagctcaggcggctttctgcgttgacgaactgcttatacaggctctcgcaggcagcggtgtatttttcgttttcaaagccctcgcgcacaaagctcttgaccacgcggatggcagagacattctcctgcaccgaggcgttgaggttatcgtagttcttgaacacacggtcaaagatgtggaaagtagggatcatgatggcagccagcaccgccaccagaaaggccaccgccaccacgaacaccagcgacagcgggccgccgatgatcacagccatgaacattgcaaacaccagatgcaccggggcgcgcacgcacatgcgcaggatcatctggaaagcgttctgcacgttggtcacgtcggtggtcatgcgggtgacaagacctgccgtagagaatttgtcgatattggaaaaagaataatgctggatattttcatacatggcatcgcgtagatttccggcaaagccggtggatgcctcggcggcgtacttgcccgccagcacgcccagcaccagcgcaatggctgccaccagaaaggtaagcagtccgtagcggatgatggcgttcatatcgcccttttcaatgccctgatcgatgataaaggccatgatggtgggcagcagcacatccataatggcttccagcgcagcaaagagcggtgtcttgatcgaggcggctttatactcgcccagatgcgacacaagctttttgatcatctgagttccctcctgttgaatttatttgtttggtacaaaacaattttatacaaaacaatttaaatgtcaatagctttcgaaaaatgttcataattgctaatttaacaagtcctttttcggcgctttgacggaaaagatcgttatttcagtgcttcccgcagcttgttcagcagccgcagcagttctgcgttctcctcctcggtcagcagtccggccacatagtcgtcggtctggtggaaggacagcagggtcttttcgtgccgttggatgccctcctcggtcagcaccagctgcttgagccgggcgtcctgcggcacgctcagccgctggatgtagcccttgcgctccatcagctgcaaaatgttcgtcaccgtggagcgggtgatggaaaactcccgctcgatgtcccgctggaacaccggctcgtcccggtggcggtagagatactcgatgatccacccgtgcatgggggtggtctgctctaccccgttggcgcgggaaaactggttcagcctgcggaagatcaggttatccacccggtgcagctgggcggggatgacctgcggcccttcccacggcgggtccagcttgcagggctcttcaatagggtgctgtgtacacataatggtttcctctattcaagttgttcgatgtgaaactgtttgatacgatacatatattactcacatccccactcaatgtcaaggggcggggcgcaaaaaaggccgctacggaaaattttccgcagcagccttgatttttatggatacgggatacgcttacagctttttgccggtcagcagctcgtaggcctccagatacttggcaatggtcttgtcaatgacatcctgcggcaggtcgtagttgctgtcggggttggccttcagccagtcgcgcacgaactgcttgtcgaaggagggctggctgtgacccggctcgtagccctccagcggccagaagcgggaggagtccggggtcagcatctcgtcgcccagcaccacgttgccgtcctcgtccagaccaaactcgaacttggtatcggcaatgatgatgccgcgggacagtgcatactcggcgcacttcttgtacagggcaatggtgtagtcccgcagcttggtggcgtactccagaccgtggccggggaacttcttctccagcacgtcgatgctctgctcgtaggagatgttctcgtcgtggtcgccgatctctgccttggtggagggggtgtagatgggctcgggcagcttatcggactcctgcaggccctcgggcagctggatgccgcacaccttgccggtcttttggtagcttgcccagccgctgccggtaatgtagccgcgcacgatgcactcgatgggcagcatggtcagcttgcggcacatcatgctgttgccggtgaactggggctggcggaagaactccggcatatcctgcacatccacgctcaacatgtggttgggcagcagatcgcgggtgtaatcgaaccagaacttgctcatctgggtgagcacggtgccctttttggtgaccttgtttttcaggatgacgtcaaacgcagaaatgcggtcggtggcaaccatgatcaggctgtcgccattgtcgtagatctcgcggactttgccttctttgatgggtttgaactcagtcataatcaaacactccattttttccatgttctcagcagcgcagcagcgcagcgcagttcttaccctattattctaccatactgccgcgcggtttaaaaggaacagaataaaagaaaaacgggcaagttttgtgtttttatcgtgaaaagtgcgcaaaaaacagcaggaaatttcggcgttttgacgataaaagtcgtactttatccccaaatgcacgcacctttgcaaaatgcagtcatggacaagcgccgccagttgcggtatcatagtagtatgcgtatatctgcgctccgcaggggcgcaaaagtaaacaaggaggtaaagagtatgggcaaatttcccaagggctttttgtggggcggcgctaccgctgccaaccagtgcgagggtgcatggcaggcagatggcaagggtctggcaacggtggacgtgacccccttcggcccggaccgttttccggtggcaacgggctatatggaaatgctgggctgcgatgacgcacatttctaccccagccacgaggccattgacctgtatcaccattataaagaggatatcgccctgtttgcagagatgggcttcaagtgcttccggctgtccattgcatggacccgcatcctgcccaacggcgatgacgctcagcccaacgaggcaggactggctttctacgacagcatttttgacgagtgccataagtacggcatcgagccactggtcaccatctgccactttgacactcccattgccctcatcaaaaaatacggcggctggaaagaccgccgcatggtggacgcctatgtccactactgcgaggtgctgttcgaccgcttcaaaggcaaggtgaagtactggctcacctttaatgagatcaacatgctgctgcacctgtcctttaccggcgccgggctggtattccaccccggcgagaatgtggagcaggtcaagtatcaggccgcccatcacgagctggtggccagcgcaaaggcggtaaagctggcgcacgaaaaaatgccggacgccatggtgggctgtatgctggcggcagggcagttctacccccgcacctgcgccccggaggatgtgcgggcggcgcaggaggcagaccgggacaactacttctttaccgatgtacaggtgcgcggtgcttaccccgtgtgggctaaaaagcggatggagcgcgccggggtgcagctgcacacacagccggaggacgaccgcacgctgcgggagggcacggtggattttgtgtccttcagctactattccagccgctgcatcacggtggataaggagctgatggcggcagagaatgcggaaggcaacgccgtgtcggcatcggtgaagaacccctacctgaaagccagtgagtggggctgggccatcgacccggtgggtctgcgggtgaccctgaacaccatctacgaccggtacgaaaagcccatgttcatcgtggagaacggtctgggtgcggtggataccgtagagccggacggctccatccacgacagctaccgcatcgactacctgcgggcacacatcgaagagatggaaaaggccatcaacgaggacggtctgcccctgatgggctacaccacatggggtcccatcgaccttgtgagcgcctccaccggcgagatgaaaaagcggtacggctttatctatgtggacaaggacaacgacggcaacggcacccttgcccgcagccggaaggacagtttttactggtataaaaaggtcatcgcttcagacggcgaggacctgacctgagcaagcgccccggcactgtttgcggtatggcagcgccggggcgtaaaagtgtgaggaagaaccgataacggagaaaatttatgacaccacaaatcattgcacaccgcggtgcttcctatcttgcaccggaaaacaccctgactgcctttaaaaaagccatggagattggcgcagacggcgtagaaatggacgtacagcagaccattgacgccgggcttgtgatccaccacgactatatgatcgatctgcacacggatatttccggcaagatctacgatatgaccatgggcgatttaaaggaactggatttcggcagctggaaaggcgccatctttcaggacgagaagatcgccaccctgcaggaggccatggaactgtgcaggcagatgccgggatgcaccgtgcatctggaactgaaatccaccatggacaacgacccggactttgtaccccgggtgctggaagtgctgcagcagaccgagatggtagaacaggtgatccttgtttccttcaaccacgcgctgctgcggcaggcaaagcagctgctgcccgaactgcgggtaggtgcactggtatacggcgagctggaaagcatgctgctgccgccgcccatcatctggaaggatcttggactgaccaacggcatagacgacatggaagccatggacgctgccctgccggagagcgcagccgacgaggaaaattgcagctggatgacccgctggatgagcgataaggtaagtatgctgcgggcaaactttcccggcgagagcctgaacgagatctacaaaaacctgatggcgcagcgggatctgcccgcctacatccgcagtctggactttgtgccggagtgggtcagctgtgagtaccacaccgcctacaaaaacgctggtttcattgacaaactgcacaagatgggcatcaaggtgtctttgtggacggtggacacggaagattccgtccgcagcctgctgcgcaccagcgccgatgcctacatcaccaaccgccccgaccgcgtgcgggagtggatggagaaggaacaggcagcgaccgccccaacagaaaccgccacggcagagtctgcccccactgctgaagcagacgccgggacagctgccgcagagtaaaccgaccggaacagacacaaaaaagagataggctttcccgaaagggatcgcctatctctttttgcattcattttattctgctgcgtcggtcagcacaaaggtcagctctgcggtgacggcgcacttgccgtccacccatgccgaggccttgcctacgcccacagcgccgtgctgctgcaccagctcgcagtggagggtgagcacgtccccgggggtgacctgtttgcggaagcgggcactcttgataccgccgaacagcgcaagcttgcccttgttttccggcaggctcagcgccgccacagcgccggtctgtgccagtgcttccagcagcagcacgccgggcatgaccggctgtgccgggaagtggccgttgaaaaattcctcgttgcgggtgacgcacttgcggccgatggcccactgccccggctcgtagtccagaacacggtccacgagggcaaaggggtatcggtggggcaggatctccgcgatctgcacactgctcagggtgttggcgttttcacgcacggtacgaggctctgccatgggtcagccctcccatctgcgcagggcgatgcaggcgttgtggccgccaaagcccaagctgttgctcagtgcatactgcatctcctgctgccgcccggtgttgggcacatagtccagatcgcactccgggtcgggctgggcgtagtggatggtgggcggtgcaaactgatcccgcagcgccagcgcggtgaatacggcctcgatgccgcccgcgccgcccagcagatggccggtcatgctcttggtgctgaccacggtcatctccttggcgtgtgcgccgaacacggcgtggatggcggcagtctcgcaggcatcgttcatgtgggtgccggtgccgtgggcgttgatgtgatccacctgctccggtgcgatgtcggcatccaccaaggtcagcttcatgcagtcgatggcacctgcgccgccgggagccggagcggtaaagtgataggcgtcgcagttggcaccgtagcccaccacctcggcgtagatgtgtgcgccgcgcgctcttgcgtgctccagttcttccagcaccagcacaccgctgccctcgcccatgacaaagccgccgcggcgggcgtcaaagggcaggctggcagcatccgggtcggtggcggtggaaagcgccttcatgctggtaaagccgccgatgcccaaggggctgatgcagctctccgcaccgccgcagaccatgaccggctcatagccgtcccggatgcggtggaaggcgtcgcctacggcattggtgccgccggcacaggccgtgaccgggcaggtgcacatgcccttcagaccgaagcggatggccacctgcgccgctgccatgttggcaatggccatgggcacaaagtaggggcttaccttctccatgcccttttcctcgccgcgggcgtgctgctcctcgatcgtgggcagaccgccgatgccgctggacaggatgacaccgatgtccttgccctcggcctcggtatcaaggccgctgtctgcaatggcttcggcggcagcgcccagtgccagcagggtgaagcgcgccattttgcggacttcctttttgtccaccacgctctcggggtcaaaatcctttacctcaccggccagcttgcacttgaagtcggtggtgtcgaactgggtaatggggccgatgccgcatttaccggcacgggctgccgcccagctgtccgccacattgttgcccagcgggttcaccgtgccaaggccggtgatcacaactctgcgtttttccataagggttctcctttacattgccatgccgccgtccacacagagcacctgcccggtgagatagctgctttgttctgcggcaaaaaacgccactgcctgtgccacatcctccggctggcctgcgcggcccgcggggatgccctgcgtcatgccggtgcgcaccgcctccggcagcacggcagtcatgtcggtgtcgataaagccgggcgctaccgcgttcacggtcacgttccgcgcggccagctcccgggcaaggctcttggtcagaccgatgagccccgccttgctggcggcgtagttggtctgaccggcgttgccgcgcagcgccaccacgctggaaaggttcacgatgcggccatagcgctggcgcaccatgcggcgggcagcttccttgcagcagagaaaggcgcttttcaggttggtgtccagcaccgcgtcaaaatcctgctcggtcaggcgcaagatcaggttgtcccgggtgatgcccgcgttgttcaccagcacatccacccggccaaaggcctcggcggcggcatcgaacagtgccttgcagccctcggcggtggatacatccgcctgcacggtcaccgcctgcacgccctcggcgcggcagagcgctgccgtctgctccgcaggctctgcgccgtggcagtagttcaccaccacattgcagccctgctttgccagtgccacgcacactgcgcggccaatgccccggctgccgccggtaacaatggcggcgcgggtcagcttttcttcactcattctgcatccttccatgcggtcagcaccgcatccagctgttccggggtctccactgcggtgcagaccaccccgggcagggtctttttcacaaaaccgctcagggcgttgccggggccgacttccagaatgtggtccacacccagctcacccaagcggcgcaaagtgtcctccatgtagacgctgctctgcacctgctttaccagcagctgcgggatgctgtcggtctcggccttttcatgccccagacagttgaacagcaccggcgtctccatggtgccgaagttttcgcccgcaaagcgctgtgccagcgcatcccctgcgggagccatcagctttgtgtggaaggggccgctgaccttcagcgggatgcagcggcgggcaccggcttcctttgccagcgcggcagcctgctccacggcggctttctcaccgccgatgaccagctgcccagggcagttgtagttgcagatctgcacacagcctgcctcagctgcctgttcgcagcaggcggacagtttttctctgtccagtcccagcacggcggtcataccgcaggcaaggccttttgcagcctcggccatggccttgccccggaaggcggtcagctcgatggcctgctttgcggtgaacaccccggctgcctgcagcgcggagtattcgcccagcgaaagccccgccagataggcgggctttacgcccttttcggccagcacagcggtcacgccgcaggcaaaggccaccatgcagggctgggtgtattcggtctggttcaaaacgccgtccgggtcctcaaagcagacgcggtgcaggtcaaaatccagcactgcgctgtcaaaggccgcccggaaggcgggagatgcttcgtaaaattccttgcccatgccggggtgctgcgcaccctgaccggcgtaaagtacggcaagcttcataagttctgcctccattcggtcacaagttcgtccatcagctcgcgcacggtgcgcatccgatccagcctgcccacgttttcgccgcagaagaagagcccttcctccacgttgcccttcaccgcctcgatgagggcgtgggtaatgcagtagggcacagcggcggggtcgcaggtcttgagacaccgggcgcagtgcttgggcgggaagcgtttgccctcggccagcgcctgcaccagcggggtgttcagcgcgcgtccaggcattcccaccgggctgtggatgatgcgcacatcctccggctttgccgccagcagcacgtctttgtaggtctgggaggcgtcgcactcgtaggtggggataaagcgggtggccagctgcacgcccgcagcgccaagctttgtaaagtgtgccatgtcggcaccggtgtacacgccgcccgccacaaataccgggatggcgtggccgtattgttcctcgtagggttttacctcggccagcaccccgggcagaatctcgtccaaagtctggcagcggtcggccagcaggtcctcctcggcaaagccgagatgcccgcccgccttgcagccctcgatgaccacaaaatcggcggtgcggtcaaagccctttgcccagcggcgcaggatgagctttgccgcccgggcgctggatacgatgggcgcaatggctacctctttggtgcccacaatgcccggcagctccagcggcagacccgcaccggagaccacggcatccactcccgccgctacggcggtgcggatagcctcggcatagtcccgggtggctaccatggcgttgatagctaccagacccatgcccccggcaatggccttagccttttggatctctgcggtcagggcgcggtggttggctgccgccgggtcacgggcaaaatccggctcacggtagcctgcatcggcggtggagatgcaccccatgccgccgcaggctgctaccgcaccggccagcccgcccagcgagacgcctacgcccatgccgccctgcaaaatgggtacttgcaggggcttgccgccaagggtcagcattcggtgttcagcgcggcgatgcgctgcctcccgccctgccacaggtcggcaaggatgtccgccacggggcgcacctcgtgcagcattccggccacctgaccggccatcaggctgccgcttaccgtgtcgccctcaaagacggcgcggcgcaggctgcccagcgtgtatttttccagctccatcttatccgcgcccgccttttcctgacggacatactcccggctcatgcggtttttcagcacacgcaccggtgcacccacggtgcgtccggtgacgatggtgtcactgtccccggctttgagcagcgcggccttgtagttggggtgaatggggcactcctcgcttgccagcaggcaggtgcccacctgcaccccgcaggcgcccagcgccagcgcagccgccagctgacggccatcggcaatgccgcctgcggcgatgaccggcacgctgaccgcgtccaccacctgcggcaccagtgccatggtggtcatctcgcccacatggccgccgctctcggtgccctcggcaatgacggcgtcaatgcccagcggctccaaatgccgtgccagcacggcagcagccaccaccggaatcaccttgataccggcagctttccacatggaaacgtattttcccgggttgcctgcgccggtggtgaccacggcgactttttcctccaccacgatctgggcaaactcatctgcctgcgggtgcatgagcatgatgtttacaccaaagggcttgtcggtcagctctcggcagcggcggatgttctggcgcagggtatcggcattcatgccgcccgcaccgatgatgcccagtgcaccggcgttggagcaggcggcggcaaactcgccggtggcaatgttggccatgccgccctgaatgatggggtatttcgtccccaggatctcgtttaaaagtttcatggtctttatcctttatattccacgatcatgccgccccatgtcaggccgccgccaaagccgatgcaggcaagggtctggccggggtgcagttggccgctttcagccagctcgttcagcgccaccgggatgctggcagcactggtgttgccgtggcggtccatgtttttgtagaactttgcaccgtcggcgtgcagcgccttgacgcagtggtcgatgatgcggctgttggcctgatggcagaccacccagtccagattgtccagcgtaaggccggtctcgtccagcacggtgtgcaggcatttgggcagggcatccactgcaaagcggaacactgccctgccgtccatgctgatgggtgctgagcctgcgcggctggggccgccggcatggatggcggcatcgccccgggcacccagcgtgatggcaaagggcgcggaggtgtcggtcagttcaaacactgccgcaccggcaccatcgccaaacagcacacaggtggagcggtcggcggggtccatcaggcgggagagtgcttccgtgccgataaccagcgcgtaccgcccgcccagcgtagccagcaggccgcgcgccaccgccgtgccgtacaaaaagccggaacaggcggcgttcacatccagtgcagggcggttttccggcagtgccagcgccgcctgcacctgacaggccacgcttggggtggcgtccggtgcggaaagggtggcacagacgcagcaggcaatgtctgccggggcaaggccgctgcgctgcagcgcctgctttgcggcagcaatggccagtgtggcggcgttttcgccctcggtgcagtagtgccgggtacggatgccggtgcgggtggtgatccactcgtcgctggtatccacggtgcggctcagctcttcgttggtgaccgtgcggccgggcaaagccccgccggtggcgatcagacgcaaacccttcatgctttcctcatttctccgatctgacggaatttctggtagcgctgctcggccagctgacggccgttcatgcgggcaaggctgcgcagctgacgctgcagtgcctcgtccagattgccgaacagtaccccgtgggcgcgctgtgcgccgcccaccggctccgggatgatctcctccacgatgccgtccttgtacagatcctgtgcggtcagcttcatgatctcgcaggcttcgccgctgcgggaggaatccttccacaggatactggcaaagccttcggggctcagcaccgagtagacggcgttttccagcatgaggatgcggtttgccacacccagcgccagtgcgccgccggaagagccctcgccggtgaccactgcgatcaccggcacggtcaggccgctcatctccatcaggttgcgggcaatggcctcgccctgtccgcgctcctcggcgtccttgccggggtatgcgcccggggtgtcgatgaaggtaatgatgggacggtcaaatttttccgcctgcttcatcaggcgcagggccttgcggtagccctccggcccgggcataccgaagttgcagcgcaggttttcctccagcgtgctgcccttgcggtggccgatgaccgtgaccggctggccgtggaacagtgccacaccacccagaatggcggcatcttccttgcactggcggtcgccgcactgctcaaagaagtcggtgaacagtgcatccacgatctcatcgatgtgggggcgctccgggtggcgtgccagaaagaccctgtcctctgcggtcaatgccccgcagccggacagcaaagcgtcctcctgtgcggaaagctctgccagctcggcagcgtggttggtgatatcggtcatgttctcgtccgccgggtcgccgcgcagggcggcgatcttttcatccagcggtgcgagctgttgtaagatgtccttgatcataaggcgctccctcctcaggcgtgcagacgcagcagctgcgccagtgtttcgcgcatctcggtacggggcactaccttgtccacaaagccgtgctcgtactggaactcgctgcgctggaagcctgcgggcagcttttcgccgatggtctgttcaatgacccgggggcccgcaaaaccgatcagcgccccgggctcggccagcatgatatcgccaaggctggcaaagcttgcggtcacgccgccggtggtggggtgggtcagcacgctgatgtacagcccgccccgggcggagaaccgctcgatggcggcagaggtctttgccatctgcatcaggctgaaaatgccctcctgcatccgggcgccgccgctggccgagaagatgatcagcggcaggtgctttgcggtggcgtgctccacggcgcgggtgatcttttcgcccacggtggtgctcatgctgcccataaagaaccggctgtccagcactgcaactaccaccggggtgccctcgatgcgccccgtggcggtgatgacagcctccttcaggccggtcttgccggtctgtgcttccagtttttccgggtaaccgggaaactgcagcacatcctgcggggcaaggtcggcatccagttcccggaagctgcccttatcaagaatgaggttcaggcggtagtacccgccgatgggcaggtgcaccccgcagttggggcagacgtactgtgccttgttccagatctggcgggtggcgcggcgtccgcactttttgcattccacgaactgcgggtcgttccacacggcacccgcatcccgccgggccttcagctggaaggtgcgctcccgcatgctgcccggcagcaggtctttgatactgttcatctcgtttcgcctcggtcagcctcagacatgggcattgatgtagttgaagatatcgcccacggtcttgaggtttgccagctcctcatcggggatggacacgccgcaggcctcttccagtgccatgttcagctccacagcgtccaggctgtcggcctccagatcctcggtcaggctggcctccatggtcaccttgtcctcatcgcagctcagggtatcgacaacgatcttcttcatttcctcgaaagtcatggtagtattctcctttatgttcactgtttgtttttaattatttacctaaaatttatgaggtatcgaacacgaccattataatcaaaccgttggataagtcaatggttttagttaaaaatttttatcttttacattttcgacacagtttgcttcctctttatataggggctcccacagacgcaaaaaggccgctgcacagtactttgtgcagcggcctttcccgcaataataatattattttcttattccagcccgatctgctgtgcgtactcttccagcagttcccgctcaaggaagggggtcttgacgccctcgcggtcgcggtaggtctcgtgaccctttccgatgacggcgatcaggtcaccctcctgtgcgtgatccactgcgtagtgcagcgcgtccagacggtcggggatctccacgaacttcgcgtccgggttgcccttgttcatgccctcgcggatatccgcaataatatcctctaccttttcaaagcggttgttgtcctcggtgaggatggagaaatcggccatcttggcgcagatctcgcccatgccgtagcggcgcagcttggagcggttgccgccgcagccgaacaccaccaccagacgatggggcttgtaggcgcgcagggtggtaagcaggctctcggtggatacctcgttgtgggcgtaatccagcaggatggtgaactttttgctgatgggcaccagctccacacggcccttcaccacgcacttgcccagaccatcgtggatggcggcatccggcagacccagcaccttgcccacggccagcgctgccagcgcgttgtacacgctgaactcgccgggcatattcaccttgacgtccatctcgtccttgccggtaacgtggaaggcaacgcccagaaaatcgtgggtgcgcagcagtttgtagccggtctcgcggtagtcggccttttcatcgcggccataggtgaccagcttgcaggtgtggccttccagcagggcggcggtgttctcgtcgtcaatgttcaccacacccacgtcgcagcgcttgaacagctgtcccttccagctgcggtactcctcaaaggtcttgtgctcgccggggccgatgtgatccggcgaaaggttggtgaacacgcccacatcgtagtgcacgcccgccacgcggtccatcatcaggccctgactggatacctccatcagcgcggtatcgcagccggcatccagaaactcccggaaggtcttttgcagctcgtagctttccggggtggtgttggcggtgtccttgtggcgtcccatatagtagatgccgttggtgccgatcatgcccaccttgcggcctgcggcctccagcacgcttttgatcatgtgggtggtggtggtcttgcccttggtgccggtgacgccgatcatggtcatctgccgggcagggttgccgaagaggttggcgctcatcaacgccatggcatagcggctgctctccaccttgaccacggtcaccccgggcagggtagaaaggtcgatatcgtgctggatgaccagcgcgctgacccccttggcggcgcagtcggcggcaaacgtgtggctgtcccgctgggtgcccacgatacacacgaacaaaagccccggggcagccttgcggctgtcgtagatgatatctgcgatctcagtacccagactgccctgcacaagggtaaagggcacgccttccatcagttgttccagcttcatacagtctcctccaaagagcttctttacatggggttttcttcttcgttggccgtcatgcggtcagggtgggtcaggggcagctgctcggtgtccgcgtcagccgccggttcggtggtgtcggcagtatccgtgctttctgcactgtcggtgctgtcggcggcatcctctgccggagcgggttcctcggccttgggcggcaccacatagccggagggcaaagcaggctcgccctgtgcaaaatagatcttgcgggtgctgctggcgctggtatggctgaagtccagccgcccggtgtcggtggggccgcagcccttgccgtcggcgttggtcagcacatagcgggcgcggtccagcttataatccagatcgttcagcgtgcccagcagcacgctgatgcgatcctgatacaaaaatgcgagctgctcggtgtctgccacttccagccgtgtcacgtcctgcgacaggccgtattcctccagcttgctgcgcagtgtgcgcagcgcttccatgcgggcggtctcggtgctcaccgtgctttcactttcggcggtttccgacccggaggcgcttgccgcgtccgcatcgtccacgaaccagaaaccctgtcccggggtggtgtcctgcagcttgccgccgtacagggtgcaaagcccctcaggctgggtgctttcctcggagaggatcttccatttgtccgagatcacaagccatttattgccgttttgcaccgcgtaggcgggcacggcctcggtcacctgcaccaccacggtgttggggtagtcccggatcaccttgatggagcccaacagcgggaagttctgctccagcacagcggccttttcgccgggttcaaagctgaagatgttctcttccagctgcacgcccatccgctgcaaaatgctgtctgcggagtagcccgcgatctcggtcacctgcttgccgtccggggtctgtacctgaatggaattgatgcggaacagcatggtcatggtcaggtagatacctgcgccaatgacgcacagcagcatggcaaaggcggtcaggcggcgcagcatccggcggcgccgcaatgtggcgcgggtcaccttgcgctttttgcgcatttcccgccgggcagggctttgctgcggggcgctctggctgcctgccgggtgctgccggttcgggcggttttgcgcgttctggtttttccggctgctctgcccgctgcgggcattgtttgccgggcggcgctgtttgccgccggacttcgcgttttttggtctgctgcccgccgggcggttaccggcgggatactgggtggtattgctcccctgcccctgcgccgggcggcggggctgggattgagtctgggtggggaactggatgctgttatctgcccgggaggagcgcacactgccgttggcgctgcgggagggcgggcggctgagcggctc

SEQ ID NO: 831 - DNA, 9257 bp, unidentified
  source 1..9257: mol_type = unassigned DNA
ttatttattaaacaatctactcagaatagctttttctatataattaatgcgtagtaagtctaacattgagcacacaataaatatagcaatacatgatactaccatatggacaacaagaaaatcggaatgatagaaattactaccgcagataattttattccaaagccaatcattaatcaaagagttatcatgaattagatagatagcaaaggttgttgctgctatagtattaatatatttgttataagaaatagacatccttttaaagtaaacaaataatcctaatgctgcaaacagtacaaaaatattagcaccgctagatgggaaagaaataatatttgcttttacggtatagtaagtgtcatttaaaccaagatagtcaaaaataataacagaactccagataattgataatcctaaaattcctatatatagtaaatttttttctattctatcattggtatatagtcttaaataggcaccgataaaatataaacagctaaacatgaataacgagttaccataaccgcctaatgcaacatttttaattgtcggtactacgaagaatacgattaatagagatgaaattatcaacaaaagctttttcttttctaatctataaatcagcttatttaatagtggaaaaataaggtataaatgtagatatgctctagcaaaccagctaataggtgttattggtattaaagatttttgaattaaatcaggtcttaatgattcgattccaaataaacttatagaaaaaattaagacactcaagctccaaaaataagttgttgataaaaacttgcttagttttagccaactaaacttttgtgtaactaaaaaataaccactgatgatgacaaatatatctacagcaatttttccaccgcaggaaagtaactgcataacaattttattagcacttaaaaaactgtcttctgggaaatttccatgacaataataatgcgatagaattaccattaacatactaataatacgtagcaattcaatattactaaaacgtaattttaaattttctttctttctttctttctctgtgtacaaataatttcatctcccgtttagatatttagtgacatataataaattattatatcacatgattattgaaatattatatcacgggaaataatatagtaacaactgagttattaatttattagttattgaccttaattaaagttggttatgccaaaattagatacgtaaatagtattgtgtgtttataacctcctattaatattgttgatagacttttttgagagtttgtcttattgaaaaatgagaatacgtttctttggcatttttattatgtagcaatattatttataaaaatgttagcaaaaacatagattgttttaaataaatattataaaatatgatgtgaataagaatatagatgaagacaataatacagtaataaagtatttaggtaaaaagtataataccaaacatagttatttcactacatattatcttttagtgtactttttcttttggggattatgctgtttgaaatttaagaaaactatttaaaaaccgaggaaggatgttgatgcataagtgagtaacagttttttttactaggtaagatacgaacttttttaaagtagtggggataattttaaatcaggtattttatatacgccgatttatttattctgtgtagctgctttgcaattaagtaatactaaaaatgattcaatcaaatcattttacagtttcttagctaaacattctgccaacatatggtttttacattgtatattttttgctggagcaactaaagcggtctttcagccaattgcgtttcttccgcaaaatacatttttatcaattgcgtggattattctactgtgctctgtagtttctgtagtcatatcgccaatacaaatatacatgaagaataaaataaatagatatttataaaaattcaaacatatttcaagtaaagaatataaacaaaaatacccttcccaatataatattataaaaaataacgcagataagtattttactaatgatttagtatttgaaagtatgctaggtttaatgcaggttgagagcaaatatataaataaaaaatttgctattacttcatctcaatatgatatgaacttagacgatttatatacgattcatgggaaaatatcgttaaaagaagtactgtaatgtaaatttttcgcaaaattttatattgcacccctattatcattatgttacaatatatacacaattctctgactagctagtcagcaaaaggacggatataatgtttcgtaaagataaatggtttaaaatagggtggggttactttgtaatcatgtttttcttagaagcaatcctgcctgaatggatgggcgaggaaaatggagttctggaaagtcttcagctggtatggcttttaggcggtatttactacgcttggaagctgcgcaaacaaacattacaagcttggggcggacaaaagcttgctttatgttatgcaggtatgatttatttctttttacttgttatgcgtgaaatcagttggggtagagcactatttttaaatcctgatggcagtatctatgaatacagccaaatgggaatttatggaaaaatggtgcatcctttagtaaccatcctcataattttattgctgtatatgtgctataaagctaatatcaagcaattattacaaaaagtaaaattaccgttaaaatctacaattttattattgctcttcatttttatgtcctgggttggcgaaaaaaccaatttcgtcggatttcatgggcaagttgccgaagaactggcagaatttggtgcatatatgatgatgtattgcctagtacggaatatcggtaagaacttaaaaaaacaacggtaatttcctggataccattaatgagcgcttacaagagtactttagataaagtgctcttgtatttttatttgtaaattgcttgctgaatttatttaaaaatgttacaatgaaaatacatgaatgcaagtcgttttcatgcaaatattagtccactatgataaatagttaagcccatacggacaggcgggactgctgccggagtggtgagtaccacattattgattgagttgaaagctcaaattttataaggtgattgctagcaatccaaattaagtatcacttgtgaaacggtcaataagagtagtaaaagtaatatttgctatataaactctggacgtctgctgcgtcgcataatcgtcacagcttgctgtagattataggacaggtgatagaaatcatctgtccttttatttttttattttaggagaaataaatggaaaaactatcacaattatcggctccggtgtatgaagcactggaggcgtttcgcaaaaaacgtgtagtacctttcgatgttcccggacataaacgtggtcgcggcaatccggaactgcgcgagcttttaggtgaaaagtgcgtcaatctggatgtcaactctatgaaaccattggacaatctttgtcatcctgtttctgtaatccgtgatgctgaacaattggcagctgatgcttttggtgcggctcatgctttctttatggtaggaggtactacttcttctgtacaaagtatggtattgtcttctactaaagcaggggataaaattatcctgccgcgtaacgtacataaaagtgtaatcaacgctttagttttaaatggtgctattccagtctatattaatccggaagtagatagaagattgggtatttctttaggcatggaaattagcgaagtagaaaaagcgattaaagaaaaccctgatgctaaagcaattttagtcaataaccctacttattacggtatttgttctgatttacgttccatcgtgaaaattgctcatgagcataatatgctctgcctagttgacgaagcccatggtacacatttctattttggaccgaatatgccggtcaatgctatggcagcaggtgctgatatggcttctgtatccatgcataaatcaggtggcagcttgacacaaagctccttgcttttaactggacctaatgtcaattgggaatacgttagccagattatcaatttaacacaaactaccagtgcttcctatcttctgctctctagcttagatatttccagacgtaatctgtatatgcgtggcgaaagctcgtttgccaaggttgccgaaatggcacaatatgcccgtgaagaaattaacagcattggcggtttttatgcttatggcagcgagctgaaaaatggtggtagtatctatgattttgatatcaccaagctgtccgtttatacccgtgatatcggtttagcaggtattgaggtttatgaccttttgcgtgacgaatatgatattcagattgaatttggtgatattgctaatattttagcttatatttctattggtgatagaatccaggatattgaacgacttgtgggtgctttggcagatattaaacgcctttattcccgtgacccgtctttgatgttaaaaacagaatacattgccccgaaggtagtagtatctccgcaggaagctttttatgctaaggatgaatctttgccgctacgtgaaactgccggtcgtatttgtagtgaatttgtaatgtgttatccgcctggtattcctatcttggcacctggtgaagtaattacgaaagaaattatcgaatacattatttatgctaaagaaaaaggttgctccatgcagggaccggaagatccggaagtaaataatattaatgtaattgtataagttctagaacatataaaaatttaagggcgtgatttgatggagttgtggttctctgatttccatactgatgatgtaaaattagatataaaaatagaaaaacagctttttggtgaagatacggactttcagcgtattgacgtttttgcttctaaagagtttggccgatttattagctgtgatggcagcattgttttttcagaaaaggacgaattcgtttatgatgaaatgattgtccacgtgccgatggcggtccatcctcatgtacgtaaggttttggttatcggtggcggtgatggcggtgttgctcgtgaactgagccgttatcctgaaatagaagaaattgatgtggtagaaacagatcaagtatttatcgacgtctgccgcgagtttttccctgataactcggtaggtttagatgacccacgtgtcactgttttcaatgctgatggattacgttttttacgttctaaagtagatgaatatgatttgattatcaatgatgccatcgaccccttaggccatgctgcaggcctctttactaaagagttttatggtaactgtttccgtgcgttaaaagatgatggcattatggtttaccaacatggtagtccgttctatgatgaagatgaagaaacttgtcgtgctatgcaccgcaaggctagtcatagttttcctattagccgtgtatatcaggcagctattccgacttgtccttctggctactggctctttggttttgcgtctaaaaaatatcatcctttaaaagattttgagccggttaagtggaaagcacgtggtattaaaacttggtattattccgcaaatctacataaaggtgcttttatgttgcctaaatatgtagaagatatgctagaagaagaagaaaaataagcatagcatgaagctacgcttgttatatatcccctgaaatgtatcaaagatgataaggagttgaatcgattatgagtaaattattagttatcggctgcggtggcgttgctggcgttgccattgccaaatgctgccaaaacagcgaagttttcaccgaattatgtatcgctagccgtactcaatctaaatgtgaggatgtaaaagcaaaattacagccgactacttctactgttattactactgcacaagttaatgctgataataaagaagaattagtggctctgattaaagcatatcaacctgatgctgttttaaacgtagctttgccgtaccaagatttaactattatggatgcttgtttagaatgcaaggttgattatatcgatactgctaactatgaaccggaaaatattgatgatcctgcttggcgtgcagtttatgacaaacgttgcaaagatgaaggcttctctgcatattttgactattcctggcaatgggcctaccaagataaatttaaagaagcaggtatcatggctctgctcggtactggctttgacccgggcgtaactagcgttttctctgcttatgcactgaaacattacttcgatgaaattgaaagcatcgatattttagactgcaatggtggtgaccacggttatccttttgctactaactttaatcctgaaatcaatctgcgtgaagtttctgcacctggttcctattgggaaaacggtaaatgggtagaaattccggcaatgtctattaaacgcgaatacgatttccctcaagttggcatgaaagatatgtatctgctgcatcatgaagaaatcgaatctttggctaaaaatattcctggcgtaaaacgcatccgcttctttatgacttttggtcaaagctatctgactcatatgaaatgtttagaaaatgttggtatgttgtctactaaaccgattaaatttgaaggcaaagacattgttcctatccaattcttaaaagctttgctgccggatcctgcatccttaggtcctagaactgttggtaaaactaatatcggctgtattttcaccggtactaaagatggtaaaaagaaaactatttatatctacaatgtttgcgaccatcaagaatgctataaagaagttggttctcaagctatcagctacaccaccggtgtacctgctatgattggtactgctttggtgctgactaaaaaatggcaaggccaaggcgtatttaacgtagaagaattcgatcctgatccgtacatggatatgctgaaccaatttggtctgccctgggttgttgacgaaaacccggcaatcgtagaataatgatgaaggctttagaaaacctgcgtacaccttgttatgtggtggatgaggcaaaacttattaaaaatttagaactgttaaagcatattcaagacgaaacaggctgccatattctgctggcacaaaaatgtttttctatgtttaaattatatcctctgatgggcaagtatttagctggtactactgctagcggtatttatgaagctcgtctgggctatgaagaaatgggcaaggaaaaccatgtttttgctcctgcttttaaagatgaggatatgcaggaattagtaaaaatctgcgaccatatcgtttttaatagctttgcacagtttaataagcataaagatatctgcaagcaagcgggtatcagcgttggtatgcgtattaatccggagtgttcaactcaagaaggtgaccatgcgatttatgatccctgcgcttatggttctcgtttaggcgttactttagcgaattttcctgacgaactgccagaggaaattgaaggcttgcatatccataccttgtgtgaacagaacgctgatgatcttttaattacttttaaagtttttgaagaaaaattcgggaagtttttccacaaactgaaatggattaatctgggtggcggtcatcacattacccgtgatgattatcaggttaatgatttaattgcgttagtaaaatatattaaagcaacctatgatgtagaggtttatctggagccaggtgaagcagtagccttgaatgctggttatttggtaacggaagttttggatattgtgcataatggtatcgataccttaattttagatgcatctgctgcctgccatatgccggacgtattggaaatgccgtatcgtccgcctctggctgaaagctttgcagctaatgagaaaccctatacctatcgtttatcttccatgacctgtctagcaggtgatgtaatcggcgattacagctttgaacacgaaattaaagtaggggataagcttgtttttgaagatatggcaatttatagcatggtaaaaaataatacctttaatggtatgcccttaccggatattgctgtactgcatcagaatggtcaggtagagatagtacgtagctttgattatagtgattttaaaggacgactttcatgattgaaaaacaatatactcctaaaggcgacggcttttatatgcccggcgaatatgaacagcatgacggctgtattattgtctggccacagcgctctggttcttggagctttggggcttctgctgcttgcgaggcttttaccgcagtaattaaagctatcgctgctagtgagcatgtttatgttatctgtggcaaggagcattggcaacgtgcggaagcgatgctggctgatgtagcaaatgtagagctaatagccttagaaactgatgatagttgggcccgtgatattgcacctacctttgtagtgaaaaatactgctgacgggtgcaaagttcgtggtatcaattggcgttttaatgcctggggtggcgaagttgacggtttatatcccgactatgcacaagatgacgcttttgccgcagcttttgccgaaaaaacaggctatagtttgtatgatgctgctccttttgtgctagaaggtggttctattcactgtgatggcgaaggaactgctatggtgacggaggcatgccttttaagtgcaggacgtaatcctgatttatctaaagagcagattgaagaacgcttaaaaacatatctgaatgtagaaaaagttctttggctgccacgtggtatttataatgatgaaactaatgaacacgtagataatgtttgtgcttttgttcgtccaggtgaggttgttttagcatggacggataatgaagaagacgaacaatatgctttatccaaggctagttatgattttctcaaggatgctgtagatgcaaaagggagaaaaatcattattcataaattgccgattcccgacgtgcctgtatgcattagcgaggaagaggtgcaaggttatgactttgtcgaaggtgaagatatgcgtgaagcaggtgaacgtttagctgcttcctatgtgaatttttattttagtaatgatagtgtagtaatgcctgcttttggtggtgaaaatactgctagtgatttgcgtgccgcagaaattttagctgctttgtgtcctgaacgtaaagtagtacagattccagcacgtgctattttaacaggtggtggcaatattcactgcattactcagcagattcctaaaggagattgctaa

SEQ ID NO: 832 - DNA, 15740 bp, unidentified
  source 1..15740: mol_type = unassigned DNA
  misc_difference 9096: note = a, c, g, or t
  misc_difference 9097: note = a, c, g, or t
  misc_difference 9098: note = a, c, g, or t
  misc_difference 9099: note = a, c, g, or t
  misc_difference 9100: note = a, c, g, or t
  misc_difference 9101: note = a, c, g, or t
  misc_difference 9102: note = a, c, g, or t
  misc_difference 9103: note = a, c, g, or t
  misc_difference 9104: note = a, c, g, or t
  misc_difference 9105: note = a, c, g, or t
  misc_difference 11384: note = a, c, g, or t
  misc_difference 11385: note = a, c, g, or t
  misc_difference 11386: note = a, c, g, or t
  misc_difference 11387: note = a, c, g, or t
  misc_difference 11388: note = a, c, g, or t
  misc_difference 11389: note = a, c, g, or t
  misc_difference 11390: note = a, c, g, or t
  misc_difference 11391: note = a, c, g, or t
  misc_difference 11392: note = a, c, g, or t
  misc_difference 11393: note = a, c, g, or t
ttacttcagcagcgcgccggaaatgaccatcatctgcacttcgctggtgccctcgtagatctcggtgatcttggcatcacgcatcatgcgctcgatggggtagtcacgggtgtagccgtaaccaccgaacagctgcaggcagcggcgggtcacatcgcttgcggtgcgggctgcgatcagcttagcctgtgcagcctcgacgctgtaacgaacctttgcgccatccatagcctgctgcttcttcagagcggcagcataaaccagatacttcgcagcctcaacacgagccttcatctcagccagctcgaactgggtgttctggaaagcagcgatggcacggccgaactgcttgcgctccttgacgtaagcaatggtttcctccagagcgccctcggcaatgcccagagcctgagaagcgatgccgatacggccgccatccagcgtagccattgccagctggaagcccttgccgcgcacgcccagcatacgatccttcgggatacggcaatcctcaaagatcagctcgcaggtagaagaaccgcggatgcccatcttgtcctctgccttaccaacagagaagcccgggtcggtgcgctccacgatgaaggcggagcagagcttggtgggacggccgcgcttatccagcacgttatcggtaacggcgatgacgatgaacacatcagcaaagccggcgttggtgatgaagatcttggagccgttcagcacccagtaatcgccatcttccttggcaatggtctgctgaccctgcgcatcggtaccagcgcccggctcggtcaggccgaaagcacccagccactcgccgctgcagagcttcggcaggtacttagccttctgctcgggggtgccgttctcgtaaatgggagcagcgcacaggctggtgtgagcagagacgatgacaccggtggtgccgcagaccttgctcagctcctccacggccatgacgtaggacagcacatcgccgcctgcaccgccgacctcagtcgggaaatagatgcccatcatgcccagcttgcccatcttttcgacggtctccttggggaagtattcctctgcgtcaaccttctttgccagaggcttgacttcgttctcagcaaactcgcggtacattttctgcaccatctgctgctgcttggacagagtaaaatccatcgctatatcctcctaacaggtctttttttcatttaccggaatagcccggtgcaaacaaattcctcccgaccgctttccccgcagccgggagaaatgtttatcagaacttacagctggtcaacaggggtcttggtacggtctgcgttgtaaacgtagaagcccttaccggtcttgcagcccagattgccgccacgcaccatcttgcggatcagcgggcaggcacggtacttgctgtcgccggtctcgttgtacagcacgtccataatggccaggcagatgtccagaccgatgaagtcgcccagttccaggggtcccatggggtggttagcgcccagcttcatggcggtgtcgatgccagcgatatcggaaacgccctccatcttaatgaaggcagcctcgttgatcatggggatcaggatgcggttgaccacaaagccggcagcctcgttgacctgaacggggctcttgccgatggcaacggcgatctccttgatcttctcaacggtctcagcgggggtgttgcagccggcgatgacctcgatcagcttcatgcggtctgcggggttgaagaagtgcataccgatcaggggacgggtcagacccttgccgatctcggtgatggacagagaagaagtgttggaagcaaagacgcactcgggcttgcagatcttatccagctcaccgaaggtggtctgcttgaccttcatatcctcgaaagcagcctcaacgaccagatcgcagtctgcgcacagatcttccttcaggcccggggtgatggcggcgacgatcgcgtcagccttctcctgggtcatctttcccttagcgaccagcttctcgtagcccttcttgatctttgccagaccattctcggcccactcctgcttgatgtcgcacagagcaacggtgttgccctcaacctgtgcaaatgcctttgcgatgccctgacccatagtgccagcgccgataacaccgatcttcataggaaatctctcctttaatatcaaaaattatgtaatggattagttgttggtgaacactgccttgggcttcggtttctcacgggacaggaagcaggccatgccctcctgctgatcgtgggtctcgaagcaatcgccgaacagcttctcctcgacctcaacagccttctcgatgggcaggctaatgccgtcgttcattgctttcttgcagttacgcacagcaatgggagcgttctttgcgatcttgccggccagcttcaggacattctccatcagctcagcctgcggatacacggcgttgaccagaccgatgcggtaagcctcgtcagccttgatgttcagagcagagtagaccagctgctttgccatgcccatgccaaccagacgagccagacgctgggtgccgccgaagcccggggtgatgcccagaccgacttccggctgaccgaacacagcgttgtcagagcagatgcggatatcgcagctcatagccagctcgttgccgccgcccagtgcaaagccgttgacggctgcgatgacggggatggggaaatgctcgatcatcaggaacacatcattgcccagcttgccgaaggcctcgccttctgccttagtcatggtgctcatagaaccgatatcagcaccagcaacgaagctcttgtcgccttcgccggtcagaacgatgcagcggacagtctcctgatcgactgcctcaaaagcagccttcaggtcagccagaacctcggggttcagggcgttcagtgccttgggacggtcgatggtaatgatctcaacagcgccctgcacctcggtttttacaaatgccattgtgaaaacctccatttcatacagttcagtttttttcaaaacagcccccgggacgcgggagggctctccggttctctccggcgctccgggtctgtggttcaatcaggattcagagaaagagtgcttagtccatctcaacgatggtagcgcagcccatgccgccgccgatgcacagagtagccaaacccttgtgagcaccacggtgcttcatagcgtacagcagggtgaccaggatacgagcgccggaagcgccgaccgggtgacccaaagcgattgcgccgccgttgacgttcagcttgtccttatcgaagcccagagcctcgccgacagcgatggactgtgctgcgaatgcctcgttggcctcgaccagatccatatcagcaacggtcatgccggtcttggccatgaccttcttggtagcagcgatggggcccagacccatgacctcgggctcaacgcctgccagagcaccggcgacccaggttgccagaggcttcacgcccagctccttagccttctcctcgctcatgacgaccagagcagcagcgccgtcgttgatggcggaagagttaccagcggtgacgatgccgtctttggtgaaggcgggcttcagctttgccagaacctcgggagcgctcagacgggggccctcatcggtatcgaacacggtgtcgcccttcttgcccttgatgacaacaggaacgatctcgtccttgaaggcgccgtccttgatggccttgtcagccttcagctggctgttgtatgagaactcgtccagcatctcgcgggtgatggggctgtagccgtacttcttctggtaggtctcgttggtgcagacgttctcagcggtcatgcccatgtgcttgttgaagccgcaggcatcccacagtgcatcgttgaccatggtatccacgatctcgctcttgcccatgggagcgcccatgcggtagccgtagcgagccttctgcagtgcgaagggagccatatccatgttctccatgccgcctgcaacaacgatatcagcatcgcctgcctcgatcatctgagcagccatgttcacgcagttcagaccagagccgcagaccacgttgacggtgacagcgggggtctcgatgggcaggccagccttcagggcagcctgacgagcgacgttctggcccagaccagcctgaatgacgcagcccatgtaaacatgatcgacctgctcgggcttgacgtttgcacggttcagagcttccttgataacgatggagcccagctcaacagcgggaacgttggccagagtgccaccgaacttgccgatagcggtgcggcatgcagatgcgataacgatctttttcatgtgaatagcctcctgaattgtgtatgtgtgttacttatcggttacccatttatcaaaacgccctgcggcatttttgcggtatcagatctctttcctctcccggagctgtgcgtatttttcgctgacggccttttccacattgggtgtgacgaacttgctgatgtcactgccgtagtacgctgcttcctttacgatggtggaggaaagataactccatttgatgctggtggcaaggaacatggtctcgatgccgggcatcagtgcgtggttggtttgcgcaagctggatctcgttttcaaagtccgttactgcccgcagtccccgcaccattacggatgcgtggcgcttttttgcgaactccacggtcaggccgtcgaagctttccacggtcacattggggatgttcttgcagcattcctgcagcatagccacccgctcctccactgtgaacagcggatgcttggcgctgttgatcagcaccgccacaatgaggtggtcgttgatctttgctgcgcgtttgatgatatcaaggtgtcccttggtgaccggatcgaacgacccgggataaactgctgttgccatcggtcagtgtcctccttatgcgctgcaattattaagcgcgatgtggttctgccatgatagcactttccagccttgggtgcaacctgaaactgctgcggtgcgttttatcgttaaattttaaacgaatcatctcgcactgctccgcagttgcttcccacgctattagtaaagcacatcgtcaaaattttatcaagtctttttctcaacttttttgttttttgcgtaccaaacaatccccacataaagccaagaaaactgtttattatgctatactggttgttttttagccaaaactattgattctacactttgttaatgttataactaagttgagctgttctgcgcagagcggagcacacactgctgccttgtttataaggttaccatacagatgtggcaaaacggtgtgcattccgcaaaacaggcgtaaaacagccgcataatttgtccgcacagaattgtttacaattcttttatgtattttaagagaggatggtttataatggattgcaaggaactgtacgcacagaagcttatgactgctgcgcaggctgccgctctggtcaaaagcggcgactgggtggattacggctgggccgtgaacacccctgtggccgtggacgccgagctagcaaaacgcctgccggagttggaaggagtcaacttccggggcggcattctgatgtgggtgccggagatcttccagatcgacgaccctgctgcccacatgacctggaacagctggcacatgggcggcattgagcgcaaggccattgcgcaaggtttctccttctactcccccatccgctactctgagctgccccgctactaccgcgagagcagcgaccccgtggatgtggcagtatttcaggtgacccccatggacgagcatggctacttcaacttcggtcccagcgcttcgcatctgggtgctgtgtgcgaaaaggccaagaagatcattgtggaggtcaacaccaatatgccgcgctgccttggcggcatggagaacagcgtacacgtttctcaggtaagtggcattgtggagggcacaaatccccccatcggccagatggcagctgccggtgccgctaccgaggttgacctgaaggtagccaacctcatcgtgccgcagattcctaacggtgcctgcctgcaactgggcatcggcggtatgcccaatgccatcggcgggctgatcgcgcagagcgatctgaaggatctgggcgtgcacaccgagatgtatgtggatgcctttgtggatattgccaaggccggcaagatcaacggcagccgcaagcagctggacaagggccgtcaggtctacgcctttggtgccggcacccagaagatgtacgattacctgaacgataacccggagtgtatgtctgccccggtggactacaccaacgacatccgcagcatttccgcactggacaactttatttccatcaacaatgccgtggatatcgacctgtttggtcaggtgaatgccgaaagcgccggtgtgaagcacatttccggcgcaggcggtcagctggacttcgtgctgggcgcatacctttccaagggcggcaagagctttatctgcctgtcctccaccttctttaataaaaagaccggccagctggaaagccgtatccgtcccacgctggagaatggcagcatcgttaccgacacccgcgccaacgtgcactatctgtgcaccgagtatggctgcgtgaacctgaagggcttgacctcttgggaaaaggccgaggctctgatcagcgtggcacacccggacttccgtgaagagttgatccgcgaggctgaaaaactgcacatctggcgcagaagcaacaaaatttaataagcgctgtgggtattcccgctgcccgcagcaggaatggagtttgtcatgatggacaaaaagccgcacatcaaaccgtatctctatgggatgctcgcagggtttggtgccattgcactgagcatcatcttctttttccttatttaccgctttgacggctttggctcggctatctctaccctgaccggcatcctgatgccctttatctacggtgccgtcattgcctacctgctcaagccggtgtgcaacagcatcgaaggctttctgcgccggttcatcccggaaaagatgaacggtctgatcaacgcgctgtccgtggcgcttaccatcctgttcgggcttttgctggtgtatgcactggtcatgatgatcgtgccgcagctgatcaccagcgtgactaccctgtactacaccgcgcaggccaacattacaaagttcatgaactgggcaaaccatctggagtttattgaaaagaacgaacagatcacggaactgctcaattcagcctacgctgccctgaataccaatctggacacatggaacacatggctcaagaacaccctgctgccctccatgcagaacatcgtaagcggcgcagctattggtgtgctgaacgtggtgacggtggccaagaacctgatcatcggcatcatcgtggcggtgtatatgctggccagccgcaagcggttcgtgcagcaaggcaagctggtgctgcacagcatcgtccgcccccgctgggcgcagctgatcactgaggaagtgaagtacgcagacaaaatgttcggcggcttcatcaacggcaagatcatggactctgccatcatcggcgtgctgtgctatatcggctgcctgattttcaagttccccagtgcgctgctggtatcggtgatcattggtgtgaccaacgtgattcccttcttcggccccttcatcggtgccattcccgccacgctgctcatcctcatccagagccccatcaaggcgctgtggttcgtgctgttcgtgctggttttgcagcagctggacggcaacatcatcggacctaaaattctgggcaacaccaccggcctttccagcttctgggtactgttcgccatcctgctgtttggcggcctgtggggttttgtgggcatgatcgtgggtgtgccgctgttcgccgttatctacgacgtcatcaaaaagctggtcattcacggcttgcagcgccatcaggagctgaccctgctgaacagctatcacgaccagttcggcgaccccgcagacgatgcagccgcacagcccgctgcatcgcaacctgctgaaaaccagtaacccttccctgccccgcatcagagcccttccgatgcggggcatttttaacgtattataggtcaaatttgacgaggtgatttacatgaaaaagagcacgtcaaggattatcggtttgctaatgttgattatagctgttatatttataatgtttgcattgaaccatccagaaatgagttttccttggaacaataccattacttggttactgtatggtttatatttccttgtaacagtcgtgctgcttattgcgcctaagatgaagaagtaaaaaattccagtttacacagcaaaacccccgccttatgttccaggcaggaacacagggcgggggtcgtttattgctttgattcagatttcagctcagtccagcggatgagagggcttccagtccttatagttttcgtaccggctctcgcggaccttgtggtgggaccacacttcgtcagcggtgggctgccagttggcggcgtagctcttgcacttctcacacaggtgctcgacgctttccggggactgcaggtcggtgttgtgggcaccggtctcgtgcaccatcttttccagcagctccgggttttccagcatcgggcagggacgcagatggttcttgttgaagggctggccgttgtggtaagccatgaacagcgggctgtgcagaatttccagaatagactggtcgtggatattggcgttggagtagtggatgaacacgcagggctcggcgtcaccggcagagttgatatggaagtagttgcggccgccagcgatgcagccgcccacgaactcgccgtcgttctggaagtccatggggtagaacgggatatcgcacgcagaagagcgcagatagcggatacggtcgatcatatacttgcgctgttccggggtgggcatcagctccggggcggcctcattgcccaccggcatatagtggaagtagaagccgaagtgtgcccccttctcgcacaggagccgcatgaacgcatcgttggtgacggcctcgatgttctggcggggaaagccgatggaggcgccgaagaggnnnnnnnnnnggcattcctgctgaaccgctcttccgatctgatggaggtgccgaagaggatgccgtacttcttgagcagatccatggcgtgcatcacagcggcatagtggccttcgccgcggcgggcatcgttggtctccggggtaccctcgatggacagcataaaggcgatattgcccagacgccgcacctcttcacagaagggctcgtcgatgagggtggagttggtgtagatggcaaattccacgtcattatgcttttctgccagctcgagcacgtccttcttgcgcaccagcggctcgccgccggtcagcatatacaggtacacgcccagctccttgccctgcgtgacgatcttgtccatatcctcaaagctgaggttgttcttgttgccgtactcgcctgcccagcagcccacgcagtgcatattgcaggcagaggtggggtcgaacaaaatcagccaagggatgttgcactggtatttgacgcggttctcgcggatcatcttagtgccgcggaagaaggcttcgtagcccagattcagcgcagtggtgcgcgccacgtgggggtcggtctgatccagcacgcagttgatgagtttcgtccacttgctgtcggggtcggtcagcacctttttggcgttctcgtaggtctcgtcgctgaagccgctgccgtagaactgctttgcagcatctaccagctggcacattgttttttcacggtcttgctcggcgcgggaaagcgccacgtccactattttaccaagcgcagcacgctgcatcttgtgagtcagattatcaagagatgtattcataactttttcctcccgaaatgattcctttggaaatccttattttgcctgaccacatcctaccactttgcgtgtttttgtgccataaacagaaaatacgccgtgatggaaaacccatcacggcgtatcctttgataaaattttattgaagccgcacagccacaaagcacatcattcctctattttcaagctgccgctgctcaggcggcacagcgcccggcggaaatccccgtggatcatggtgctcacgcgctccaccatcttcttggggtcgcctctcatatcccggcgggtccattccagcgtcatacccaccagtgcatacttgtaaaaatcgacaacaaactgcttatctgcgtcctgcacggtgatatcgtggcattcacggtccgcaaaatccttcaggatggggtccagcagcctataaaggtactgctccacctgttccctgcccaccgagcggtaaacgttgagcacaagggtcttgttatcctgcagttggcgcagaacgtccagataggcttcgctccatgtaccaaaaccccggcggccttccattgccttggcggcatcctccgccaagatccagtccaccagatcgtaaatatccttgaaatggtaataaaaggtcatgcggtttaccccgcagtcctcggtgatatcgttgatcgtaattttgttcaggggcttttccagcagcagcttcttgaaagatgcctccagtgcccgttttgtcgtttgtgacacaaaaacccatcctttcccggcagactcctctgccgtttccgtaaatgataccccatagtttattttaccgcaaaatacgaccttatttcaagtagagattcttacctttttatgaagtttgtgtgtgcgctgcccgccgcgaaggtgctgtttttcaatctgcccgccaaaaataagacaaaagtcttgattttctcccagcggttgcttagaatgaataagaagcagaattttatgcagtgcatacctgccgagggagggttattattatgatgaaaaccattgggtttttaggctgtggaaacatgggcggtgctattgcacgcgctgtgtgcaaggctaccgagcctgagaatgtatttctggcgaaccgcacggcggccaaggccgaggcgctggccgcagaactgggctgtcagacggctaccaacgccgaggtggccggtgactgcgacctgatctttctggcggtaaagccccagatgatggaagccatgctggagcccctgcggttcgtccttgccgagcgcaccaagcggttcgtgctgtgcaccatggccgccggtctgccagtggcacgcattcaagagatggcgggcggcgactaccctgtcatccgcatcatgcccaacaccccggcatcggtgggcgaaggcatgatccagtattgctccgtcaacgtaaccgccgaggaggaggctgcattctgccagctgatggctcccgccggnnnnnnnnnntgcaagctgcgtctccggctgcggcccggcatgggtgtaccagtttattgaagcgctggccgatggcggcgtggcctgcggtctgccccgggcaaaggcacaggaatacgccgcacagatggtactgggcagcgcaaagctggtgctggaaagcggcaagcaccccggcgcgctgaaggatgctgtgtgcagccccggcggcagcaccattcagggcgtgcgggtactggaagaacacgggctgcgcggtgcggtgatggatgccgtgctggctgcttacgacaaaacaaaggaaatgggaaagggttaatggaatcatgcgcatcgttgtgaaagtgggcacctccacattggcataccccaccgggcggttgaacatccgccatgcagaggaactggtcaaggtattgagcgatttaaagaatgagggacacgaggtcattctggtgtcctccggcgctattggcatgggcgtgggcaagctttcactgcctgcacgccccaaggataccaccaccaagcaggcctgcgctgccgtggggcagtgcgagctgatgtacacctacgaccggttgttcagtgcctacgatcacacggtagcgcagatcctgcttaccggcgtggacgtggagcacaccgagcgccgggtgaacatccagaacaccctgacccgtctgctggaactgggtgcactgcccatcatcaatgaaaatgatagcgttgccaccgatgagatcacttccattggcgacaacgacacgctggccgctattgtggcctgctgctgcaaggccgacttgctggtgctgctgagcgacatcgacggcctgtacactgccaacccccacacccacccggatgcggcgctcatcccactggtggaggagatcaccccggaggtgatggcgctggcagacggtgcaggctctgcactgggcaccggcggcatggcaaccaagctgcgggctgcccgcatggtgaccggcagcggtgcggatatggtcatcgccaacggcgcacacccggaactgctgtatgatatcgctgcgggcaagcccatcggcacccgctttgccgggcacaagcagcccgcgctgtccacacaggaggtttgagctatgaccacacaggaaattctggaagccgcccgcggggcaaaggctgcgctggcactggctgatagcgccagccgcgcacaggcactgtgcagtatggctgcgcagctgtgcagcccggcaaacatgacggctatccttgccgccaacgccgacgatatggccgctgcaaagggacatatcagcgaggtgatgctggatcgtcttgccctgaccgaagagcgcatccgtgctatggcaaagggcattgaagaggtcgctgccctgcccgacccggtgggccgggtgctgaagcgggtggagcgccccaacgggctggtgatcgaaaagaccgccgtgcccatgggtgtgattgctatcatctacgagagccgtcccaacgtgaccagcgatgccgccgcccttgccatcaagagcggcaacgcctgcatcctgcgctgcggcaaggaggcttggcgcagcgccaacgccattgtgcaggcactgcggcaggggctgcgggagaacagcctgccggaaaacgcggtctgcctgatcgaggacaccacccacgcctctgccaacgccctgatgaccgccgtgggctatgtggatctgctgatcccccggggcggcgcagggctgatccgcgcctgcgtggaaaacgccaaggtaccctgcatccagaccggtaccggcatctgccacatttttgtggacaacaccgccgatcaggccaaggcgctggacattattgaaaacgccaaggccagccgccccagcgtgtgcaacgccgaggaggtgtgtctagtgcactctgccattgcgcaggagtttctgcccaagcttgcacagcgtcttggccccgaccgcgtggctgcgggcaagctgccggtagaactgcggctggacgcacccgccgccgccatcattcccggcacgcctgccggccctgcggactttgacaccgagtttctggactacatccttgccgtcaaggtggtggacagtgtagatgaggccattgcccacattgcgcagcactccaccggccatagcgaggccatcctgacccagacgcaggcagacgccgaccggttcaccgctgcggtagacagcgccgccgtgtatgtgaactgctccacccgctttaccgacggcggcgagtttggtctgggctgtgagatgggcatctctacccagaagctgcacgcccggggtcccatgggcttggaggagctttgcagctacaagtacgttatccacggtgacgggcagattcgctgatctcccctgccccagcttcttcataatttttttacaattctgtccggcctgcgggcgcggcagagcaagtttttcacagttgaaaaaaatttcctgtacaggccgatgcaagctgcttcggcctgtatttttgttttatcgggatggactgtatttcgattcaagtgaaaaagtgaaaaatatttcacttttttcagaaaatggattctcttggatggtggtatgtatccaagaattcgccgtttctcacaatgcaaaagtagtacttttacgtttttataggttaaaaaagcaaaatcttctcttgacagagcgttttttgtgcggtaaaactatattgtaagatttgatatcgatttcactctcgtttcacagaacttcaaaattcgtacatcataactggtgcattgtaaaaataagtaaaggagagagcatcctatgacgatcgcaattcttgcccacgattcccgcaaagaactggctctgcagttctgtaccgcttacagtgccatcctttcccgcaataatgttatcgccaccggtaccaccggccggatgcttgcgcagactactggtctgccggtgcattgctacctctccggcaagctgggcggtgtacagcagatcacctcccgcgttgcctgcgatgaggtggatctggtgctgttcttccgcgacccgctgaaggccgatgccgccagcctgaccgaacagaatctactgcgcctgtgcgatatgcacagcgtacccattgccaccaacattgctaccgcagaggtgctgctgcgtggtctggatcagggagatctggactaccgtgaagggatgcacccggccatgatcgagccgatccccgccatgcaggcccgtgccgtgtaagcctttatttgtgtgttactttgtgtatagagggaaaaaaggagctatcgcagcgtgttgtgcgatagctcctttttgttataaggatatcttgcccgaaaggcaaggattatgcctgaaagtatgctttctggacagccagcagcacaccggcgcggctggcggcaaagttcaagccgccctgcaggtagcaggtatagggggcacgcagaggaccgtcacaggaaagttcgatggtgctgccctgcgtaaagctgccgctggccatgaccacctcgtcggtgtagcccggctccgggctgggttccggggcggcgtagctgtccacggggctggcagcctgaatgccctgacagaagccgatgagcgcctccgccgtaccggcatcaaagcaggtgacgatatcgttgtgattctcgcagtagcgtgggatgggctttttgcccagcagctccagcatacactgggcgtagatggcggtcttaatggcctcgcacaccacgccgggggcgtagtagaagcccagatacatatctcggggggtctccagtgtgcagcccagctccttgccaaggccgggggcgttcaggcggtaagcgcacagttccaccagatccttgcgacccacgatgtagccgccggtgggagcaatgccgccgccggggttcttgatcaggctgcccactgcgatatccgcgcccacctgacagggctcctgtgtctgggtgaactcgccgtagcagttatccacaaagatgatgatctccgggtttgcggcgcgggcggtatcagcaattttgcggatggtagccagatcaaaggcattgcgctgtaaatagccgcggctgcgctggatatggcacacctttgcaccgggggcttttttggcgatcaggtcataatccggggtgaagtctgctttaaggggtgcttcgtcatagttcacgccgtagtccatcagagtgccggtgcccttgcccttgccgtccagaccaatgacgccctccagcgtatcgtaggggcggccggtggcggccagcagggtgtcccctgcccgcagcagaccaaacagggccacggccagagt

SEQ ID NO: 833 - DNA, 31020 bp, unidentified
  source 1..31020: mol_type = unassigned DNA
  misc_difference 24162: note = a, c, g, or t
  misc_difference 24163: note = a, c, g, or t
  misc_difference 24164: note = a, c, g, or t
  misc_difference 24165: note = a, c, g, or t
  misc_difference 24166: note = a, c, g, or t
  misc_difference 24167: note = a, c, g, or t
  misc_difference 24168: note = a, c, g, or t
  misc_difference 24169: note = a, c, g, or t
  misc_difference 24170: note = a, c, g, or t
  misc_difference 24171: note = a, c, g, or t
  misc_difference 24172: note = a, c, g, or t
  misc_difference 24173: note = a, c, g, or t
  misc_difference 24174: note = a, c, g, or t
  misc_difference 24175: note = a, c, g, or t
  misc_difference 24176: note = a, c, g, or t
  misc_difference 24177: note = a, c, g, or t
  misc_difference 24178: note = a, c, g, or t
  misc_difference 24179: note = a, c, g, or t
  misc_difference 24180: note = a, c, g, or t
  misc_difference 24181: note = a, c, g, or t
  misc_difference 24182: note = a, c, g, or t
  misc_difference 24183: note = a, c, g, or t
  misc_difference 24184: note = a, c, g, or t
  misc_difference 24185: note = a, c, g, or t
  misc_difference 24186: note = a, c, g, or t
  misc_difference 24187: note = a, c, g, or t
  misc_difference 24188: note = a, c, g, or t
  misc_difference 24189: note = a, c, g, or t
  misc_difference 24190: note = a, c, g, or t
  misc_difference 24191: note = a, c, g, or t
  misc_difference 24192: note = a, c, g, or t
  misc_difference 24193: note = a, c, g, or t
  misc_difference 24194: note = a, c, g, or t
  misc_difference 24195: note = a, c, g, or t
  misc_difference 24196: note = a, c, g, or t
  misc_difference 24197: note = a, c, g, or t
  misc_difference 24198: note = a, c, g, or t
  misc_difference 24199: note = a, c, g, or t
  misc_difference 24200: note = a, c, g, or t
  misc_difference 24201: note = a, c, g, or t
  misc_difference 24202: note = a, c, g, or t
  misc_difference 24203: note = a, c, g, or t
  misc_difference 24204: note = a, c, g, or t
  misc_difference 24205: note = a, c, g, or t
  misc_difference 24206: note = a, c, g, or t
  misc_difference 24207: note = a, c, g, or t
  misc_difference 24208: note = a, c, g, or t
  misc_difference 24209: note = a, c, g, or t
  misc_difference 24210: note = a, c, g, or t
  misc_difference 24211: note = a, c, g, or t
  misc_difference 24212: note = a, c, g, or t
  misc_difference 24213: note = a, c, g, or t
  misc_difference 24214: note = a, c, g, or t
  misc_difference 24215: note = a, c, g, or t
  misc_difference 24216: note = a, c, g, or t
  misc_difference 24217: note = a, c, g, or t
  misc_difference 24218: note = a, c, g, or t
  misc_difference 24219: note = a, c, g, or t
  misc_difference 24220: note = a, c, g, or t
  misc_difference 24221: note = a, c, g, or t
  misc_difference 24222: note = a, c, g, or t
  misc_difference 24223: note = a, c, g, or t
  misc_difference 24224: note = a, c, g, or t
  misc_difference 24225: note = a, c, g, or t
  misc_difference 24226: note = a, c, g, or t
  misc_difference 24227: note = a, c, g, or t
  misc_difference 24228: note = a, c, g, or t
  misc_difference 24229: note = a, c, g, or t
  misc_difference 24230: note = a, c, g, or t
  misc_difference 24231: note = a, c, g, or t
  misc_difference 24232: note = a, c, g, or t
  misc_difference 24233: note = a, c, g, or t
  misc_difference 24234: note = a, c, g, or t
  misc_difference 24235: note = a, c, g, or t
  misc_difference 24236: note = a, c, g, or t
  misc_difference 24237: note = a, c, g, or t
  misc_difference 24238: note = a, c, g, or t
  misc_difference 24239: note = a, c, g, or t
  misc_difference 24240: note = a, c, g, or t
  misc_difference 24241: note = a, c, g, or t
  misc_difference 24242: note = a, c, g, or t
  misc_difference 24243: note = a, c, g, or t
  misc_difference 24244: note = a, c, g, or t
  misc_difference 24245: note = a, c, g, or t
  misc_difference 24246: note = a, c, g, or t
  misc_difference 24247: note = a, c, g, or t
  misc_difference 24248: note = a, c, g, or t
  misc_difference 24249: note = a, c, g, or t
  misc_difference 24250: note = a, c, g, or t
  misc_difference 24251: note = a, c, g, or t
  misc_difference 24252: note = a, c, g, or t
  misc_difference 24253: note = a, c, g, or t
  misc_difference 24254: note = a, c, g, or t
  misc_difference 24255: note = a, c, g, or t
  misc_difference 24256: note = a, c, g, or t
  misc_difference 24257: note = a, c, g, or t
  misc_difference 24258: note = a, c, g, or t
  misc_difference 24259: note = a, c, g, or t
  misc_difference 24260: note = a, c, g, or t
  misc_difference 24261: note = a, c, g, or t
atgagcaagaaattcttgtacctgttcaaagagggtcatgacgccttcggcggcgaccagaccaccatgaagaatactctgggtggtaagggcgccggtttggccgagatgacccacgccggcatgccggttccgcagggcttcaccatcaccactgaggcctgcacccagtactatgcagacaaccgcgagatcaacgatgagatcaaggcggacatcttcaaatacatgggcatcctcgaagagcagaccggtaagaccttcggctccatcgagaaccccctgctggtttctgtccgttccggtgctcgtcagtccatgcccggcatgatggataccatcctgaacctcggcctgaacgatcaggctgttgagggtctggccaagaagaccgacaacccccgctttgcctacgactgctaccgccgcttcatccagatgtactctgatgttgtcatggagctgggcaagagcttctttgaggagcgcatcgacgccatgaaggagcgcaagggtgttacgcaggacgttgacctgactgccgatgatctgaaggagctggtcaaggagttcaagcagatctacctcgagaagcagggcgagcagttcccgcaggacccgaaggagcagctgatcggtgccgtcaaggccgttttccgctcttgggacaacccccgcgccaatgtgtatcgtaagatgaacgagatcccctacgagtggggcaccgctgtcaacgtgcagcagatggccttcggtaactccggcatgcgctccggcaccggcgttgctttcacccgtaaccccgctaccggcgagaagaagctgatgggcgagtacctgatcaatgctcagggcgaggacgtcgttgccggtatccgtactccttctcccatcagcaagctgcatgaggagatgcccgaggtttacgatcagttcgttgagatcgctacccgcctcgagaactactacaaggatatgcaggacatggagttcaccatcgaggatggcaagctcttcatgctgcagacccgtaatggcaagcgtaccgcgcaggctgctctgcagatcgcctgcgacctcgttgatgagggcgttatcaccgagcagaccgctgtgctgcgcgttgagcccaagcagctcgacaccctgctgcatccccagttcgatgccgctgccctgaaggctgccgaggctatcggcaagggtctggctgcttctccgggatctgcctgcggccgcgttgtcttctctgctgaggatgcagaggagaaggtcaaggacgatgcttggaagaaggtcgttctggtccgtctggagaccagccccgaggatatcgtcggcatgcaggtctctcagggcatcctgaccgtccgcggcggtatgaccagccacgctgccgttgttgcccgtggtatgggcacctgctgcgtctccggctgcggcaacgacaacagtgttgccatcgactatgacgccaaggtcatcactatcaacggccacaccttccacgagggtgactggatgagcatcgacggctccaccggcaacatctacgagggccagattgctaccgttgcttccaccgagaacgccaacttcaagcgcttcatgggctgggctgacgccaaccgtcagatgaaggtcatgaccaacgctgataacccgaaggacgctcagaacgctgttgacatgggtgccgagggcatcggtctgtgccgtaccgagcatatgttcttcgctgaggaccgcatcaaggctgtccgcgagatgatctgcgcccgtactgttgaggagcgcaaggctgctctggccaaggttgagccgttccaggaggccgacttcactgccatgtaccgcatcatgggcgaccgtccgatgaccatccgttatctggacccgccgctgcatgagttcctgcccaccaaggcagaggacatcgctgctctggctgccgatatgggtatgaccaccgaggagctgaacaacgttgttgtcagcctgcatgagttcaaccccatgatgggccaccgtggctgccgtctggctgtcacctatcccgagattgccgagatgcagaccaatgctgtcatcaaggctgccatcaaggtttctgctgagaccggcaagatgatcacgcctcacatcatgattcctctggttggcgaggtcaaggagctgaagttcgtcaaggacgttgttgtcaagacggctgatgccctgatcgctgctgccggcgttgacatgaagtatgaggtcggcaccatgatcgagatccctcgtgcagccctgactgccggcgagatcgccaaggaagctgacttcttcagcttcggcaccaatgacctgacccagatgaccttcggcttcagccgtgacgacgctgctaagttcctgtctgcctactacgacaacaagatctacgagagcgatccgttccagcatctggatcagatcggcgttggcaagctggtcaagatggctgctgctgacggccgcgccaccaacccgaatctgggtctgggcatctgcggcgagcacggcggcgacccctccagcgttgagttctgccacaatgttgggctggactatgtcagctgctctcccttccgtgttcccatcgcccgcctggccgcagctcaggcagctattaaaaatcccagagcgaagtaattgatttttaacgaactatcgctaaaaattcaagccagaaaaaggttgaaaattgactgaaatgtgcgctgttgcttgccggtggcgcacatttgtgtttctgccaaacatacacttcgaccctcaaatctgtccaagaacagcgcctgaactggctcggcatatcgtttttttgacgatattgacgcgcggtttcgaagttgattctgaatttcagcaggggagtttgctcgattttcgttaagtcggttcgttcagcgtgaggaacctgcggaccaaaattcagtttccagcggaagaggttgtccttgacaggtgtgacaacttctacaaattcctgaatcagtgaatcaggcagcttcggtgcagaaagatccacgattcgattcagtgcagcagtcagttccttcatagaaggagtggctgctgctttttgctgtgctgccatttcggctggagggtgctgcaaggcacttatttcctgctccgtcttggcgcacagctctttgtactcatcacgccccaagtcaccgtctgcgtacatttgagcaagccgcagtttgcgatttttcagcttactgatctgggcgctgctgctggcgaccgagcaggtaataatgatttacttaatacggcacacatcaaaaaagcgttggaggagcttgtggatatttcagcacccaaaattaacgacaagctgattgaacgctttgtagaggttgtgacgccaattgaaaactattcatatcggtggaaacttaattttggagaaaaggtgagccgaaaagacagaacagacctttgcaaaatcgaaagcgcgccgattctcagcttcaaaattacttttcaagaagcacatgaataccgtaaagctaataagatgcctgcacagtttactttctcaaaggggagcttacgatttcgagtattgtccctttccgggttccttgaaaacagccgcttcccaacggttaacattttaatcgaattgaataacacttgcttgacattttctacggtcatacatttcactccttgcagttaggtgtcacagcggacacttcctaactacaagggcctctttgcttaccgaagtaagcaaagaggccgcacatcctgagcttattgtcaagtgtttagaagaaaaaaatccctctacaccaatttctgtgttggtgtagagggattgcctgtttaactaagtgacattgggacattggccccgcttttttcctattcaaagggaattatggacgatgatactttctttttccgggtcgcgtttactacccctgttgttgtcaccaactcggtttttgttggtgacataagagtacaacttttttcgtaaattcgattcatttcattttgcttcaactcccagcaggaatgcgcataaaaaagtggaactttcccaagtgagagaatgctctgaaaaagttggattgtctgcatttagtgcaaattgctgcacctccatctttttagtggtgagtttttcctttacttccgtgtaagaatgcccataaatgtatccccagattgcggtccggtcagattttcgccctttaataaagcgaccctcctaacgaccatctttcctctttctgatgttttctccacgctttgccataatgctcctccttgttcaatttgtaatgatgtaacattgcttttatatgtttcggctattccataggaaaaagtacgcccaatatggtgaaagtgacaaaaatatgttcgggtacggtttgatataactcgttctgttgaaatgtgtcgtattgtgtggtattatatctatacatattatatatgggcttctgtggaaatgagtatcatccattctcaaaatggatgatactttttagaggcttgaattgcccttcaagtatctcatttgttgaagtatcagaaagaggaattgtgaaggctatcagcggtgctttataaactatactgtgccctgtaaaagcgaatggaaaatacttgaagaacaatttgagcccacgggttggttgcaattgagcaataagccgtgggcttgtttcagttcatgtaaatgttggcccgaaataccggagcaacgtagaatcgtctagcaaggtggataagagacatcaaaaatgcgagaaaagctacgttgctgcggagtgttgagtagacagttgtgtatgtagcaatgatgacaaaacaccgtatttacgaacattttctacggcttggaaaaataagtgagctttttatgcaactaaaagctacgttgctccggtatgtagagtagacctattccgaaatgtttactcaacataatcagttgaggtctgatggtcaatggtggagcgtaatacacatgcgataataggcatttttgcataaaaatgcgccgtattttactctgaaaatcatgttttgtgcagtaggacgttaatactgataactgcatttatctgcgtggcgttgagtaacgaacggaaattactaatattctgtcgtgtagacatcataaaaaatgaataaatcattgtgcaggttgcaataagaatgaaggacttgtttgtatgattattacaaaaaagatggaatgggaaaatctggcaaaatagaagcgaaaaaactggtttactcaacagattaacactttgatgtagagggtggagagtgcggcgcatgaatatgcgccagtgaaaagtagtgaaagatgcaactgattttgttgagtgaacctgtctggataaagatatgcaggaaaatggacgaaatatcgaaaaaagtgttgattgctggggtaattggatacgacaacataagaaaacacttagccgtgtgcgtggcaagaggaaaaagaaataccatctgtggagagcagatgtgtacatagattgggatattaaacgaaaagacggaggaagaaaatgagcacagttagcttagagaataaaacgattttagtcacaggagcggccggatttatcggttccaatcttgtgaaacgaatttatcaggaggccccttcggcaacggtcatcggcatcgacaatatgaatgcctactatgacgttgccttgaaagagttccgtttgaatgagctggccaagtatcccacattcacttttgtaaaaggcaatatcgctgacaaggcactgattacagagctgttcgagaaatacaagcctgctgtggtcgtgaaccttgcagcacaggctggtgtgcgctactccatcaccaacccggatgcttatgtggaatctaatctggtcggctttttcaatatcttggaagcctgccgtcattgtgagagcttggagcatctggtttatgcttcctcctccagcgtctatggcagcaacaaaaaagttccgtacagcacggatgacaaagtagataaccctgtttccctgtatgcggcaaccaagaagtctaacgagctgatggcccatgcatattccaagttgtacaacattccgtctaccggcctgcgcttcttcacggtatatggccctgctggccgtccggatatggcttacttcggtttcaccaacaagctggtgaagagcgaaaccatcaagatcttcaactacggcaactgtaagcgtgacttcacttatgtggatgacatcgtggaaggtgttgtccgtgtaatgaagaaggctccggataagaagaacggcgaggacggcctgccgattccgccgtatgcagtttataacatcggcaaccagaacccggaaaacctgctggatttcgtacagattctgagcgaagagctggtacgtgcaaaggtgctgccggaagattatgacttcgaggctcacaaggaactggttccgatgcagccgggtgacgtgcctgtgacctacgccgataccagtgctttggagcgtgacttcggatataaaccttcgaccagcctgcggactggcctgcggaagttcgctgaatggtatgcagaattttataagtaagaaagaataggaaaccaagtagatgaagtgtgttgaggtttataaggaattataccaccaggaaccgtatggcgtggctttctgcccgtaccgtattagcccgctgggagctcacattgatcatcagtatggcaagatcaatggtctggcaatcgataagggcatccacatggcataccacccgaaacagaatggcgttgtggaattgcagtcgctgaatttcccgaaacgtgcgcagttctttgtgagtgctgtgccagaagaaaagcaaggagactgggctgaccatctgcgtggtgcagcaaagatgctgggtgagaaatatcgactgaaagttggtctttctggaatcattgaaggcagtttgccgattggtggtctatcctcttcggcagcggttattatctgtttcttgtctgcgctgtgcaaagtcaacggtattcatctggaaccgatggaaatgatcctgaccgcaaaggcggcagaaaaccagtatgtgggtgtttcctgtggcaagcttgatcagagttgcgaagtcctttccaagaagaatcatctactttacctcgacacgaaggatgatggctatgagttgattccgaccagtgagaagatgaaaccttataaagtggcaatcttcttctccggtttggaacgctccttgaagaattccaaatacaatctgcggcaggatgaatgcaaggctgcggcttatgcgctgatgggttatgcgggaatggattatgatacctttgccaatacccgcctgcgggatgtgccgtttgaagtatttgaaagctataaggatcgtctgccggaactgtggcggcgcagagcagaacactattatagtgagtttgcccgtgcagaaaagggtgcggagttgtggcgcgaaggtgatctggaaggctatggtcagcttgtttttgaaagcggcaagtcctcgatttacagctatgagtgtggatgcgatgaactgaaaaagctgtatgagattatggcagataccgatggtatctatggtggtcgtttctctggtgctggcttcaagggctgctgcatggcattgattgatccggtcaaagcggaagagattgaggcaaaggtcggaacagagtatctgaaagcattcccggaactggaaggaaagtacagtttccacctgtgcgagagtgcggatggtgtggaactatgaaactgacttcggtacatcatattgcaattatcgtttctgacgttgaaaaagcaaaagagttctatgttcagaagctgggctttgaggtgattcggggaaattaccgggaagcgcgtgatgactggaagctggatcttcgagtagatgaacacacagaacttgagatttttgcagaaaagaaccctccccaaagagtgaatcatccagaagcctgtgggctgcggcatctagcatttcgagtaggaagtgtagacgagacggttaaagaactggaatcgctggggatagagtacgaaccagttcggcttgatacctacacgggagaaaaaatgacatttttctgtgacccggatggactgccgatagaaatacatgagtgaggatcacatagatgaaatgtttgattttagcagcgggatatgccacacggctttatccgctgacagagaattttccgaagccgcttctgaaggttggcgagaaatccattctcgactggctcgtggacgatttggtgaaaaccactgatattgatgaatttgtggtgatttctaatcataagttcgcacagcattttgaggactggaagaacaataagaaaaaaggtcgtccttataaaatcacggtgctcgatgatggtaccagcacaaacgaaactcgtttgggtgctgtcaaggatattcagcttgcagttgaaacgctgaatatttccgatgatctgctggtcatggctggcgataacgtgctggactttagcctttccacctttgtgaactttgcaaaggagaaagaaacttcctgcgtgatgtgccacgaagaaaatgaactgaaaaaacagcagaaaacggcaattatcacagtggatgataataacctgattacatcctatgaggaaaagccgcaggagccgaaaggcaatttggcggttccgccgttctattgttatcgcagtgcggatgtaaaacgcattcagaaagcactggataatggctgcggttatgatgcaccgggcagctttgccgcatggctgagcaaacaaactccgatgcacgcctataagatgccgggtaaacggtacgatattggcgacattaacagctatgagtatgtgaaaagcgtgttctcaaagtgaaagctacgcagggtatataagcgtgaataaaaagaggatggaaaaatgagagaatttaaagacttaaaaatagcagtggccggcacaggttacgttggcctttccattgctacgctgctgagccagcaccatcatgttacagctgtggatatcatcccggagaaggttgagctgatcaacaaccggaggtctccgattcaagatgaatatatcgagaagtacctggaagagaaagaacttgacctgaccgcaaccctggatgcaaaggaagcatactctgatgcagatttcgtggtcattgctgcgccaacaaattacgatagtaagaagaatttctttgacacaagtgcagtcgaagcggtcatcaagctggtgattgagtataacccggaagccgttatggttatcaagagcacaatcccggttggctacacggcatctgttcgtgagaagttccactgcgacaatatcatcttcagcccggagtttctgcgtgagagcaaagccctctacgataatctgtatccttcccgtatcattgtcggcaccgatgtggaaaatgcacgactggttaaggctgcatacacctttgcagagctactccaggaaggagcaattaaggaaaacattgacacgttgtttatgggcttcaccgaagcagaagctgtcaaactttttgcgaatacttatctggcactgcgagtgtcctactttaacgagctggatacttacgctgagatgaaaggcttgaatacacagcagattatcaatggtgtttgtcttgatcctcgtattggcagtcattataacaaccccagcttcggctacggtgggtattgcctgcccaaggacaccaagcagttgcttgcaaattatgccgatgtaccggagaatttgattgaagcaattgtggagagcaatagaactcgtaaggacttcatcgctgatcgtgtactggaaattgctggtgcgtatgaggcaaatgatagctgggatgagagtaaggaaaaggaagttgttgttggtgtttatcgcctgaccatgaagagcaacagtgacaacttccgccagagttctatccagggtgttatgaagcgcatcaaggcaaagggagcaacggtcattatctatgagccgactttgaaggacggagagactttctttggtagtgttgtggttaatgatctggcaaagttcaaggaaatgagccacgccattattgcaaaccggtatagtaaagatcttgatgatgtgaaagaaaaggtttatacgcgggatattttccagcgtgattaaacataaaaaagaaaaccctagggaggaactagtgtatgaaagcagttattttagcaggaggttttggcacaagaatttcggaggagtccgaatttaaaccgaagccgatgattgaaattggcggtatgccgattctgtggcatattatgaaaacctattcgcactatggaattaacgaatttgttatctgcgctggatataagcagcatgtgattaaagaatggtttgcagattatttcctacacacttcggatattacctttgactttacgcaaggaaataaaatgattgttcacgatcaacatgcggaaccgtggaaagtaactattgttgacactggattgaatactatgactggcggtcgtgtaaagcgtattcagaaatttgttggtaacgagccgttctgtctgacctatggcgatgcagtgtcggatgttgatatcggaaagctgattgagttccacaagagccatggtaaatgtgtgacactgacttctgttagcttggcacagcagaaaggcgtattgaatattgatgctaacgatacgattactgcattccgagagaaagacaatgaagacggctcgttgattaatggcggctttatggtatgcaatccggaagtttttagctatttggaaggtgactggaccgtttttgaacaggatccgatgaaaaatcttgcaaaatcaggcgaactgaagagtttctatcatgatggattctggcagtgcatggatacaaagcgagaaaaggataaactggaagcattgtgggctgcagatagagctccttggaaagtgtgggaagaataatgagttttgatttgagcttttacaaagggaaaaaagtattcgtaacaggacatactggattcaagggttcttggctgtgtaagattctcgcaaatgcgggagcgattgtgaccggctattcgctcaatcctccgacagagccttcgttatttgaaattgccaatatcaagcaggatgttcattctgtgattggagacattcgggactataaagtattaaaggcagcttttgatgaggcacagcctgaaatcgtgctgcatttggcagcacagcctattgttcgtgacagctataaagatcctgcttatacatatgaaacgaacgtaatgggtacggtgaatattctggaatgtgttcgtactagtaattgcgtaaaatcttttttgaacgtaacaaccgataaagtttacctgaataaagaatgggcatggggctaccgtgaaaatgaggaattggacgggtatgacccgtattctaattccaaatcatgctcggagcttgtcacgcactcttataaaaatagctttttctccgataatcatgttgccatctccactgctcgtgcgggtaatgtgattggcggcggcgattttgctaatgaccgtattattccggactgcattcgtgctgcaatcaagcatgaagatattgtagtgcgaaatccgttctctactcgtccttatcagcatgtactggaaccgctgtatgcttatctcatgattgcggcgatgcagtatcagaatgtcaaatatgctggctattataatgttggtcctgatgatgttgactgcttccagacaggagccttggttgacctgttcgtgagcaagtggggcgatggcatgaagtggatcaatcactatgacggtggccctcatgaggccaatttcctgaagctcgattgttcaaagttgaagacaacctttggatggaaaccgcattggaatctcgacactgccattgagatggtagtggagtggagcaagtgctgggttgaaggtggagatatccgggcttgcatggataaagaaattaaagcttttttgtgttcagaaaaggtatgagtattactcaagcaattcattttttcaaggaagaaatgaatcatgaacagatattcccggaaaaaggattgggaacagaatgctttcagtttgcatctactttgatgccggttgtaaatgtggatctgttaattacaaatgagaagcatgaaatattgctttcttggagagatgacccacattgcggaacgggttggcatataccaggtggttgtattcgactgatggaaacaacagcggaccggttgcaaaaaacagcgttatctgagattggtgcaaaggtgcttgcggaatctgaaccaatcaaggtttatgaaatcttttcgaggaatcatcgtgaaggaatagaagatcaacgggaacgagctcattttattacgcttgtttataaatgcaaggtgcaaagggaatattctattcccgaggaaaaagcaattcaaggaaaagtgggttcattgcaatggtttgacgatttaccggataacttgttgcaatctcagaactgctatcgtaaagactggaatattataaaaaagaaacttttggaggactaaataatggctatttggaagaatgaggcagaagcccgcgagcagatcaaagcgatggtagcggaatactaccatgattttaaggaaaaaaagaccccgtatcaggagggggatagaatcacctatgcagcgcgtgtctttgacgaaaaggaaatgtgcgcactgactgacgcaacactggacttctggctgaccaccggccgctttgccgaccagtttgagaaagagtttgccaagtggattggcgtccgttttgcacatctggtcaacagtggctcttctgcaaacttgattgcctttatgacgctgacggctccggagctgggcgaccgccagattaagaaaggcgatgaaatcattacggttgcctgcggattccccacaacggtcacaccggctatccagtacggtgctgtgcctgtctttgtggatgtcactgtcccgcagtacaacattgacgtgaccaagctggaagctgcgctctccccgaaaacaaaggcagtcatgattgcccatacactgggcaacccgtttgacttgtccgcagtcaaggcgttctgcgatgcacataacctgtggctggtcgaggacaactgcgatgcgctgggcacccagtacaccattaacggggaaaccaagttcaccggcacatggggtgatatcggcacatccagcttctatccgccgcaccacatgacgatgggtgagggcggctgcgtctacaccaacaatccgcagctgaaccgcttgatcctgtcttaccgcgactggggccgcgactgcatctgcccctccggtcaggataacttctgcggccaccgctttgacggccagttcggtgagctgcccaagggctatgaccataagtatgtgtacagccacttcggttacaacctgaaagtgaccgatatgcaggcagcgattggctgcgagcagctgaaaaaattccccacgtttattgagcgccgccgccacaactgggaccgcctgcgcgccgcactggagccggtggccgataagctgattctgccggagcctgcagcaaacagccgcccgtcttggttcggattcctgatttccgtcaagccggaaagctgtctggaccgcaacgccgtgacccgctatgtggaaagccacaatgtgcagacccgtctgctgttcagcggcaacctgatcaagcacccctgctttgaccagatgcgcggcacggacgcataccgcgtggtgggtgagctgaccaatactgattttattatgaacaacacattctgggttggcgtttaccccggtatgaccgatgaaatgattgactatatggcaaaaacaattattgaggcagttaatcagtaagacggctgaggaggacgattaaatgaaacagcgtttggctgactatgtagcagattttctggcggcgcatggtgtaacagatgtgttctccgttgtgggcggcggagcaatgcacctgaatgatgcgctgggccataatccacggctgcacgttacctataatcaccatgagcaggcttgcgctattgcggcggaggcttatgcacgtctggaaaataaaatcgccgcagtatgcgtcacaaccggccccggcggtaccaatgcgctgacgggcgttctgggcggttggctggattctatcccgatgtttattgtttcggggcaggtccgctatgatactacggcgaggtatgccctgcagtacaccggtacgccgctgcgcgctatgggtgatcaggaatacgacatcaccaagtctgtgcagtatatgaccaaatttgccgccatgctggaaaatcctgcggatatccgctatctgctggaaaaggcgtggcatctggcaaccaccgggcgtcccggcccagtgtggctggatattccggtcaactatcagggcagttatattgaaacggatgatctgcgcggctatgacccggcagaagatgatgcacagctgcccccgccggtggatgatgcgatgattcagaccgttcttgaaaaaatcaagaatgccaaacggccggttttccatgcgggttacggaatccgcctgtccggcggctatgcggcgttccgtgcggtggctgaaaagctgaacattccgattgttacctactggaacgcagtggacctgattgaagatgacaacccgctgtattgcgggcgcgcgggcaacatgggcgaccggcccggcaactgggccatccagaatgcggacctgattcttgcggtgggcacccgtatctccatccgtcaggtgggctataactggaaaacttgggcccgcgccgcagaagttattatggtggacatcgatcaggcggagctgaaaaagcccaccctgcacgttgaaatgccggtttgggccgatgcaaaggactttttgacaaagctggacaaagcggccgttgcccccgtgaatgcgggcggcgagtggcttgcaacctgccagcgctggaaaaaagagtaccctgcggttctgccccgccagtgggaggaaaacggcgagacagccaatgtctatgcgtttgtccgatacctgagtagccgcctgccggaaaacagcctgacagcggtgtccaacggcgcttgctgtgtggtaggcaatcaggcgtatgtcatccagaaaggcagccgcatggccaataacagcgctgttgccagcatgggttacggcctgccggccgctatcggcacttgcatcggcggcggccgccggaccacgatctgtctggaaggcgatggttctattatgatgaacctgcaggaattacagaccgttctgacaaaccgccttccgattaagattttcctgatcaacaataacggctaccactccattcgcttgacgcagaacaacctcttcaaagagcactgcaaagttggtatcggcccagagagcggggacctgtctttcccggagtttgaaaagatcgccaaggcgttcggctacccgtattatagtgcgcacagcaacgccgagatgaagcaggttgtggatgaagtgcttgcactggacgggccggtgttctgcgagattttcaccgatacaaagcaggtttgggagccgaagagcagcaccaaacgcctgccggacggcacactggtcagccccccgctggaagatctggcaccgttcctgccgcgtgaggaattggcggcgcagatgtttatcccgatgatgccggaagagtgaggaaagctatgaaacgtgcaattataacaggtgcaactggtgcagtgggaacggccttaataaaggaattgatctcgcataatattgaagttctagtattttgtcgggaaggctcaaagcgaaatgttcaaatcccttcgcatgaacttgtcacaataaagtattgtgcgctgaatgaattagagacagtgcaaaatgatacagggaagaattatgatgtgttttatcattttgcatgggcgggaactactggagcagctagaaatgacatgtacctgcaaaaccaaaatgtccgctatgcgctggatgccgtggcagcggcaaaacggtttggttgccagctattcattggtgcaggaagtcaagctgaatatggtcgagttgaaggacttttaaggccggatacgcctacgttcccggagatgggttatggcattggaaagctgtgcgcaggccaaatgacacgcgagtatgcacatcaactggggatggaacatatctgggtgcggattttgagcgtatacggtcctaatgatggcacacagagcatggttatgtctaccattcttaaattgaaaaatggcgaagtgcccgaatttacaaagggagagcaactgtgggattatctatacagcggggatgcagcaaatgcgttccgccttcttggggaaaaaggatgtgatggtaaggtatatgttttaggtagcggaaaagctcgaccgcttgcagaatatataaaagatataaaaaattctgtaaacgcaaaagcggaaattgcgcttggtgcgattccatatgggaaaaaacaagttatgcacttgcaagcggacgtaacgcagcttaaacaagatacgggatgggaaaatataacatcctttagagagggcattagacgcatcattgaacaggagaattttttgtgaatgtattctatttttcgagcgatctattcgcaaatgtggcggcaacatcaatggtatcattgatggagaataataagtcgtgcgatttaattcatttttatttagtggacgatggaattaaaaatgaaacaaaaaaacagcttataacgttgatatcgagatatcatcgagaaattgattttatcccggcccctgatccgtgcgaaatatttcagtacccatttaaggacaaataccaaatgggacactcttatgtgagaatgtgcatcggtcaactgctcccacaatcagttgaccgtgtattgtgtttggatagtgatacacttgttcttgatgatttatcagaactgtggaatatggatatgggtgataatattctggcaggtgttgcagattgtatgaatctgaaagcttattctagccagtttggattatcaaacaatcaaatctattgcaatgcgggtgtttttcttgttgatttaaagaaatggagagcacagaaggtagaagatagaattaaaaatgttattcaaacaaaaaatggaaatgtatttttctttgagcagacattaatgaactactgctgccgaggaaagatagcaaaattacacccgagatataatacatatacgcttttttatgccttcgattatgagaatttgttgcgttggagaaacccgacatctttttacacataccaagaagttttggaggcaaaggaagagccggcaattattcactttacaaggaatttttatatgctaagtcgtccgtggatagagggctgtgatcatccgcttacaaataaatattgcgattacaagaaaaagacaccgtggccaatgctaggtagtgataataggtcgagaaaacagattgcacgatataaattatggcatcttattccgcaaaagttgctatgtgatatggcaaatattgtttacaacaacattagaccgcaattatggtggaaaaacgagtgactttcaacttatttgtgccttctgataagtgataactaaaacagttttacgttatacgataattttagtatataataaaagaatactgcaataaaatggagaaacataggtgaaagataaatatttattaacgatttccatcccgacctataacggtagtaaaacaatctcaaagatgctagatgtgttattgccgcaatgtgatgcacgagtccaagttctaatttctgataatgcatcaacagataacacaaaatcagttattgagagttatcgttccacatatccaatgattaaatatatccgtaatgatagaaatattggacctgattcaaatttccttcagtgcttagaactggcagaaggaaaatatacattacttttgtctgacgatgatattctaatggaaaataaactttcgcttatattgtcatttttgaacaataatgagagtatgtcgctggtttatttaaatgcaaaaggcttccatgaaacatacaaaaatgaactggaatgtgaattctattcgggagcaatatatgataattccatgttcgttactacagataaagtccaatttatgaattatgcagggcgaatgtggggattcctatcttgtttcatttgcctaactgatgcttttaggagcatcggtaattgcgatcagtttaaaaagacaaattggttgcaaagctatatacacatcctttgttctgactatggaaacagaaatctcggagtgattagtgttccatgtattggagcgggcatttatagcataatatccaacttcgattcgggaagggtggatggaatcacctacaaagaaatgttgaaatttgcggtgaaacacggatacagcaaaaaacagttagataaattattcgtttggagaatttgttttatctttaaaagaacaataataaaggaacgagctgcaggattacataaatcatcaataaaaaatgtgcttaaatgtacatggatgtatccgaaggtttgggtgcagttatatccttttttcttggttcccccttttgcatgtagaaaaatcgtgagtataaacaatagattgaagggctaccaacataaagcagaggttaaccgcaagggcgatgttataggataaaatttatgaatgaagtctagtacgctgtgaggaaatatgcaatcagtaataacgattttttttattgcattaatgatacttattagtgctatatctgaaaaaagttggtctaatccactaactatattttgcggcatgtggttcgcgatttgtttcttggcagagttgaaactttttggaatgtatgactattctgaaaatgtgttcttaattgtgctacttggaaacattggctttttttgcggatatatgcttgcaaaaaagacaaaagtaagttcgcggtatgaattttctgcaattggaatcagtaataaatatttataccagtataatactaaaattataatggcatttctctgggctgcgatagcgatttatttgctgatgtccatacaggttttggggttgcttcttgctggttttgatacggcaacaatccgggaatcctatagagaaaccggaacgactacagtaagtggaatggcgttaactgcaatttttggttcaacgctagtaaaacaattggaattgtatatagcccagccagtaatgagagcagcaataccaatatttgctattgaaatcacaggtaaaggtaagatgacgccgttagcaacgatggctttggctgttgcgggactttacactttttcaaaatttggcagatttgctttactgtatattattgcagatgttattctatgctattttattattggaaaaaatattgatcgtagaacaaagaaaaaaattaaaagagttgtcctattaggcatagtgggaatctgcctagttttggtttatttatctgtttataggtgggaaaacgaaactttttcatacgcacaatcgatttatggctatttttcaattccaatacctctacttgatttttggacaaagagaatagatgctgtaaacgcgtactcttttggcaattcatatgtattaggatttatgggctttgtaacgagagtccttaaacgtgtgggcatttctttgccagcgtatgcgacggcaactctttataattataatttagttgattcatttgtttatatattccctggacaaaaatataacgcctatgtaagtatgttttttgctttttatcttgactttagagaaattggagtctttgcaggaacgctgattttcggctatatagtagaaaaatcttataaaaaagcaaaaacaaagagagtggagtatttagctttttatttgttgttgattcaatgtattgtgaagtcatttgtgcgatgggaatttgtccttgaacaatattggctttctttccttatattaagactatggtttaaaaaagagagggtagatgaatctgatgtatgataaagctgtattaaaagcattagaaaacttaaatttggaaagaatttatcttacagaaagtagcgcatatcgaaatggacagagactagagagattcaaaaaggcgtttccaaagcatatattttcgtttgtattaaaatatcttagaaataaagaaatcaaaaagaaagttgatagtatctcaaactatataccccctgagaatgttaaatatgcagacccagcaccagaagggttgacgggtgttgcatatacatgtattacagacggctatgatgtacctaaaaatccgttgtatattgatccatgtttggattatattttatttacaaatagcagtacggatgatttggaaaaaacaaatatatggaagtcaagaatgatagataaagtcgctgtttcgcctcaaaacaatagtgcaaacagattttataaatttcatccattcgaattgttccacgaatataacttttctatatatattgatggcaatgtccaattgatatcagatacctcttcactatttgcagtggcaagaaattcgaagtcgggtattgcaatgcatagacatgctaccatgaactgtgcttataaaaatgctttgtggtgcgagtataatcatcgaggaaatatttctgccataaggaaacaaaccgaaaagtatcataaagaaggatttccagaggacttcggattattggaggcaacaatcatagttgtggatttacataatgaaaatgcaagaaaaatcatggatgaatggtggaaggaattttgtataacaggaggcggacgagatcaaatatctttaccttatgtattgtggaaaaatggatatagcatagatgatattggaaatctaggaaatgatgagtatcataatcctaaatttcgaattgttgcacataaaggcgatttgttttgaataaaaagttatggcggacattaacatcacataaaaataaaatgttgtgatagcgggttgtgtgattgtataatgagattggatataggtgaatgtcatgaagctgaatcggtatataaggcaaccttggttaattccaattgcccttcaaaataaagggctaggaattgttattccagattctgtttttttgagaagtgcatattatagttcttttggaaataaattgaatctaaaagagccaaagacctttaatgaaaaactacagtggttaaaactcaatgatagaaaaatgatttatactactatggtagataaatatgctgtcaaagagtatgtagcaaacataataggtgaaaaatacgttatacctacttttggagtttggaacaagtttgatgaaatagatttctctacattgccacgcacttttgtactaaaatgtacgcatgatagtgggggagtagtgatttgtaaagaccagtcgaattttgattttaaaaaagcacgcaagaaactaaccgaaaatttacataaggattactatttaaatggacgtgaatggccttatagaaatgtgaaacatagaataattgcagaacagtatattgacgataatcttcaggattataagatattttgctttaatgggaaaccacggatgacgcttgtttgcagcgatcgtttcacaaagaatggactaaaagaagatttctatgatgaaaattggaatcatttagaacttcaaagaccggctcatggcaacacagatcatgaaatcaagtgtccatgtcaatatgaattgatgaaagaattggcagccaagttggctgaaaatattccatttgtaagaattgatttttatgaacataagaatagagtatattttggcgaaatgacattctatccggcaagtggatttgaaggatttaatccatctgaatgggacgaaaaacttggagaatggataaaactacctaagtaagacatagaataatcagagatagtagaacagaaaaaacaatatttaactgaaggtaaactgattcaatattgtagcagattaagcgatcccgatcctagatgagattagataaaaatactagtttatgaaggatggtaatatgagagagaaacgattgctgtataatacggcatcatcattgttatatcagataatgacaataatatgcgggtttattttgccaaggctaatattaaatgcgttcggctcagaggttaatggcttagtaaactcaatatcgcaatttttggggataatctcttttctggaattgggagtgggcgccgttgtacagtccgcattgtataaaccactggcagaaaaacgaatcgaagatgtcagtaagataattgcatcagccaataagttctttactcgaattggacaaatattactgatttatgtaacgtttctggtcgtgtgttatcccttctttgcggggagacagttcggatttgtttatacagcaactttgattattgcgatatcgattagttcatttgctcagtatttccttggaatagtaaatagacttttgcttgtggcggatcagagagggtatattcaatatattgctcaaactgtagcggtaatttgcaataccgcggcatgcttcattttgatattgataggatgcaatattcaaattgtaaagctaacaacatcactaatatatttattacagcctttccttgttcatttgtatgtaaaaaggcactatattattgataaaaaaataagctatgcaaaagaacctattccgcagaaatggaatggcatagcgcagcatattgcggcggttgtcttagatggaacagatacgatagttttgacattgtttgcaagtctatctgacgtttcgatttattccgtctattttcttgttgttaagggcgttaaacaattatttatgtcaatgacgaatgggattacctcattgattggagaattgtgggcaaaacaagaactagatacattaaagactacattttcgtggactgaatgggttattcatacgggaactacttttgtatttggtgttacatcagtacttatagttccgtttgtgagagtgtacacgctaggcattgatgatgcaaattatattcaaccactatttgccgcgttgattgttgcagcgaatgctggacattgtctgcggcttccatataatattatgatattagcggcgggtcactataaacaaacgcagaataattacataattgcggctgctattaacgttgttgtgtcggttcttgctgtcaaggcgtgggggttgataggagttgctgtaggtacacttctcgctatgggatatcagacagtttggatggcatggtatgattcaaaaaatcttatccattggccgttttctagttttttgaagcagatggcggttgatattgttacagttgtactatgcgctattgcaagtcagagattctcgatgatgacggtaagctattttgggtgggtaatcaatgcaatcgaagtggccatcgtatggcttattataatgataactattaacctaatattttataaagataaggtaatgaaacttgttggtggcttgaaaaataaaatagtgcgatgattggaaaacaatttgaactctataaagtgtaaatattaaggtaaacaatgcaatctcagtaaatgtatcttcaagaaaatgtcagaaagctctcgctataaggatgacttgttcttgaatctgtgatatacttggacaaactggctcagagtttggggccatgggagaacgtggctctttttctatatatgagtgttcaataagccactgaatgaaaacaatagatgtaaatatttattgggagctaccgtgcataaaatagaccaatgtaattggctggtatttgcattattatgcttgacagaatggagaagaaaatggataatttagcnnnnnnnnnnnnnnnnnnnnnnnnnnnnnnnnnnnnnnnnnnnnnnnnnnnnnnnnnnnnnnnnnnnnnnnnnnnnnnnnnnnnnnnnnnnnnnnnnnnnaagcaagcaagcaagcaagcaagcaagcaagcaagcaagcaagcaagcaagcaagcaagtggatatttcacttttgagaataacggcaacaatagccgttgtttttttgcatactaataacacgctttcaaacaatagtgagcagttctttttgacaaaaaatcaaatagcgttttttacaacgaacaatcttttgatgaattgggctgttccagttttcctgatgattacaggtgcattacttcttgaccctaatcgacagattacatacggcgattgtattagaaaatatgtgaagagaattctactggcgttgtttgtatttggcatcccgttctcgatgttagagattctacttaatacaagatcaataacaattaaaagtgttttggaagcgactataaatgtgattaatggaaacagctggagtcatttgtggtatttgtatgcgttaataggattgtattttgttcttccaatgttaaaagcattcgtgaataattcggatgagaaaacacttctttatttaataagcatagtatttatcttcaacttcgttgtaaagtcggttgataaaattttaggagcaacaattgcttttgaaattcctattgctggatttgctgttttctatgtattagcgggaagatatattacgattataaaatcttggcttttagataaaaagcatttttgcattggtgtgattgtctttgcaattgttgttgttgcgattggaagtatatgctattatcccaaaagcaaggaattcctcggatataattctccaatgattgcagtgctttcgattgctgttttttgcctttttatgggtgttaaatcagataagatagattttatttggaagatagatagactgtgttttggcgtatatttgatacatccggtattcattaattttgtgtataaatttctgaaaatcacgccagtaacatttgacactttttatccggcaatgacattcgtgttctggattatttttgtgatagtctctttcgtaggagtttggattatgtaccaaatacccattcttaaaaaatatatcttataaggattgaatacaatatcacttatgaccaataggtcgaataatgtaatcttcaaaaaatatcagaaaaacttcactacagggctgacttgctctcggatctgtgatatactgagtttaacaacgccactatgggggccacgggaaatcgtggctctcagtctacctcatcttcttcttcatcgtccctaggcccgctccaacctatgtacacttctttggcgtcatcaagtccaaaccagtcgatacgttgtccacaactatcgcagaaaaactggtattcacggtcaataattcctttgcagcgaggacacggtgcgtatgcagtctcgtctttatagatgtgaaccttggtaacgcgcataggccagcggtaggtaggggatagaagcagttcaaggatgatggtggatagcttgaaatccggattccagttatcgtcgaaccaatcgtatttacttttcattttgattttacctccattgtgtgttgtgtgaatcatcgtgtgttgggataacacaatggtagggtaaaatctgacggctgtacatgagtacagcctacgctgctcgaaactttgcacacctcttcgtggtgggcagcaggcaacacatcagaatgtggctaagatgcagaggaaaaataatagggaaaaatcatgtgtgatatcaaaatgaagcctcaagctgaaaagaaatcacagtctaggctgatgcggccgttaattggaattattgtagttgctgtgcttgtcttgggtgttgccgcttttattgttcacctgtcttcacctcagataccatcgttaataacagcggatgggatgctgtcgtatattggctctggtatatcgtccgtggctacgattcttctagcagtgatagcttataaacaaacggaacgagcaaatcaaatggcagacaaattagcacagcaatctaatctgtttgcggagcaggcgaatgaactgtccaaacaagcaaataatgcagcaaaaaaggccaatgacttagcagaagaatcttataaggttgcacagaaatctaatgatcttgcagcacagtccaacgaggcagcaaagcaatcaaacaaattggcggaactatcgcttcaagcgacccaacaagcaaataaattaacgaaacaagcgaatgaaatgtctgagcgtgtattgaaacttgaagaagagcaatccaaagtggaaattaggccatttttccttgtgactgactgggaaggatgcaaaggtattccagcagaatttgaagataaacgccgaacgattgcctatcaggttggttcggataacgcggggagtcgagtggcattaatcttagaactgacaaacacaacacaatcgtatgaagtttttcgctatcatggcgcaatgagttcaagcggagaacggtggaggatatgtgtgagtaatcgtaatggcacgtctcttggcatcccggcagaagaaagtcgaagagtttgtttctatgcaggaagctctttcttttctggcatagagggtaaaacacttaattttgagtttattttagaaaatcgttttggtgaacgctataaggaatcttttgatgtggttgttattagattcgactgggatcgaaaggactgcaatattagcccacaaaagtatgaaatacaagcctttacgaaagactgtggacttgtaccgggttagtattgattgcgcaatttcagagtgctatactaaaaccacaatacagaatagaaaggttgatatcttatggccagaaccaaaggcagcaaaaagcgtcccaagaacaccacagactatgcattccagattgcagagaagcaagaatctattacttccatgactgctgaaatcacgtctattaccgccaatatcgacacactgaaagctgacctgaaagagaagaagactgctctcaagtcggcccagaaagaactgacgaagctggaatccaagaaagctactgccgatcagaaagccgccgaggcagcgaagaagaacgaagcggaaaatctcgtgaaaaagctgctggcaaagggtgtcagtgctgacgatattatcgagaagttaaagtaataagatgccgtgtggacaaactgaacttcagaagttcacacggcgttttttgaagatttctatatagtttataacgaaaataaaagaaacggagtgtgagaataatgaacttatcaaaaatacatcatattgcaatcattgtatctgactacgaggcagcaaaggatttctatgtgaacaagttgggattctctgttatccgagaaaattatcgcccggagcgtaaggactggaagctggatctgcgtgtcaatgaacacacggaactggagcttttcgcagaggaaaatccgccgaagcgtgtgaaccgcccggaagcctgtgggttgcgtcaccttgcattttgtgtagagagtgtggagcagacggtgaaagatctggcggaagttggcattgaatgtgagccgatccgtggggatgattataccggcaagaagatgactttcttccatgacccggatggattgccgctggaactgcatgagtaaatgaagaaaacaagaaagcccggcggtggccggaagaagttgaagccagagtacgatgccgggaaaaatctgaaagagcagatgggtgctgctgtggcgctttatgattctgagatatccttgcaggccatcggcgatgcgctgaacttaaaccctatcaaagtccggaagctcctcatcacagccggtgtgtatgaatcggaagtggcggagaaggtacaagatacatttgaggagtaccgagaaacacaagactacaaaacctccatactctcaaccgtaaaggcgcttaacctttccaaagcctcggttacctcctacctgccatataataaaggtgtgtacttcccaagtacagcagaaaaagagaagatcagtgtcggagcagagcggcagcggagatacagagctgtcaagcaactgcaaaaagaacgaacagaggagaacctctggaatgctgttgtggtatatgctagtgtgaagttctggacttattccggattgccttttacttacgaactgcataggggaagaaacggcacattcacaagagaaatatggatcgactgccgagaaactagtaaaagtctggcatggagttcggtactgcttgcttttgaaaaggtgaagggcgggaggataaaagtagagagacccaaggcactgggcgatatccggggagtgacatacatttatagtctgtttctgagatttggacttattgaggcggcgggaactgccaaggatcagagacccaagaaataaaaataccgcctgtggataatgaaccacagacggtaagaatcattacagcttattcaagaaatcttccaatacgccattccacttttcagggtattctcagggtattcatagaacattaggtgtccacccatgacgtaggtgttatagccgggtagttgtgtttctacgaaaggctttgcgatatcctgccagtgttctgcgatgaacatcaggctcggcattgtcgagccgacatcttttgccgtttccagatagttggatttcaatcccttacggtctgaaaaacttttctatgccctcaagcggttctggctgtatccgctgagtaacttccgcctgcacggctttgatggcggcccatgatttttcacgaatgccggaaagatgttcatttccagtcgaggtcataagctgcgcaacggtatcaatattgttcttatttagattgctcagaagctgggtgggtaagtttagaagtccgactggcgagtttgggaacaaaagctcaccggacatgattctgtacttgtactgattttcgctgagtcgctttgctattgctttttcatactcatctatgcagcatggattccttgtggttcgtagtttcctaagtgtaattgccagcccagttcttttaagactgaaagtacgattgaaagaacgattgatttcgttactgatttgcgtgagtgttttattgtttttgtagtaatcgattaagactttcgtaatcataacttttatggcaggagaaggtgtggaagactcagaagttgcaatcagagatattagatagtctgcatattcaacgtctgactttgtctggggcaggagaaaatcgtctttcgcaagtgtcgataaatctttgaagaaggactcaggatattttcggcctttggttttgggttttggttcctttttcttgcgcacctttggggtctttcccaaattttgtgtaaagtccagacagctataaaacaagagcaattttaatatgaggcggcagacggcgaaaccggctgtcgccttaacaacaacataacgccggcaagggggaatgtcaagggcggcgaagccgttcatatacccttgacattcctccgcagcaggtgttaatccggcatacgctcagcgaaatagatggacaactgcgcatggatgcggctccagtcctgccgccgacccgtccactttttcgtaatatccatcatcgccagatacagcattttcagcagactgtcgtccgtcgggaaaacgctcttggattttgtgaccttccgcagctgccggttaaagccttcgatcgtgttcgtggtatagatcagacggcggacttcctgaagatatttgaagtaggtgctgagattagcccagttttcccgccacgactttgagatcttgggatatttgttgtcccagttctgcgcgaaagtctccaaagcgtccagagcggcctgctcgtccactgctgcatacacggctttcagatcggacatgagagccttcaggtctttgtaagaaacgtatttgctggaattccgcagctggtgaatcatgcagttctgaatctccgtttccgggaacactgcacggatggctgtgtcgaagccagtcaaattgtctgtacatgcgatgaaaatatcctctacgccccgattcctcagaccattcagtacggtcgcccagaactttgcgctctcattctcgccgacccacatgcccagaacatctttgcggccgtccagattaaggccgatggcaatgtatactgctttctttacaatctgcccttcactacggacatggtagtggatcgcatccagaaaaactacggcatagatcgattccagaggccgctgctgccattctttcgccacaggcaggatcttatccgtgatccggcttaccgtagtgtcagacacagacagcccgtagatatcctgaatatgcgcctcaatgtcgccggtcgtcatgcctttcgcatacatggacaggatcttctcttcgatatcctgactgatgctggtctgattctttttcagaagctgcggttcaaactcaccttttcggtcacggggaacagaaacctcgacatcgccgaaacttgtccgcagatttttgctgctgtggccgttccggctgttgtccgtagctttgttcttgtagtcgtatttgctgtaaccaagatcctcatccagttcagcctccagaccattctccatgaattcggcaatggtttccttgaacaagtcctgaatgtcgtccatgctgtcgatattcgccatctgcagcaattcacggatctttgctctgcgggctttttcttccgggcttcgattctttcgggacat

SEQ ID NO: 834 - DNA, 16988 bp, unidentified
  source 1..16988: mol_type = unassigned DNA
tcagtttacctcctccagggctccggccggaatccggatcagaaaccgggtcccccggcccggctcggattccaccgaaatggttccgctgaatttttcctccacggtggcctttacgccgtaaagtcccactccgcggaagatgtttcctgttttataatcaaatttggtggagtagcccattttaaagatattgggcagatggcgggcggagatcccgggcccgtcgtcggaaacggaaaattcatactgcccgtcttttaaatgctccacgatctggatggtcccccgtctggctccggcttcaatggcttcgatggcgttgttgaccagatttttcaatacagccatcagctcatagtgctctctggtgatgaagttgtcagagcactggaaaaccagacggatatggacgggcctggtttcaaggatgtgataggtggtggcctccaggatctggagaaggtcctggaagctcatctgcttttcgtcgtactcctcggagatctcctgctcgatgccctggatgatgcggatatagtcttttttgatctcatggacgtcccgggcaatggacagggacatttttttcatgtcgtcgggcacgtccatggccgacagccgctcataaagccggtatgcattgctcatgacagattcgatctcttcggagtttttcttcataaaatagatctcgtttttcagccctgtggtcataagaaacagccgccggtaacggttttcatgctcctccttttttaacagggtccggtactggctctccgccgccaggaacagacaggcaagcagagtacgaaaagcggccaccaggatcagatatccggccatggaggaggaaagagtcccggaacggccgctttcaaagatacagacctccagcagattggacagcaggtcgcagatgaacaccgacgggaacagccgccggtaggagacagtgggcttgctggggacaaggacggaaaaaagcagtccatagcagagatagaaaatggagttggtggccagctgtcccgccgtttccggggaggaggagaggccgctggctgccagaaagaggcggaaaaggaataccaccgccgccgttgtcaccgtgatccggatcgtagagatgctttttccgatggtcataaggaggatcgggagaaggatcacggcaggggagatccggaagccggatacaaatacgttccagtaaagctgggatgccagggccacgatggtcccggtcagaagactgcgtttccattcattcatgcatttttcccccttgtttttctcatccttcaatgtcatgatacgttaagaaaagtcaaaagtcaatgaacccggcttaagaatcttttgcgggaactgggaaaaatgtacgaaaataaagccggaatctttatttttttgttgtaagaaacgatggattcgattataatggaagcataaaacgcaatcactatatcgtgtttaagaaagaggaggttattgggacatgaaaccatatcgtgaaatgtcaaaagaggagcttgcttccttaaaggagcagcttactgctgtttacaaagagtatcaggggaaaaatttaagccttaatatggcccgcggaaagccaagcccggaccagttagatctgtctcttccgatgctggatgttttaaacagcaagagcgatttcatgaccgctgacggcgatgtgagaaactacggtgttctgaccggtatccaggaagcaaaggaattaatgggcggaatgatggacgctcccgctgagaacgtgatcatgtacggaagcgccagccttactttaatgtacgataccgtatcccgttcctatacccacggcgtaatgggaaatacgccctggtgcaggctggacaaggtgaaattcctctgcccggttcccggctatgacagacactttgccattacccagttcttcggcatcgaaatgatcaatatcccgctccatgaggacggcccggatatggatctggtagagcagtatgtaaacaacgacgaggctgtaaagggaatctggtgcgtaccgctttactccaacccgtccggccagtgctactctgacgaggtcgttaaacgctttgcaaacttaaaaccggctgcaaaggatttccgtatttactgggataacgcttactgcgtacatcacctgtatccggatcatccgtgccacgttctggatatcctttccgagtgtgaaaaggctggaaacccggatatggtatataaattcggctccaccgcaaaggtcaccttcccgggcgccggaatttctgccatcgctacctccaaggctaacatcgaggatatcaagaagcagatgaataaccagctgatcagccacgataagatcaaccagctccgtcatgtacgtttcttcaagaacttagacggcatcaaggcccatatggcgaagcacgccgagctccttcgtcccagattcgaggctgtggacgagatcttaaacagagagctggcaggccttgagatcggtcagtggaccaagccccagggcggatacttcgtatcctttgatgctttagacggctgcgccaaggcgatcgttgcaaagtgtaaagaggcaggcgttgtgatgacaggcgcaggcgcgaccttcccgtatggtaaggatccccacgactccaacatccgtatcgctccgtccttcccgtccttagaggacttaaagttggctgcagagatcttctgtgtatgcgtgaagttagtgagcatcgacaaattactggaggcgtaagcgtcagcacgctggataaaattttatatttttcttctttttgggactgggccttagattttgggcccagtccctttactttttggccgggctataataaaatgagggaagatttttgaagacaagatccaagatatgggagaagaaaatgaaacatataaagaaagaatcggatggaacggccggaagccggaatcatgggaccgtccgggagggagcggcgtatctggtctttggagtccttacgaccctcattgactatgtgatctccaacggcctgttttatctggcccatatggacccggtgcctgcccagtccattgcctgggcggcggcagtgctctttgcctttgtgactaataagtggtgggtgtttggaagccataccctggagcccagggccgtatggggggaatttacctccttcgtcctgtgccggatcgccacctttttatttaatctggccgccattttcatcatggtggatatcctaaaaatggaatttttcatctgcaagctggccatttccgtggtggtggtggttttaaactacgtgctcagcaagctggtgatctttacccataaaaattaacggacagaaaaaggagtgcctggagtcatggaaccaaacagcagaaaaagatcgaccctgatccggccgggagacgggctggtcattgcattttttgttccggtggtcattatgatcatcatttttatccagagagggatcttcccctttggtgaggagagctttttacggacggacatgtaccatcagtatgcgccgttcttctcggaattccagcataagctgcggaccggaggcagtcttttgtacagctgggatgtggggatgggagtcaattttgcggccctttatgcctattacctggccagccccttaaactggctggtgatcctgtgccccaaggcgtatatcatcgagtttatgaccggcatgatcgttgtaaagatcggtctttcgggcctgagcttcgcctggtatctgagaaagcactgccatacagaaacggctgcggttggatatttcgggatcttttatgccctttccggctatatggctgcgtacagctggaatatcatgtggctggactgcatcatcctgttcccgctgatcgttcttggactggagcggctggtgaaggacgggaatggatttttttactgcatcacactggggctttccatcctttccaactattatatttccatcatgacctgcctgttcatggtgctgtattttattgcccttctgatcctggagaagccagggcccataaaaaaatacgtgatggcctgcgtccggttcgggctcttttccctgatcgccggagggctggcggcccttgtgcttctgccggaggtggccgttttaaagagcacggcttcgggaaatatgaattttccaaagacccttacgtcctatttcccgatctttgacatgctggcccgtcacatcggcaatgtggagacggagacgggactggaccactggcccaatatttactgcggcgtggcggtatttttatttttcctgctgtacctggcgtgcaaaaagatctccgcaaaggaaaaaagtgtttactgcggcctgctgctgatcttttttgccagcttctccgtgaacgccctgaattttatctggcacgggctccactatcccaacagcctgccctgccgccagtcgtttatctatattttcctcatgctgtttgtctgcttccgggcgttccagtatttgcgggatattcccaggcgccatgttgccgcggcgttctggggaagcgtctgctttgtgatcctggcggagaagctggtggagcaggagcatttccactttgctgtatattacgtggccatcctcttcctggcggcctatacgggactcatatatttatataagaagagaagaagagagctggcggcgtttctggctctggccctggtggctgtggaggcggccgtcaataccacagtcaccagcgtcaccaccaccagccgggaggcttacaccagggataataaagaggtgcaggctctgatggagaagctggagccggcggaggacttttaccgggtggagaaaaaaacgagaaagacaaaaaatgacggagcatggatgaattttccgtctgtatccctgttttcctccactgcaaacgcagatctgacgaagtttttcaagcgcatgggctgcgaggcctccaccaatgcgtacagcatcactgggagcacccccctggtggacagcctgctgtcggtccgctatgccctgtattcggaatatattccaaatacggatctggtcaattacatccaggagagcggagggacctacctgtatgagaatctgtataccctgcctctgggctttgtccttccttacgatctggcggacaactggcagtatcagatggagaacccggcggaggtgcagaatgatctgtgcctgcttttgggaaccgacgatgtcctggtgccggtggagacagaggtttccggatccgggtgtaccttcaccgctgatatggccggggaatattatgtatatatccagaataaaaaggtaaagaatgtcaaggcatccctgccatcgggagaaaagaatttcagcaatgtggaccggggatacctgttggaaatgggaaatctttctgaggggagtcggatcaccctgacgccgggagagtccggggagacccttacggcagccgtttaccgtttctctcccagggccatgatccaggtttatgaccgcctgtcccagtcgccgctccacctggatgactggagggacacgaagcttacaggaacggtaactgctgcggaatccggtactttgttcctttccatcccctatgatgagggctggaccatcaccatcgacggccagccggcggagggggaaaagatcctggaggcattcctgtctgttccggtggaagcggggacccacgagatctccttaacctacatgcccggaggacttattccaggagtggtcatttccggggcctccgcggcggtactggtccttttatggatcgtaaaacgccgccgtccaagccgggccggggtataactgccccgccgtccggatgccggtccatcgaaaaaaaccgccgcataccagatacgcggcggtttttttcagtattaatatcaatatggaaaggggaaggaaggcccctgaatcccgtatttaatcgttgggctcacagttttcccaaagctcgttcagttccatggtcatattgatccctccttagaatcaagacattcattcctgggaagcggtggatccgaagccgcgttcctgttgtttttctcatgggcatactataacactcccggctttcgttgtaaaatgtttaattttttgatataatgttaataactattaacattttgggcagggggaggctgtatatgacattcctggagatcgaagcattcttaaagataacagaaacgggcagcttttctgccgccgccgaggccctttacgtgacccagccggctctggggcgcaggatccgcgccatggaggaggagctgggatatcctctttttgtccgtgggaagggcctcagaaaggtggagctgacccgccagggccatgccttcatcgggatcgcccaccggtggcaggccctgtggaacgagacccgggaggcggcgcttttagcgccgtccagaaacttttatgtggccagcgtggggagcctgctggcgttcatgcttcccaccgtgttccgcacctttatgaaggagaatccggaatgcagcctccacgtatcgacccttcactccagcgaggcttattcctatgtgggcaaccggtccgtggacatagcctttatcacagatcccatttattcttcttcagtcggaacccatatcctttttaaggagaagctctgcctggtggcgggaaaggagctgaacctgccggagcatgtgaggatccgggagctggatccgcagctggagatccgcaccatgtgggaccggaattttgaagcctggcacagctatttttttggagataaagccattcccaggatgtatctggacgagatgggatttcttcagtactttacccagagcggggataactgggcgtttcttcccatctccatcgccagaacggtcttaagggatgcgccggtgtccatccataccctggatgtggagcctccaagccggaccctttattacctggaccggctggatgaccgctcaccgtaccaggagcaccttttaaggctctgcagacagaagctgtcccaggaagaggggatccgggtggaggaggaataaaaaagaaagacggagcagaaaaaaatggccgccctggaagctggaacagctcccggaacggccattgaaattttatgaggttcaggatggatgcagcgtttctggtccttaccgtttattgctgcgtctccagatgtgcattttttccgcctcggcaatgagctcgtcgcggaactggggatgggcgatggagatgatggcttcagccctctgccaggtggacaggccctttaagttcaccatgccgtactccgttaccaggtgatgggtattggcacgggtgtctgtaacgatggagcccggatttaaggtgggaaggatccgggattttaactggccgtcctttgtcttaaaggtggaggagcagcagatgaagctctttccgcccttggaaaggtatgcgcccagaacgaaatccagctgtccgccggcgccgctgatgtgcttgatccctgcggattcggcatttacctgtccgaacagatccaggtccacggcgttgttgatggacatgaagttatccagggcagagatggtgcggatgtcgttggtgtagcttacgggagcagacatacattccggattccggttcagatagtcgtacagcttttttgtacctgcgccgaagccgtagacctggcggcctttatcgatatttttctttgcgccggtgatctttccggccatggcgatatcgacgaaggcatccacatacatttctgtatggacgcccagatcctttaagtcagattttgcgatcagggagccgacggcgttgggcattccgccgatgcctaactgtaagcaggcgccgtcggggatctcgtttacgatcagctttgccacggcctcgtccacctctgtggcgggggctccggccatttccgggatagaaggattatcgccctctacaatcatatctactttggagatgtggatgccttcttcagttccgccgtagcagaccggcatattttcattgacctccacgatcacggtcctggaagtctcgcagacagcagccaggtgggatgcgttggggccgaagttaaagaagccgtgctcgtccatgggggctgcctggaagatggccacatccggacggttttcttcggacatatcccggtagaagcggggcagctccgaatagcgcatggggccatagaaggcaaagccctgggcaatggcctttctctcgatgccgctcatatgccaggagttccaggtgaagtggtcagccgggttttcgatcttgaagatctcggggacccacatgaggatgccgccgcggaagttgacgttataaagctccggaagcctcttggcgatctccgcgtctactgccacaggggtgctggtagtccaggcgtaatcgacccagtcgccggattttacggtttttgccgcttcgctggcggacacaagcttgtcctgatacatttttctgatatccatggtttaggacctcatttcttttatgatattctttcgctgtccggagccagaaacccgggcagaatttttattcatttttcattttagcattttctaaatggacggtcaataatttcacgaaattataaaaaaagaaggctgaatgtttataaaaaatacatgaaaaaccatgcttgttatttgacaggccaattatttggtgatatgattatgatacatcatattgtcgggggatacgggctttttccggcctccggcgatggtataatgaggaggaaaatcatatggcaaagaaaatcgtactggcaggtgcatgccgtacagccatcggcacaatgggaggcgctttaagcactgtaccggcggctgatctgggcgcggttgtgatcagggaggccttaaagagagccggtgtggctcccgaccaggtggaccaggtctacatgggctgtgtgatccaggccggacagggacagaacgtggcccgtcaggcttccatcaatgcaggacttcccatcgaggttccggcagttaccattaacgtggtatgcggctctggcttacagagcgtcaacatggcagcccagatgatcgaggcaggcgatgcagatatcgtcgttgccggcggctgcgagaacatgtccctggctccctatgcgatgatgaagggccgctacggctaccgcatgggcaatgccgagctggtggatacgatggtaaacgacgcgttatgggatgcgttcaaccactaccacatgggaatcactgccgaaaatatctgcgaccagtggggactcacaagagaagagctggacaagttcgccatggtgagccagaacaagtgcgaggctgcccagaaggcaggcgcatttaaggatgagatcgttccggtggaggtaaaaacaaagaaagccaccatccttgtagatacggacgagggtcccagagcaggctccaatatggaggctcttggaaagctgcgtccggcgtttaagaaagacggtatggtgaccgcaggcaacgcctccggcatcaacgacggtgcagcagccgttgtggtgatgagcgaggagaaggcgaaggagctgggcgttactcccatggccacatgggtagccggagctcttgcaggcgttgagccccgtatcatgggcatcggtcccgtggcagccacgaagaaggtaatggcaaaggctggaatggagatcggcgattttgacgtgatcgaggccaacgaggcatttgccgcccagtctgtggcagtaggaaaagagcttggttttgatctggaaaaattaaatcccaacggcggagccattgccctgggccatccagtcggtgcatccggctgccgtatcctggtgaccctgctccacgaaatgcagaagatggatgcaaagacaggtcttgcaacgctctgcatcggcggcggcatgggctgcgccaccatcgtaaagagggattgatcttaaactgagcaggaggcgaccggaatgagctttgttacatacgagcaggacggctatgttggcgtgatcaccatcaaccgcccggaagctttgaatgcgttaaatgtccaggtattaaaggacctggatgctgtgatcgacaatatcaatctggatgagacaagggccgtcatcgtgaccggagccggggagaaggcctttgtggccggagccgacattgcggccatgagcactatgaccgtaaaggaaggccgtgaattcggaaaattcggaaacgatatcttcaggaagctggaaacgcttccgatccccaccattgcggctgtcaatggatttgcccttggcggcggcaacgagctggccatgagctgtgacatccgctactgctccgacaatgcagtgttcgggcagccggaggtgggcctggggatcaccccgggctttggagggacccagcgccttgtgagagtcgttgggaccggaaaggcaaaagaaatggtattcaccggccagaacatcaaagccgatgaagcatacaggatcggcctggtaaacggcgtataccccagagaggagctgatgccggcagtcatgaagctggcacagaagatcgcgtccaacgcgcccattgccgtgagaaacagcaagcgtgcggtgacggacgggttcctctcggatctggaccatgccatcgccatagaggagcagtatttctccgagtgcttcgagacagaggaccagagagagggaatgaaggcttttcttgaaaaacggaaggttgaaaaattcaacaaccggtaatggtgggggagctcccccataaacgtaaggaggcagaatcatgaaggttggtgtgattggagccggaaccatgggttccgggatcgcacaggcatttgcccagacagagggctatgaagtaatgctctgcgatatcaatgagacgtttgctgcaaatggtaaaaataaaatcgcaaaagggtttgaaaaaaggatcgccaaggggaagatgacccaggaggacgcagataagatccttgcaaagatcaccacaggtgtaaaggatatctgcggagactgtgatctgatcgtggaggctgccattgaaaatatggagatcaagaagcagaccttcagagagctggacgcgatctgcaagccggagtgtatcttcgctaccaatacctcttccctgtccatcacagagatcggagcaggcattaaccgccatgtggtgggaatgcatttctttaacccggctccggtgatgaagctggtggaggtcattgcgggactgaatacggctcccgaagcggttgaggcggtaaagaagatctctgaggagatcggaaaaacgccggtacaggtggaggaggccgccggtttcgtcgtaaaccggatcctgatcccaatgatcaatgaggccatcggcatttacgccgaaggcgttgcgtctgtggaaggcatcgatacagccatgaagctgggcgcaaaccatcccatgggccccctggccctgggcgacctgatcggcctggacgtggtcctggctatcatgaacgttctggaaacagaaacaggagatcccaaataccgtccccatccgcttcttaagaagatggtgcgcggaggccttctgggacagaagaccggcaagggattttatgactattcccgctaggaattaccgggaaggaaaacgggtccagcccgcggggattcccacgggccggactgtatgtctgggaacatagagaggatgccgcatccacattctcttatgttatatatgatacaattcacaaggaggaactaaaaacatggattttacattaagtaaagagcatgagatggcgagaacattattccatgatttcgctgaaaaagaagttaagcctctcgctcaggaagttgacgagacagagcatttcccgagagagaccgttgaaaaaatggctaagaacggtttcctgggaattccggttccgaaggaatacggcggacagggctgcgacccgctctgctatgcaatgtgcgtagaggagctgtccaaggtatgcggtaccacaggcgttatcgtttccgcacatacctctctttgctgtgatccgatccagacctacggtacagaagagcagaagcagaaatatctggttccgctggcaaagggcgagaagttaggcgcattcggcttaactgagccgggcgctggtacagacgcccagggtcagcagacaaaggctgttctggacggcgacgagtgggtattaaacggctccaagatctttatcacaaacggtaaagaggctgacgtttatgtgatcatcgccgttacaggcatggttgagaagagaggcagaatgcagaaggagatctccgcattcctggtggaaaaaggaactccgggcttcagcttcggtacaaaagagaagaagatgggtatcagaggatccgctacatacgagctgatctttacagactgccgcattccgaaggaaaacatgttaggaaagcagggcgagggcttcaagatcgccatgcatactcttgacggcggacgtatcggtatcgctgcccaggctcttggccttgcagagggcgctctggagagaaccatcgagtatgtaaaggaaagaaagcagttcggccgcgcaatcggtcagttccagaatacacagttccagcttgctgatatggcgacaaaggtacaggccgcacagtacatggtataccgcgcagccgttgcaaaggcaacacagaagacatattctgttgaagcagctatggcaaaactgtatgcagcagaggttgctatggaagtaacaaccaaggctgtccagctccacggtggttatggctacatcagagagtacgacgtagagcgcatgatgcgcgatgcgaagatcacagagatctatgagggtaccagcgaagttcagagaatggtaatctccagcgctctgttaaaataagatctgacagcacgaaaaaaaccggaaaataaacgaataattaaggagtgaaatacagtgaaagtagttgtttgtattaaacaggtgccggatactaagggcggcgtaaagtttaaaccagatggaactcttgacagagcagcaatgctcacaatcatgaacccggatgataaggcaggtctggaggcagctctccgcttaaaggaccagtatggtgcagaggttacagttgttaccatgggtcttccgaaggctgaggaggttcttcgtgaggctatggctatgggcgctgataacggtatcctcgttacagaccgtgtgctcggcggtgcagacacatgggccacatcccagactctggcaggcgctttaagaaacctggattacgatctgatcatcacgggccgtcaggcgatcgatggagataccgcacaggttggaccgcagatctccgagcatcttgggatcccggtaatcagctatgcacaggagatccagatcgacggcgattctgtgatcgtaaaacgtcagtatgatgacagatatcatatgttaaaagcaaagatgccgtgtctgatcacagcactttctgaattaaatgagccgcgttacatgactccgggcggaatctttgacgcatataagaaggacatcactgtatggggcagaaacgacttaaaggacgttctggactccaacctgggtctgaagggatccccgactcagatcgcaaaggcatctgacaaggtaagaaagggcgccggtgaaaaggtcgttctggatccgacagcttctgtaaattatattgtggacaaacttacagagaagcacgtgctgtaagatacagctacgtcaaaaagcgaattcatagaataaagaaagtggtgaacagtaatgaacttggaagaatataagggtgtatatgtctttgcgcagcaggttgataacgaagtgagcagcatcgctttggagctgatcggcaaaggtaaagacttagcaaaagatttaaatactactgtaacagcagttttagtaggttccaacgtaatgggactgactgagatccttggcgagtacggcgctgacagagtcatcgttgtagatgatccggaattaaaagagtacagaactgagccctatacccatgctctgtcctctgtgatcgagaagtacaaaccggacgtattcctgatcggtgcaacagccatcggccgtgaccttggtccccgtgtctgcgcacgcatccatacaggtctgaccgctgactgtacacagctggatatcggcgatttcccgctggttcccacaccgggcaaggagcagaagcacaaccagcttcttatgacccgtccggcattcggcggaaacaccatcgcaaccatcgcctgcccggaattccgtccgcagatggcaaccgttcgtcccggtgttatgcagaagcttccgcgtgaggctggaagaaaggccgagatcgaagagttcaatcccggatttgttcccaacgagaaatacgttgagatcatggaagtcgttaaggctgtttccaacgttgccgatatcatggatgcaaagatccttgtttccggcggccgcggcgtaggaagcccggagaacttcaagatcctcgacgagctggctgaggccatcggcggcaccgtaagctgctcccgtgcagttgtagacgctggctggaagccgaaggatcttcaggttggacagactggtaagactgttcgtccccatgtttactttgccatcggtatctccggagccatccagcacgtggctggtatggaagagtccgacatcatcattgccatcaacaaagatgagtctgctccgatcttcgacgttgccgattacggcgtagtaggcgacctgaacaagatcgttccggttcttacccagaagatcaaagaagcaaaagcagcagctggcaaataagagcgaagctgaaacataaaatctgatcagaataaacaaccacatgtggaacggaagtacaatcattagaacgggaatacataaaagaggacggaaagacacttagcagaacggaaaaacacagaaaagaacggaagaacaacctttagaacggtatgaccataagaagcctgaccgtgtccagtgaactggccgggagggcttcttttttgtgcagattttttaggaattgagctttcagataaagtggatggatctccatataccgggcaggtgagggatatcccaaaggattgtttgtaaaaaactggggttctggcgggcatgaagaaggcgaggagacggggaaaagaaagggggaaaataattgaaactatttttcagatggaatatactataatatagataacgagcagcggatctcaatatatagaacctcatttgcagcggccagatactaaaaatggggaagtttacaaaggtgaatttcaatcttgtgtatagaggggtaaaagccagaggtggagttgatggggtattgactgttttcgacagttgatgcacaaaagataagaaaggcaggagaaaatgggcattcatgtagcaccgccaattatcaagaacataaaagacagccgggatgctttggatttctttgaaatggtgtccttgcctgccgaagatgagagaacgcaggaaatcatcaggagctttccaacggtgtatattcataactgggaagaagatggcgaatatgaagtttatgtcggtgaatcaaatgatatttttaaaagaacgcgccaacactatgacctgtcatttgacagatcaagatggcagagcaggctggcggaaaaaaacgccagtttgtttatcattggacacgaacattttaataaatcattaacgcttgatatagaaaaccgtttaatgcattatatgatgagcgttgaatgtgtaaaacatttacataatctgcgtgataatccacaggcaagctattatccaatggaagaactggatgaaatctttggtaagatatggaaagggctgcgcaaggaaaacggaatcctgtttccagcagaaagtgcaataaaagattccgcaatatataaggcttcgccgctccataagcttacaaaagaccaggaaagagcgaaagacctgattatcgagaaggttgcaaaagcacgaaagagtggagaagcaaagcagcttatttttattgacggagaggctggtactggaaagacggttctcaacagcagtaccttttatgaattgtattgtatggcagaagaaaataataaggatctgaactgccagcttctggttaaccacgatgagcagattacggtgtacgagcagatagcagaaaaattgggtttgactggaaagtatggaaaggtcgtgagtaaacctactgcatttattaacagccattctgaggacgagcctgtggatgtagcatttgtagatgaagcgcatttgctgcttacacaaggaaagcaatcatatagaggtaaaaatcagctaaaagatattatcgacagagcacgggtgacgatcgtaatgtttgatgaaaaccaaatccttacagcagagcagttttgggaagcgcagatccttgaagggtttcgaaatcaggcaaaacgatcgggcaatcacatcgtgctggataagcagcttcgtatgcaggtcgatgaagaaaccatggactggatcgatgcttttacaaagagaagagaattgaagaagatcccaaggataataggcggatatagcatcaaaatttttgatgaaccagaattgctcgatctggagatccagaaaagggctaaagagagtgattctatgctgtcaaggatcatagcaacgtatgattgggaatatagttccggccgtaagccagaagaccggctaatgaaatattgggaggtgttcataggaaactggcataaaccatggaacagggaattagaggcggatctttcgagacaggaaaaagaagattaa

SEQ ID NO: 835 - DNA, 35130 bp, unidentified
  source 1..35130: mol_type = unassigned DNA
tgcgtcccgtggtgaagacctcgtggccgaagaacacagggtattcgagagaatccagcatttcgatctcgccgtgctttaactgcgagacacgcatgcgcaccgcactggagccgatctcgatgaccgcagccggcccgcccggaagttttttattcaatatgagcaccgcctttcaatgtagagcaactaaatcggagcgccgccgaaagcgggcccgcaagaattcttgagatatttactttattatagcaaacccgagaggaaaaagcaccctgttttcgccgaattttacataaaatatacgtgagccatacaattgaatgaaaaagatacaacctgctatatagttttaatatataaatgtgcaaatatttcgcacaatattgcctaaaagaaaattaaatgaaattttttgaaaaaaacacttgcatttttgaaagacatgcgctataataatacccgtcgcttggagaggtattctaatggtaaggagccacattggaaatgtggtgtgccgcaaggcattgtgcgttcgagtcgcatcctctccgccagtacccggataacggaagttatccgggtttttcttttatccgcattgctttttgataatgcagactatatactattatatagtgaaaaagaagcaagagcaatatgcccaaacgtttaaatttggaggcgtacacatgacatacgaaaatccaatcctgccgggtttttacccggacccgagcatttgccgcgtaggtgaagactattatcttgtcaacagctcgtttgagttttttccgggcgtgccgctttggcatagccgtgacctgctgcattgggagcagcttggctatgttttgacgcgcgaaagccagttgccgctggtggactgccgcacctccggcggtatttttgcgccgacgatccgctaccacgacggccgattctatatgatcacgacgaatgtgacaggcggcggcaatttttttgtgtggacagatgacatccgcggcgagtggtccgacccgatctggatcgaccatcagggcattgacccgtctttgttctgggatgcggacggcaaggtgtattacaccggtacacatacggacgaaaacggcaacaactgcatcggacagtttgagattgatcttgagaccggtgcaaagctgagcgagacaaagtgcatttggtacggtaccggcggcaaatgcccggagggaccgcacatgtaccgcatcggcaattggtattacttgatgattgccgagggcggtacggagtacggccacatggagaccattgcgcgcagtagaagcgtgtggggcccgttcgaatcttgtccgcacaacccaatcctcacgcaccgtaatgcacaccgcgtggagtttcaggcgctcggacatgccgaccttgtagagacgccggagggtaagtggtggatggtatttcacggcattcgcccgtctgttttcatgctgcatcacaccggccgcgagacgatgattgcgccggttacatgggaggagaacggctggccggtcgtatacggtggcaaggagattcagcccatcatgacgacagagggcgaaggagacgtgcgtgttgcgcgcagttggcacgatgatttcaacacagctgcacctgcaccgcgctggagctatctgcgcacacccgaccgcatgaagtatacatttgataagagcggcgttacactgcgcggcagtgaggcgacgcttgacgagttgaagatggtcacattcttcggtgtgcgccaacagcagtttgatttgaactatacgaccgaaatgacgctttccggcgacggcaaagcgggcatgacggttttccacacgaacgagcaccactatgagctgtttgccgagcgtaaaaacggcggtatggaggtcacgctgcgccgccgcgtggttgatatgctgatcgagagcgagccggtgttcttcccggaaacggacacgctgacgctgtgcatccaggccaaccgcctgcgctatacgttccttgcgggtaaagccggggaagagatgaaggaaatcggcaccggcagcacgcagctgctttccacagagtgcatgaactgcacgtttacgggctgctttgtgggccttacggcgcagggggactgcgaagcaaagtaccgttattttgacgtttctgtgcccgcaaacgaataaaattcgaaataattaaaaaaacacttgctttttccaccggtttaacgtataataaattttgttaagccggtgtgttggaattggcagacgagacggactcaaaatccgttgatggcaacatcgtgcgggttcgacccccgccaccggcaccacactgagatcccaaacttcttggaaatgagaggtttgggattttttattttatccgtcagtataaataaaagcggcgccgagaaattttttgaaaacaaaatacacgaatgtgaaaaaagcgcagttggtatgatatgcccccaaataccggacacccggtatcggggggcatatccgtatgaaaaaccgaactgcgcgtttttctggttttaggggggtgaattttttttgatgaatttaaagcggagcatagaaatttagctttatctcatagcattgaaactttataaaaaatacatataaaagcaaagcttagatgcgcctgtgaattcaaagagcaatattaggtgaatgataatcacgcatgatttaaatgaaattcaaatatttggcaaatagaagtgatttttgtttcaacgaggctggatagtattttaaaaaatacatcaaataaattacacacattaaggcagtaatctgaaaatgcagcgcgcagcaggaaacacatggtttaatggcaaaaaatataggattaaaatttcaataaagcaaataggtgaatttgagtaatggaacaaaatataggggattaatgccgaaaaacgcaaaataattacacaaatttgagtcaagttccgtcgaattagtcaaatccactaaaaatatcgggggggggtcacatgtttgcacataaatggcaatgcgtgtagcagaaatacacttgattttctcgtcgaaatatagtagaataaagataaatttgtgcaactgattttcttcccttcgttgatgggaaaacggatgtattccttttatatatggggtgttcgcagatgtgcagaaaaagaaaatttggaatggggaaaacaagtgggtaataacagagaaaacgaaacagagattgatctgctgcagcttgcaaaagccctgtggcacaaagcatgggccattgtgcttgtgacgcttatcacggccgctatggcatttgcgggcacaaagctcttcatcacaccgctttatacggcgagcgccatgatgtatgtgaacaacagttccatttccgtcggaagcacgcaggtgaacctgagtgacttaaccgcagcgcagagccttgttgagacctatatggttattttgaagacccgcggcacactggaggaggtcattaaggaagcaaatctgccgtatgattacgagcagctttccggtatgatcgaagccggcgctgtgaactccacggaggtcttttccatctctgtgacgagcgcgagtccggaagaagctgagaagattgcgaacacgattgcagagctgctgccgaaccgcattgcggacatcgtagagggtagttccgtgcgcattgttgattacgctgtggtgccgtccaagaaaacttcgccgagtctttctaaaaacacgatgctcggtgcaatgcttggctttgtgttgagctgtggcgtgtttacggttctgtatcttctggacgatgttgtgcataacgaagattacgtacgcgtgacgtttgccctgccgctgctggctgtggtgccggatctgacggagaagaattcgaaaagcaactattactattatagagatgacagcaaaggtgggaaggaggaaaccgcatgagaaaatataggaatgcagcctccgactacgagtacggcgcaatgctcggtgaaaacctaagctttgcagcttccgaagcatacaagcttctgcgtacgaaccttgactttgcgctttccgatgagcagaaatgccgaattatcggaatgacgagttctgtgcgcggcgagggcaaaagcaccaccacactgaaccttgcgtattccattgcggaagccggcaagcttgtgcttgtcattgaggcggatatgcgtatgcctacgtacacaaagcgtctgcatattcagacaaagaagggtatttccaacctgcttgcaggccagtgtacgggcgcggatgtgctcagccgctgcgaactgcacaagaacatgtgggtaattcccgcaggcgatattccgccgaacccgtctgagctgctcggctccgagcagatgcgcattacactggatgttctgagtcgtgatttcgattatatcctgttggatcttccgcctgtaacggctgtttccgatccgctcgttgtatcgaagctcgtgaacggcatgctgcttgttgtgcgccagaattacgctacacgccgttcagtcgcagaaaccgtgcgccagctgcactttgcggaagcgaagatcttgggcttcgtgatgacgaacgcagcgttggagggaaagaaaaaatactataaaaattacaactatggctacgactatggctacggctacggtgagaaaaataagaccggaaacggaaaagagaaataacgcatgctcgatattcattcccatattctgccgaagatggatgacggcagcagcagtgtggaggagagtctgaagcttttgcggacctccgcagagcagggcatcaccgaaatcgctgcaacgccgcatttttacgcttcgcagtacagcccgcagaaatttttggagcggcgggctgcctgtgccgcgcgcctgcaggaagctttaacgccggatctgccgcgtgtttatcttggcgcagaggtttgttactttgacggcgtcagccgtattgatgaactggaagcgttatggatacaaaacacgaacatactgctgcttgaaatgccttttgcaaagtggagccgccgcatggtcaatgaagtggccgagattcaaaaccgacgggacacacaggtgttattggcacacattgagcgctacctgccgtttcacaacagtgacgcattgcaggcgttacgggcgcagggcgtaaaaatgcaatgcaacgctttgttctttttaagctggaggacaaagcgaaaagcagtgaagatgctgcagcgcggcgagattgatgtgctgggctccgactgccacaacatgactacaagacctccgagactcggagaagcaatacaagtgattcaaaagtccgttgagcgcgatgtgtggcgcgaatttcaacgaaacctgccggatctttcaggaaagggggaacgcctatgaaacagcgcgcactgatcattttggtcgcgatactgggcgctacctgcattgtgctcggtatttttctgcttcgcggcggaaaacagccggaaacggcagaccccacaccagaagccacggctacaccgacagcaacgccggaagcggtatcttccgcatccgaagattccgcagtgccgtatgtgagtccgattgactttgcgtcacttcaggaagaaaacccggatatttacgcttggctgcgcattccgggtacagagtttgattttccgatcttgcagcgcgcgggggacgatgattactacctgacgcacgacagcgacggaaacgataactccatgggtgcaatcttttccgaaagctcttataacgacggaaaaatggacgaccccgctacggtgctttacggacaccagatgcttgccggcacgatgttcggcaagctgcagcaggtctattccgaatcgaatgcgctgacggagcacggcgatatcaccgtgtatctgccggaaaaggaaatgcactacaaggtgtttgcagctgtgccatatgataaccgccacattttgtacacgtatgatttcacgagcaagcgccgatacaatgcgtttttgaacagcattttcgatgtgcgtgagatcggtgcgcaacacagtacagatgtgcccgttaccccagaggataaactgcttatcctgtccacctgcctccagggcaattcacacagacgatttctcgtcgttgcaaaatgcgtcgatgaggtcgaataataaatggtgtctaatcacccgtttaggaaaggaagttttaacatgaagaaaatcgtagtaatcttatcggcaatcctgctggtagttgctcttgctgtgccgtcttttgctgccagctttacccctagcgttgagcagaagggtgcaccgacagttgtttccgcaacggatgccgacggtaacgcgtttgcagacggcgaagttattgtaactccggtttccgctgcagacagcgctgatgcggctattgcagacggcttgaaggctgcttacgagcagattaaggctgctgcaacgctcaccgacatcgcaccgtccatcggcgattacctgaaggagatcgacagcgaggcttctgttgaagatcttgttgttcgtgacttgttcgacgtttccgtcacgggtgccgcagcagagagtagccctatcaccgttcgcttcaatctgggtctttcccagtctgcaacgctgatcgttctgcacaactacgagggctccaactgggagatcatcccgaaggatcgcgtaaagcagaatgctgacggtacggtcgacgtaacgtttgacagcttctccccggtcgcttttgttgtagacaagcaggaaactgctgacacaacgacgccgagcaccaatgctccgtcttctccgcagaccagtgacaacggcgttctgcgtgtagcaggcgttgctgctctgggcctcggatgtgcagctgtgatcggctctgttgttgcttctaagaagcgtaagggctaatttatgaagctgcgggtaaatatgcgtgtcttaaaaggcatggctatcgggttatccgtcctcatgcttttgatggcagccgctcttttactccggaatttggatgaaaatcagggacaggatattgcccctgatgtttcctcaaacgcagagggaagcagttcctctgcgcttgaggaagccggagatacgcgggagctgacgtattataacggcgggtggtatgcgcgccgcaatgatcttgagaccgtactgctgatgggtctcgataaatatgcggagacagaagaaagcaactatttaaataatgaacaatccgactttctgatgctgctcgtgatgaacaaagagaccggcgcttgcacgccgatccagctgaaccgcgatacgatgacgaagattcagatcttgggcgttcggggtgatgtggccggtacatttaccggtcagcttgcgttggcgcatacatacggttcgggtgagcgggacagctgtctaaacacggcagaggctgtttccaatctgctgtatggcgttggtattgaccactacatctccattacaatggatggtgtggcaattttaaatgatctggtcggtggcgtcgaggtggaagtgatggatgatttttcctccattgactcaacgcttgtacaaggcgagaccgtaatattaatgggtaatcatgcactaacttatgtgcgcacacgtggcgggctagaggatagctctaatctgcgcagaatggagcgccagcgccagtaccttatagcactgcaaaaaaagctaaccgaaaaagccgacagcgatgcgtggttcgctacgaatgcgattctgcaggtcagcgattatcttacttccgactgcacagctgaaaagctttctagaattgcggacttactcagtaaaagcgatgtttccgagatccgcaccatagacggtgaagccaaggtagggcaggaatacatggaattctatcccgatgaagacgccttgcaggcgcttgtgatgagtgttttctatgaaaaagtgaaaaagtgatatttagaataattgagggatttaatattgaactaataaaggagaggtttcatgtccaagttcaaacacgatttacttttgcggctgattaagctttggaatctgaaaaatgaataaaggggaaagaacgtatgtatcgaaaagattctacaggatggataaaacatgtggattttatcatcttggacttgatctgcttgcaggtggcattcgttctggcgtatgcgttaagcggatacggagctaatccatatcggctaattctttacaggaatatggctgtctttatggaagtagcagatttggtagtgctgtttgcaatgggaacactaaaaaacgttttgaaaagagagtactataaagattttgttgtaactgcacagcatggagtaattcttggagcatgtttagtgctttatttgtttatgcttcaggaaggacatgaatattccagactggcattgatactgaatatcgttatctatattctacttacttatctggtacgagagctgtggaaacatttgcttagaaaggaaatggaagatggtgaaaatcgttccttgcttcttgttgtttcagcagatgtagtgagtgcagtagtagagagcatgaaagagcataattatgcccggtataagattgctggaattgctgttatagataaggaaatgacaggaaagtatattaatggtgtgaaagtagtggcaaatatggaaaatgctgccgaatatgtctgcaaagaatggattgatgaagttctgattgtgacatccggtgtagttccatatccaaaagaactgattgagcagtttacggaaaccggagtaacagtacatctaaatcttgcaaaggtacaaagcgtgccggggaaaaagcagcttgtagaaaaagtcggagattatacagtactgactaccagtattaactatgcatctacaagagatttgatgttgaaacgtctggtggatattgccggaggtttggtaggatgcttgattactggaatcttgtttatatttgttgctccagcaatttacatagcatcaccaggaccgattttctttgcacaggaacgtgtaggaaagaatggaaagagatttaaaatgtataagttccgaagcatgtatatggatgcagaagaacgtaaggctgaactgatgaaagataacaaactgggtgatgaaaagatgttcaaattggattttgacccacgagttattggaaataagattcttccagatggaacacataagactggtattggggagtttatcagaagaacaagcattgacgaatttccgcagttttttaacgtgttgaaaggcgatatgtcaataattggaaccaggccacctttggtttcagaaacaagtttttatgagctacaccatcgtgcaagacttgcgattaagccaggaataaccggtatgtggcaggtaagcggacgaagtgatattaccgattttgaagaagtcgttcgtcttgataaagagtatatcacaaattggaatattgggctagatataaaaatactttttaaaacagtaatggtagttctgaaaaaagatggctctatgtaaaaagaaaaaaatatgtgctttgatctttgaaaggttggggcacaggaaaatggataagttataagtataaatatcggatagaaattagaatgcatgcaaaaacggaggagtaaaaatgtaaaaaatatacgactgcagttactggaactggggctagagatataatacgcggctgtcataatagggggtacggcagagaatgaaagactccgctacccgaagttcatattttcttacccgaagaatgaacgattgatctttttgggtggcagaaatgctgcacaggaagaaatctcgaccatgagggtggggtgacagccagcggacaggtgcacgagcctatccgctctttgtgttggccgagatattgatgaagaaattgagtgggattgtgggaaagatttatgagtaagaaacttgcgattgcgatgttcggacagaagcgattatcgagagaaggcggagtagaaatcgttgtcaaagagctctgcacccgaatggcacagaatggttgtgacgtgacctgctacaacagagcaggccatcatgtgagtggtgcagagtatgacaaaacaattgaatatgatggcatccgtcaaaaggttgttccgaccattgagaagaaaggccttgcagcggtaagctcttcttttttcgcagcactttgtagtgcatttggaaaatacgatgtggtgcacatccacgccgaaggaccagcgttctttgcatggctgccgaagatgtttgggaaaagagttgttgttactgtccatggcattgattggcagcgcgagaaatggcaatcaggacttggttctaagtttatccaccaaggcgaaaagaatgccgtgaaatacgcggacgaaatcattgttctaagtaaaggcgttcagaaatatttcatggaaacctacggaagggagacacattttatccctaatggtgtcaatcggccacagattcgggaagcaagtctgattacagataagttcgggctgaaaaaagactcatacatattgttcctcggtcgtctggtgccagaaaagggcattcgatatttggttgaggccttcaagaatgtcaagacggataaaaagctggtcatcgcaggcggctccagcgatacggattcctttatggaggaattgaaagacttggcgaagggtgacgatcggattctctttactgggtttgtgcagggagcaatgctggatgaactatacagcaacgcttacatctacacgctgccgtctgacttggaaggaatgccgctaagtctactggaagcaatgagctacggcaactgctgtctggtatccgatattccagaatgtgcagaggttgtggaagataaggcattgattttcaaaaagtcagatgtagaggacttgcgagaaaaattgcaagatgcctatgaccatcctgaaatggttatgaaaatgaagaagcaggcagctgactttatctgcgagaaatacaactgggatgaagttgtaagggaaacgatgaaactgtacaggagataataatagatgagagtattgataataaataaatttctatatccaaacggtggatcagaaacctacatatttaagctgggtgaggcgctagagcagcacggacatgaggttcagtacttcggtatggagcatgaaggccgttgcgtgggcaaccgggtcaatgcttatacatctgatatggatttccacggcggcagcaaactgagcaagctgacctatccgatcaagaccatctacagcaaggaagcaagagaaaaattaagactggtactagacgacttcaagccggatgtctgtcacctgaacaacttcaaccaccagctgacaccttccatcattcttgaaatcgtgaagtggcgtaaggagaccggaagagattgtaagatcatcttcacggcacatgactaccagttggtctgcccgaactacatgctgaacaatccgaacacgcatcagaactgtgagaagtgcctcggcggccatttcgtgaactgcatgaaaggcaagtgcattcacggttccacggcgaagtcagccatcggtatgatggaagccgaattctggaagtggaagggtacctacaagtacattgataccatgatctgctgctcggagttcatgaagaccaagatggacagcaatccgctgtttgcgacgaagaccgtggcaatgcacaacttcattgacaaagtggagtggaaagaaacaccgaagaaggattacgtcctctacttcggccgcttctcggaggagaaaggcatcggcacactcatcaaggtctgcaaggaactgccggatgttcagttcatcttcgctggcaccggtcctctggaagagacagtaaatggtattaagaacatcaagaacgttggcttccagaagggcgaggcactggaaaagctcatccgtgaggcacggttctccgtttacccttctgagtggtatgagaactgcccgttctctgtgatggaatcccagatgtacggcacgccggtgctgggtgcaaacatcggcggcatcccggaactgattcaggtcggcaagaccggcgagctgtttgaaagcggcaatgccgaagatctgaagaagaagatcgagaagctctggggcgataagaagctgtgtgaagcatatagcaagaactgcaaggacatcagcttcgataccattgatgagtattacgagaaaattatgaaggtgtatagataaaaaattgacagggccatttgttgtgtgatgcaggtataagtttcccttatatttaaaggattgcattataatgcgcttggtcttcgaaatgagaaatatttccgaggtaaaaaaatgagtttgagtttggttttaccatgctacaatgtgatgaaatatttgccgaagtgcttagatagtatctttaaaaatgattgtaatgatattgaaattatattggtgaatgacggctcttctgatgatattggtgggggcttaagccaatattttaataaggacaattgtgatcacaatatagaatttgaatacaaagatgcacggattaaaataattcacacatgtaatagtggtgtttcagcggcaagaaatacaggaattgaaaatgcaactagtgattacattgtatttattgatccggacgatactataaaagaaaattatttttccacgataaaggcacttatgacatcgacaagcgtagatgtcgccattttgggattctatcagattatagaagacaaagatggaaatatagtaaaagaaggagaaatttttccccaaaagaattatatttctaattcagtcgaagagacagtgagaaatgtccttcccaaatatcttggatattcagtcgaggacattttggaatgggtgaagtcaacagaggcaatatcgaaaagacttgaatggggagctgtttggcgaaatgtgtatcgtagagattttctgaacaaaaatcaaattcgttttaatccttcaatccgtttaaatgaggatagtatgttcaatgcaatgtgcttttctcgagcacaaaaaattagaacgttaaataagggattttattgctatacgattcgtccatctggtgcctttatgaaaaaacgagatgcagaactagtgggaaataaaatggcattgctcgaagcgcgtagtaacattgtgaatgatctgaatgaaaggggctttaatttttctgttaaagactatgcaggatcaaatgttatgtcctgctttgaactgataattaagatgcctttttctgcaagaagagagacgaaaaagtgtatcagcaatctgctcgttaaagagtctataaaaattttaccgtttacagggcgaaaaaaagtagatattccgcttttagcgttgaaatgcaacttacaagccttgatgatatatgcggtgaatcttggtaaactttttggagttcaatttcaactataaattatatatttatgtcatcaattgagatgaacattaggaaaaaatgataaaggtgtatcagtaagactggcatatgaggagagaatttgtggctacaaaaacggatcgatatgagggaatagatggattgaaggcgtatgccattattggcattgcgttgatgcatgtcctcacaaatggagaatatgggataggaggatttgtgtttgaacggctaataccatctttcacaaacctcgttttcctttttatgatggtcagcggttttggtatgtgctgtggctattaccagaaaattattgaccgaaagattagcgtagaggatttctacaagaaacgatacatcaagatttggccgtactttgcactgctttgtgcgttagactttgtgatttcaccgagcaaagaatcgttgtttgaagtcttcgcaaatttgactttatgtcagggacttctgccaaatgcgaacattacggtcattggtgtgagttggacactggcagttatttttgtgttctacatgctgttcccgtttttctgcttcctgattggaaataagaagagagcgtggggcgtagcagttgcggcactggtatttaactggttgtgcgctaattacttcaaagctggaaggactaatatcgtctacgatgcgatttactttattgcaggtggcctgattttcctttatcgaaaggaactggctgagtttgcatcgaagtataaggtcatcgcaggagcgattttactgattgccacagttgcctattttgcagtaggcggttctacactcacaatgttgttcttctgtgtggcaacactgatctataccctcggatgcaagcggggggggtcctggtcaatccagttgccaagttcctcggtggtatcagcttcgagatttatctgtgccacatggtaatttatcgtgtgcttgagaagctacactttgttcatctatttgaaaatggtctgctggcatatatcttcacagctgttgcagtcatctgcggttcggttttgttctcggtatgtgccaagtggttcttaaatatagtcgaaacattcttaaaagagagagttaggagagttaatcatgtctgaagaaaagaagttaaatggtacggtcatcgtcacttatcgttgcaatgcgcgttgctctatgtgcaatcgctataaagcgccttccaagccggaagaggaaatcagcatcgaaaccattaagaagctgccgaaaatgtacttcacaaacatcactggcggcgagccgtttatccgcaccgacctgaaggatatcgtgcgtgaactgtacaagaagtctgaccgtatcgttatttccacgaacggtttctttaccgatcgtatcgtagacctgtgcaaggagttcccgcagatcggtattcgtatctctatcgagggcctagagcagaccaacaacgagatccgtggtctgcagaacggctaccagcgtgggtatggcacgctgaagaagctgcgtgagatgggcatgaaggatgtcggctttggcatgaccgttcaggacaagaacgctcctgacttggttcctctgtataagatttctgacgagatgggcatggagttcgcaacagcatctctgcacaacagcttctacttcgttgaggctaagaacatcatccacgaccgcccgatggttgctaagaatttcgagaatctggttaatgaactgcttcgcagcaacagcccgaaaaagtggttccgtgcatactttaatcacggcctgatcaactacatctatggtcagaagcgtctgctgccttgcgacatgagctttgataccttctttatcgacccgtatggcgatgtcatgccttgcaatggcaccaaggataaagaggtcatgggcaacctgaacaatcagacttgggacgagctgtggaacagcccggaagcagagaaggttcgtgcaaaagttcgttgctgcgaccgtgattgctggatgatcggttctgtcagcccggctatgcacaagtacatctggaagcctgctacttgggttctggttcacaagttcaaggcattgttcaccaagcatccgtacagcatgtatgagctgaagatctgccgtgattaccgtgatggcaaagtcactaaagaggatctggacaagtgcagcacctgcgatatgaactgtgtgatcaacaatggtctgagtgaggcgagcaaggagcagttgaagcataagagcggcgaggaaatcgtggatgctgatatcgcacagcagatggagacgaagtgatgaatatcctatatatagcttattcatgtaacccttttgcaggaagcgaagacaaaatcggctggtgtgttccttgtgagagttcaaaaacaaataaagtttatgtgattacaaaagaagaacagcgtgaaccagttgaaagatatttgcagagccatccgcttgaaaacatagagttctattatgtcgacatcccggctttttacaaaaaaatcttcaagggatttatgtattctggaagacttaatgtgtggaatagacgggtgcttcctcttgcaaagaaaatctgtgcggatcaaaaaattgacattatacatcagattacgccaattgagttccgtgcaattggtgactatggaaagatagcaaatatcaaatttgtctgtgggccacttggtggaggagagtctttgcctaatgggttaaaaaattacgcaaagggacatgaaattattgaagtcgtccgttcaggaataaatcgctggtatcgttttaagctgagaatcacggggaaactaaatcactgcgattatattatgtttgcaaataaagagactcgagattttttaggattagacgaaaatttccctttggttacagaaattgctgcggatgaaatatcgattgagaaaagaactatatcaaatgatataaatgatgaacgcgttttcctgtttgcgggaagaatggtgtatcgaaaagggctggaattactctttgatgcaataatggaaattcctgatgaatggaaatatatagtgaaaatagtaggagatggtccggattttttacatctaaagcatcgatgcgaatcaaattctttattgtctgcacatgtacagtttatgggggcggttcaatattctgaaatgcaaagggaatatgaactgtcagatgtactaattatgccaagtattagagaaacaactggaacggtgcttatcgaagccatgtctcaaggaatgcctgtaattacaattaataagtttggaggagcaatactggtagatgagaatacgggctggttatataacggcgaaaatcgaaaatcatacatagatggtttaaaaaatgcaatggttgcttgtattgaaaatccgaaagaagtagaaagacgcggacaaaatgctagagagaaagtaaaaggttatacatggaaaagaaaatgtaatcaatatgaggaaatatataaaagtctaaattgtgttgactaaaattgtaattaataatggctctgtatgtaaagatgcatagaggtaaggagtattggattgaggcaaatggataaaaaggatggtatgagtaaaacggttacggtagttataccgatttataatgttgaaaaatacctgaatagatgcattgaaagtgttattggtcaaacatacgaaaatttggaaattatattagtggatgatgaatcgccagataattgtccccaaatttgtgaggattggaaaaatcgagataataggattaaggtagtgcataaaaagaatgctggcttgggatacgcaagaaatactggcatcgattgtgcaactggagagtatatctgttttgttgatagcgacgattatgttgctgcagatatggttgaaaaaacatataaatgtgcagaacagtataatgcggatatagtattatatggatataacgtagtcgactctaatgggaaaaaggtgaaggaatgtataccaaagccttataagacattttataaaaatgaggaaatacaaaaatatgtcttacctaatatgatagcgactgatccaaatgcaggagacgaattttggatgagtatgtgcggcgggttattctcaatgcgactaatcaatgaagcaaactggcggttggcgtcagaaagagatattatatctgaagatgtatattcattacttcagttatacaatagtgtaacaagtgttgcatttttagctgagcccttttattactattgtgcaaatatggggtctctaacacatacgttaagagtggatcgctatgagaaaattaaagatttttacgatcgagcaattaatgaatgtgaaaaaataggatattccgaggaaataaaacttcgtttgtcaaaaccatatatggataatactatggcagcgcttaagatgattctccaatctgatttgataactaaacaaaaaaaagatatgtttatggacatagtaaaagacaaacatcttcatagggtaatcaaaaatgtaaatatgaaaaagatgaccctaaaaaagaggctgttttggcaggcagtaaggtacaagatatattacatgagctattttatggtcgagatgaggatataatatatgataattgaaaaaacaggaaattcattatattttcataaaaacataaaatcattggtctggtttcaattatattggctgatgttttatggagtacttagagatcttgttggagttcctgggtatgtggcatatgtgctggatttgtttaatattattctcattgcttatgtaattgccaatggaaaaatgattaaatacaggaacagtagggttggactgtggataatattgtcttttttttgctctacggttatagggctaattgcagtagagggttctccaatactctatgtatggggttttagaaatgtttttagatattatgcatattttatatcatgtattgcgctattggatatatcagatgtgctagagattattccaaaactaaaaaaaatatatataattaatttctttatctgccttttagagtttggattggggtactcgggagataatatcggaggaatttttggaacacaatcagggtgtaatggatatttgaatctatttctgattgtggtatctgcaatttatgtgacagaatatctggaaaaaaagataggccttacacggattatgcttgctatagttagttgcttctttttgatggcaatagcagaattaaaagtttatctttttgaacttccaattattattttaattggaatgattaatgctaaatttagctttagaaaaattattattattatgtttggagtttgtggaatagctataggaatttcaatgcttgggcatttttttgaatcatctggtttggatttttttacttccgatgcgatttcaaaatacatgggtgatagtggatacacaaacacaggtgacctaagtcgaatgaatgcagtttcgcaactctatgaaagattcctgcaaggaaatttttgggaatcagtgtttggtataggacttggaaatgcgagctattcggcagcgttttcattttttaatagtcggttttatcttcttcatcaagcattgcattatcaatggtttactgatgcaataatttttattgaaactggaactgttggtctcgtactttatgaattattctttctaagagtatttacttactcaagaaaaattaataaaagaattgcaaatgaatatagtggcgatttttcacaacaacttagatgtgtagtacaagtggctggaattacggcgatattatgtgttgtcaattcggtttataacagtgctttaaatatggatgcgggctatatggtgtatttcatttttgcaattccggcaattgttgatgtgtttatgaagggaaacggttgttatgataaataaaatacttagaaagttactctatggaaataaagcagattcaaaaacatatattgaatatctccgcagtttgggcatgaagattggtgaagaaaccacgatatatgttccgacaaaaactcaaattgatactacacgcccgtggttaatttcaattgggaataacgtgaagattacagaggatgttaccattctcacgcatggctttgactggtctgtattgaaaggtgtctatggagacattttaggatcgggggggggtgtggcaattggcaacaacgtttttatcggtatgaagtcaacaatcctaaaaggtgttcatataggtaataatgtcataattggtgctaattccctcgttaataaagatattccagataactgtgtggcagcaggaaatccttgtaaagttattatgggactagaggcgtatcatgaaaaacgtaaagcggcacaagtagcagaagcaagagaacttgttcaattgtaccgggagcgttatggaagagagccagatgagaaagcactgcatgagtttttctggctcttcacagatggaaacgatgaacttccagagtgctgggaaagcatgatgaaactcggtggaaattacgaatatactaaagaacagtttaagaaaaacaataagaaattcaaagatatggatgagttcctgaaacaaatttgaggataaggcgtgcatagaatgaaggaggattgtggaaatgaaagtgtgtatcttgtcaatgcaacagattgataatatggggtccttacttcaatcttatgcactgaaaacaacaattgaaaaactgggtaatgaagtagagtttatagacatccaaaaaagagatgatgactataagctcttgggaaattacaaacaagaatatcacgaagaacgtgagaaggatggacttctaggaaaaattagtaagattgattgctactcaataaatcgtctgagaatcaaaagaaaaagtgtagagcaagggattgtttttgatgaatttcgtaaagaacatttaaatatagataaaaaaagtcgtcagtatgatctttgcgtaattggcagtgatgaagtgtttaactgtttgaattcaggaacttggggattcacatcacagttatttggtaatgttccggaggcaaacaaggtaattacctatgcggcctcctgtggctctaccaaatatgaggaacttccagaaacggttgctgaaaaaatcagggaaacatttgagaatgttgcagctttttcggtgagagatgagaatacgcacaaatttgttggaaaactaacagataagccaataaatgataatttagatcctgtgcttatatataattttgacagcgaggtggaacaggcaactttacctaaaatgccaaagcattattgtgtggtttattcctattataaccgaattcatacggcagaagagattgatgcaattaaagggttctgtaaaaaatatcaattgacaccggttgcaattggtgcaccgcaattctggattaaagattatattgtatgttcaccatttcagtgcctgaagatttttaaagagtcgggttttgtaattacggatacattccatggtacaatttttgcttcaaaatatgcagataaatttgcagtattggcaagagccagcaataaaaataaactgttggatttggttgataaaattgaaatgaaagatcgtttgatgaatgacctttccgaactggaagaaaaatatggccttttgaaaaacaagggaagctttgattcaattattaaagaagaaacacaaagaaccatacaatatttgaaaagcaatatgtgattagcgtatttcgaacgttaaagagcttatacgtttattaacgatgttcggattacattttgggttaaaataattatggttattttaaggagtgagtaatatagaatggcaaataatagaaaccgttatctgatgaaaaatactattatatttactttgggaaattttgggtcgaaactaatttccttttttttaattccattatatacaaatgtacttacaactactgaatacggagtagttgatcttgttgtaacggttgtaacggttgcagttccggtacttacattaaatatttcggaatcggttatgcgctttgcattagataaagacgctgataaacagaaaataacgcaaatcgggactggagtactgctgattggaatgctggtgggattacttgtttttccaatatgccgttcttttgataagatttcccaatattcattatatgtttatttatatgttattgcttcggcagcaagtcagatgtatttgtgtgatttacgaggaaaagaactcttagtctactattcgattggaaatgtgttaaatactctttttattgcttgctttaatattttatttctattagtattcaaagagggaattaggggatatttaaaagcctatataattgcaaatactcttactgcaatatatgcaattataataggaaaaggatataaatctttacatttttcgcatattgataaaggtttgttgacacgaatggctaaatattcggttgtgttaattcctaattcatttatgtggtggattatgaattcttcggatcgaattatggtgtctagtatggtaagtgtggcagctaatggaatttatgctgtttcatataagcttcctacacttgtctctacattgacctctatttttaatcaagcgtggagttattcagcaatacgtgaagaagggacagtagatgaaagcgaatataataatagaatatttagagctctaacaggaattgtaatgttgattggaataggcatactaacaatttcaaagccctttttaagtatatatgtatcaaaagaatactatgcggcgtggaaatatatgccgtttttgacagttggttgcgtatatttgacgctggctagctttatggcaactagttatactgttcataaggatagttttggttatcttttttctggaatgtttggtgcattatttaatattgtgatgaattttatgttaattcctttgataggtgtttatggtgctgcaattgctacatgtatcagctatattcttgtgttcatttttagactttttcatacaagaaagtatataaaatacaacgttagaaataaagaattttgggtgggaagcataattttgcttttatcggctgcgttgatgtttgtagatagctggattggtttttgtttgcaatgttttcttttgatcgttgtattatgcttattttcggatatctggttgcctatagtaagaaaaatatttaaattaaaaggaagacaataatatgactacagtatgtgaaaaaggaaaatgcacagggtgtatggagtgcattgacatttgccctaaaaaggctataaaagtaattgattcatggctggaatataatgcggtaatcgatactgagcaatgtattcaatgtaatgcgtgccataatgcatgccaaaataatgttaagcaagtactaactaaaccaatttattggaaacagggatgggcacaagataactgcattcgcatgcgttcttcatctggaggtgtggcagcagcaatagagcgagcttttataaaaaatggagggatagtttgtagctgtacatttaattttgggaagtttgagtttgattttgcagagtcggaagatgaagtgagtaaatttgcaggttcaaaatatgtaaaaagcaatccagagggaatatataagaaaattttagaaaagcttaaattggggagaaaagtgctttttgttggtttgccgtgtcaagttacagcagtaagacattatacgagaaatcatcaaaatttgtatactattgacctgatttgccacggaacaccttctccacagattttagatagctttttgtctgactatgggattagattaacagagattcaaagcataagatttcgggaaaataatgattttaaactagaacagaatggaaaacgttttactgttccaacaatttctgacaattatttgatgacttttttgaacgcaacaacatacacggaaaactgttatcaatgtcaatacgctagaattgaaagatctggtgatattacacttggggattcatggggaagtgaccttgaaaaaagcatccaggataaaggtgtttctttggtgctttgccaaaatgaaaagggaaaagaacttataaatcaaacagatttaacacttgtggatgttgatttgaaaaaggcgatagaatataatcatcagttatatcagccctctcagaaacctaagcagcgtgaagtgttttttaaagaaataagaaagggctatggatttaagaaagctgtaaaaagatgttacactaagaaatatttaaaggatattgttaagactttgctatacgagatgaaatttagaagggggggggtaaaaccactatcagataattgttactatgcctacaaagggcaatacagactaaatgtttcgaatattgaagaagtttgtattcgactgtgttctgaaaataaatttgaaaaaactgtgaaatgccttgttcttcacaagttaaagtattcggttcttgaaagtggaattcgattggcttgttaagattttgtgatttaaatatatcttatgaagaaagaggcataatatgaaaaaaatagtaagtattattgtacctgtgtataatgtagaaaaatttattttcaagacagtgaactcgatattaaatcaagattacaagaacatagaaattattttagtcgatgatggatcaccagataattcagcaagaataattgatgaactggctaagaaagacaatagaatcgtctgtgtgcataaagaaaatggtggtgtttcgtccgcaagaaatgcgggccttaaaatagcaacaggggagtatgtgacatttattgacggagatgattgggttgaaccaaattacgtttcatacttattaaatcttgtggaaaagaataaatgtgaaattggcatgaataaaaataaatattcggatgataacatgaactccagtgatagagagtatgttgtgtcggatgaaaaagccattgaatggatatacctaggcaatatttttgttgcagtatggaataagatttatagtatgccgtttctcaaaaaaaataatattctttttgacgaaaaaatttggtatggagaagggatgctgtttaacattgattgtcttcaatttgttgatagtatcgctgtaggagaaaaaagtgtttatcatcagataagcaatccaaattcggcaatgcgaaagttcaatgttgacagcaacctttgtggaatcagatcattggaaattcaaaaagcacattggagaaaatcaaatccggcaatagttgatgcttggaattaccataggagagcattcaatttgtcaattgcaagaggccttttaaatagcaatatggaaaagcaatatcaggacctgtacgattcgtgcattcataacttgaaaagtcagctttggattagtttgaaagtgccaatttcactgagagaaaagttattatatattgcatgggcgataattcctggatttatgtcaagacgttgtaagaataaagctagaattaaagcaaaggataattaaaaatgggaaagtattttgggacagatggcttccgtggggaagctggtattacattaacagcagaccatgcctacaaagtaggtcgtttcttgggctggtattataatgcgctgcgtgagcgcaatggtgacaccgatcctgctcgcattgtcatcggtaaggatacccgccgcagctcctatatgttcgagtatagtctggtcgctggtctgactgcttctggcgcagatgcctatctgctgcacgttactaccacgccgtctgtagcttacattgcccgtgtggacgactttgactgtggtatcatgatttctgctagccataatccgtactacgacaacggtattaagctgatcgactgctacggcgagaaaatgcccgaggaaacgttgctgctggtggaggactacattgacggcaaactccatgtttttgataaggactggccggaattgccctttgctcatcgtgagcatattggctgcaccgtggactatgtggcaggccgcaaccgctacatgggttatctgatctctttgggtatctactctttcaagggtgtcaaggtcggcctagactgcgccaacggcagttcttggaacatcgctaaaagcgttttcgatgcgctgggtgctgacacctatgtcataaacaataagccgaacggcacgaacatcaacaccaatgctggctctacgcatattgaggggttgcagaagtttgttgtggagaagggtttggatgttggttttgccttcgatggtgacgccgaccgctgcctgtgcgtggacgagaaggggaatgtcatcactggcgaccatatcctgtatatctatggctgctatatgaaagagcgtggcaagctgctgaccaatactgtggttacgactgtcatgtccaactttggtctgtacaaagcgtttgatgagcaaggtatcggttacgcaaagactgctgtaggcgacaagtacgtatacgagtacatggcgaagaacggctgtcgtatcggtggtgagcagagtggtcatatcatctttagtaagtacgccagtacgggtgatggtatcctgaccagtctgaagatgatggaagtcatgcttgccaagaagctgcccatgagcaagctggctgagcccctgaagatctacccgcaggttctggaaaatgtccgtgtgaccgacaagaaggccgcacaggatgacgaagcagtgcaggcagcagttaaggccgtagccgaggcactgggtgacaccggtcgtattctggtgcgcgagtccggcaccgagccgctggtccgcgtgatggtggaagcacctgaccataatacttgccagaagtatgttgacgaagtggtcaacgtgatttgcgaaaagggatataaagcataaagtcaatgacgactctggcaattacccggagtcgttttgcataaaagggaaagtataatagattaaataatgggagggataaacctatgtgtggaatcgttggttttactggaaatcgacaggcagcaccgatcctgctggacggtctgtcaaaactggaatatagaggatatgactcggctggactggctgtccgtgacggagaaaatctggcacaggtcgtgaaagcgaaggggcgcctgtccaatctgatcgagaaaacagatggcggcaaggcattgaaaggaacctgtggtattggtcatactcgttgggcaactcatggtgagccgagccaaaccaatgcacatccgcatgtttcaggtaactgtacccgttctggttctggtacagtggagtctggagtcgttggcgtacataacggcatcattgaaaactataccgaactgaaagaaaagctgctgaagcacggttatacattctatagtcagacggatacggaagtggtcatcaagctggtggactattattataaaaagtacaacctcggtcctattgatgccattgctaagacgatggtgcgtgtccgtggttcctacgctcttgagctgatgttccgggattatccgggtgagatttgggtagcacgaaaggacagcccgatgatcatcggcattgcggatggtgagacctatgtggcttcggatgtcccggcaattctgaaatacactcgcaacgtgtattacattggcaaccttgagttcgcaaagctcgttccgggtgaggctcacttttatgatctgaatggtgatgagatcgagaagcagaccaccgagatcaagtgggatgcagaagcagctgaaaaaggcggctttgagcatttcatgatgaaagaaatccatgagcagccgaaagctgttcaggatacccttaactctgtgatcaagaacggcgctatcgacctatccagtgtggagatcaccgaggacgaaattaaaaactttgagcagatctatattgttgcctgtggctctgcatggcatgtgggcatggctgctcagtatgtgctggaagatatagcggatatcccagtgcgtgtggaactcgcatccgagttccgttatcggaagatgccgcttgatcagaaggcacttgtaatcgttgtcagccagtctggcgagacagcagatacattggctgcattgcgacttgcaaaagaaaaaggcataaccacaatggcaatcgtcaatgtggtaggcagcagtattgcccgtgaagcggacaaagtgttctacaccattgctggtccagaaatctctgttgcaacgaccaaggcatatagtgcacagctggcagccatgtactgtctggcggttcagtttgcgaaggttagagaaaaaatcactgaagaacagtacagctactatatttctgaactgttgactctcccggagaagatgcagaaaactttggaagataaagagcgcattcagtggtttgcagcaaagtatgccaatgcacacgatgtgttcttcgtaggtcgtggcattgactatgctgtctgcttggaaggtagtttgaaactgaaagaaatcagctacatccactctgaggcatacgctgctggcgaactgaagcacggaactattagtctgattgagcagggaacactggtcatcggcgtgctgacccagagcgaactctatgaaaagactatcagcaatatgttggagtgcaagagccgtggtgcttatctgatggggctcactacttatggcaagtatgaaatcgaagatcaggtaaacttcacagtttatgttccaaaggtggacgagcactttgttggtagcctggcagtgattccgttgcagctactcggctactatgtgtctgtagccaagggcctggatgtggataagccaagaaatctggcgaagagtgtgacagtagaataaaagttagtaagaggaagaagttatgaaaacaacgttacttatcatggcagccggtatcggtagccgttttggaacaggaattaaacagttggagccggtggatgatgctggtcatatcatcatggattactcgattcatgatgcgattgaggcaggtttcaaccatgtagtgtttatcatccgcaaggatatcgagaaagagttcaaagaggttattggtgatcgcattgcctccatttgctcttctcataatgtaactgtggactatgctttccaggatattaacgatatcccgggaactctgccggaaggtcgtacaaaaccttggggaaccggtcaggctgtgcttgctgcaaagaaggttcttgatacaccgttcattgtgatcaatgcagatgattactatggtaaggaaggcttcaaagcggttcatgaatatctggtgaacggtggaaagtcctgtatggcaggttttgttctgaaaaatacgctgtccgataatggcggtgtgacccgtggcatctgcaagatggacgatcagaataatctgactgaggttgtagagaccaagaatattgtaaaaactgcaactggggcagaagcagacggcatagctgtggacgtgaattctctggtatccatgaacatgtggggattgactcctgattttctggatgtattggaagaaggattcaaagagttctttgagaaagaagtcacgggcaatcctctgaaagcagagtacctgatccccatctttattggagaattattggggcagggcaagatgtccgtaaaggttctgaaaactaatgatacatggtatggcatgacctatcatgaggatgtcgcagcagtaaaggatagctttaaaaagatgctggagaacggtgtgtataaggctgacttgttcagtgatctgtaaacgacgatgaaagaaacgattgatttactcggaaagatcatcacaaacatcctgactgctctatatgagccatttggattttcactcctgctttccttcctagccatgtttttctatctttatgcttatgagccaatacatgtaggcaaaggctggaagaatgccatagtgacctggtatcagaaattcaaagagagtgtattttttcggaaactgtttctattggcctttgtgacttcacttattctgttccgaaccctgttaaaccgtcagctgtggatgaatcctttatccgatgttatgggtggctggggcatctgggagacagtgaatggcgaacaaaagctgaccaccgagtgcatcgagaacgtaatcctgatgatgccattctcagcagtagtgatgtggacgttcggagagaagattggaaacggctggaagaagatactgtggcaaagcggaaagatagcgttcatcttctcgataagcattgagatgctgcaagtattgcttcgcttaggtacgttccagctatcggatatcttttacaacacagtcggcggaatgattggcggattgatgtattgtgcagtgatgaaggtaagaaagtgtctgtaaaactggatgaaattgtgatatactgggagcggtagctccctacgctgctcgtaataatcacacacctcttcgtggtgagcagcaggcaacgctgatataagcggctaagtgtgagaaaagaaaatattcgggaggagtcagaatggattataaagaacgattccgcaatatactgaagcgacttaatagtgattccaataaagcacggtataatgcaatctgtactttaacacagaatgatgatgagcaaagagtgtgggctatttgcagaaaattctggggaaataataaagcccctctggatatagagaattatgatgtgaaggatttggattcggcttatgcaaggagactgttaaacgagctagagtcacttttagataagctgggctgggagaaagagtaatcatattccccacaccccaacactgtgctatacttaaacaactataagaggaatgaggttatcacgatgcccagaacgaaaggcagcaaaaaccgtcctaaaaccaatattaccaaagactacgcatcccagatcgcagagaagcaggagactattgcgtctctgaatactgaaatcgcatccatccagaaagcgattgaagagcagaagaacacattgaaagagaagaagactgctctgaagaaggccgaaaaagaagtggcatccttggaagcaaagaaggcaaaggctgatgctaaggctgctgaagaagctaagaagaccgaagcagaggttgtgctgaagaagttgctggcaagcgggatgagtgcggacgagattctggaaaagctgaaagaacccaagaaaaaataaatgccgtgtggacaaactgaactccagaagttcacacggtattttttgaaggttgtcgtatagcttataacgaaaataaaagaagaacataattagaagaaatggagtgtgagaaaatgaacttatcaaaaatacatcatattgcaatcatcgtatctgactacgaaactgcaaaggatttctatgtgaacaagctgggattctctgttatcagagagaactaccgtccagagcgtaaggactggaagctggatcttcgtgtcaatgaacacacggaactggagattttcgctgaggaaaacccgccgaagcgtgtgaaccgaccggaggcctgtgggctgcgtcaccttgcgttctgcgttgagagcatggagcagacagtgaatgaactggcggaggtaggcattgaatgtgagccgattcgtgttgacgattataccggaaagaagatgactttcttccatgatccggatggtctgccgctggagctgcacgaataagcatgagaaagaaaagagcgtataaatctcggaagcccggtggaggccgaaagaagctgaagccggagtacgatgccaggaagaatctgaaggagcagatggaaagtgctgtggcactttatgattctgagatgtccttgcaggccatcggcgaagaactgggattaaatccaatcaaggtacggaagctgctcatcacggccggtgtgtatgaatcagaagtggcggagaaggtgcaagctacctttcaagaattgctgatcgaagcaaggaaatactaaaaagaaacaagtgaatttcgccgctcggtgtaaaaatcgggcgttttttcttgtccgaacttcaaaaatatgctatactacgaatgataaagtaccatgaggataggagaaataaatatgcgcattttaatgcttggaaacagctatattttcacaaatgatctgccgagtatgctggcggaaatcacgggtgccgaagtggtacagaacacacgcggcggtgcacgcttacgtgagcagctgaaccctgaaacaaggctcggcgcaaaagcattggagctgctgcaaaatgaaaaatgggattacgttgttttgcaggagatgagcaacggccctatcacagcaaaggaaagctttatgcagagcgtgaaagatttgtgcggtaaaattcgtgaaaacggtgccgtaccggttctgtatgcgacatgggcataccaaaaagacggcaaacagcttcaaaaattcggcatggattacgatgagatgcaccgcaaaatgcacgaagcctatgcagaagcggcagagaaaaaccacacactgctcgccgatgtcggcagtgcattttatgaaaaaaccgaaaccgataatctattcaacgacgacggaagccatccgaacgaagcgggctcgaaccttgccgccgaaacgattgccgaagtcattttaaaggatgcaaacgcataatgtatccctactgtgcatacgttgtatcggaaaaatacggcgaaacgggggaacgatatgttagaacgcatcggagaaatgcatgggcgagaggttatcagtgttttggatggctcgcgcatcgggtatctcggtgatattgaatttgatacacagcaggcggcactgacggcgatcgtggtgtacggccgtccgcgctttttcggattgtttggcagagagaatgactgtgtgatcccatggagcgctgtgaagaccattggggaggatgctgtgctggtcgatcacattcccgtaaagcggacaccgaagcgcagcttcttacaaaatttctttgaaaacggatagaaaacacttgctttacccggcatgttgtgctataatagttcagcgatttgcagattctgcaagcaaaaacgcacgccgaggctctcggattggtgccgcgaaagcggttttccccgaaaatatcagcccggcggaggaaaaaccaaggaggtattttcaaatggcagtcgtatcaatgaagcagcttctggaggccggtgttcacttcggtcaccagacaagaagatggaacccgaagatggcacagtacatcttcacggagagaaacggtatctacatcatcgacctgcagaagaccgttaagaagctcgaagaggcttacaacttcgtccgtgacctttccatggaaggcaagagcgttctcttcgtaggcacgaagaagcaggctcaggagtccgttaaggaagaggctctccgcgcaggcgcttactatgtaaacgctcgttggctgggcggcatgctcaccaacttcacgaccatccgccgcagaatccagagacttgcacagctgcgcaagatgcaggaagacggcactttcgaactgctcccgaagaaggaagtcagcaagctcgagctcgagatcgaaaagctcgaaaagtatcttggcggcatcaaggaaatgaaggagttcccgggcgcactgttcattgttgacccgagaaaggaaagaatcgctgtttccgaagctaagaagctcggtattccgatcgttgcaatcgtagataccaactgcgatccggacgagattgactacgttatcccgggcaacgacgacgctatccgcgctgttaagctcatcgcaggtgctatggctaacgctatcatcgaaggccgcgagggccgcatgggcgctgctgctgaggagaccgaagaagctgctgcagagaccgaggaataatttaatttcggttaaaaattcctttcgtttgatatagagtttaagattctacaaggaatggtgatttgaaatgaatttcacagctaaggacgttgcagatctgcgcgctaagacaggctgcggcatgatggattgcaaaaaggctctcacagaggctgagggcgatgtagagaaggcaaccgagattctccgcgagaagggtcttgcagcttccgttaagaaggcaagccgtattgcagctgagggtgttgcatacgctatggtcagcgagtgcggtaaggttggcgttgtgatcgaagtcaacgctgagaccgacttcgttgcgaagaatgctcagttcatcgatttcgttaagacctgtgccgagaccgttatctatgagaacccggcagacgttgaagctctccttgcagctaaggcacacggctccgatatgaccgttgatgctatgctgaaggataagattctcaccatcggcgagaacatcaagatccgtcgcttcgtccgttacgagggcgattgcgttgcttacgtacacggcggcggcagaatcggcgttctcgttcgttttgagaccgagaatgttccggcagaagttctcaacgagtgcggcaaggacgtcgcaatgcagattgccgctctgaatccggcttatctcgataagtccacggttccggctgaagcactcgataaggaaaaagaaatcctcatggctcagatccagaacgatccgaagaactccaagaagccgcagaacatcatcgagaagatggttaccggcagaatcggcaagttctatgagaacaactgcctcctgcagcaggcattcgttaagaacggcgacctctccgttgagcagtacattgctgaggaagcaaagaaggctggcggcacgatgaaggttacggatttcgttcgcttcgagaagggcgaaggcctcgagaagagaaacgacgatttcgcaagcgaagttgccaacatggttaaataattgattctctgaatcagcacaccccgaacgattttgcgtcgttcggggtgtttttgtatcgtataacttttggaaaatgtaaaatgtgccccgacaagacatcaaaatcttgccgaggcgcagaacaaccgattttcaatttgcgtagcgcgtgtaataggtaaggtcgccttccatgccgaaaagctcgctgcgggtgatctgtcgaccccaggagatctggcagttttcgtaatctgcatttacttccgtcacggtgatggtatcggtatcccagtcgatgtccgtcacgatcatcgagtgctcataccaacccatgcggatgtgatcgccgatgcgcaactcgtcaaagtcgtaaaactccgtgaccggtgcatcgtagccgaacagcaggtcgctgatgatggaagcgtagccgaggcattgcatttcgtctccgtattgcgggaagaaatcatccatcagtccattataaatgttacagtttccataaccataaacagaatggttgcacggcgtgtctgtaacgcacatggcaatttcgtctgccgtcatttcgcttgtgtccacaccgatatggttccagtacatg

SEQ ID NO: 836 - DNA, 18689 bp, unidentified
  source 1..18689: mol_type = unassigned DNA
atgaattttaccgcacccgcctttgtgctgggtctgccgctggtggtactgctgcaccgccttttgccgccccgcgcacgctgggtactgctgcttgcagccagccttgggttttatgcgcttggcagtccgaaggccctgccgctgctggcgtgcattacgctggaaacctacgctgcagcgctggccatcggccgctgtaaaagccgggtcggcagaaagctttggctctgctgtgcggcaatgctctgtctgggctgccttggcgttttcaaatacgccggtcttttcggcacgggggcctcgcttttgctgcctgcgggcatctccttctacacctttcagacgctcggctatgtcatagatgtataccgcggccgactggcaccggagcgccatccgggttactacgccctgtttgtcagcttttttccccagcttgtggccggacctattgagcgcagcaccgatcttttgccgcagctgcgcgaccctgcccgccggacggacagcgggggatggctgtatatcctgcgcggcttttgcaaaaagctgctgctggccgacacggcggcggtctttatagacaccgtctacgcagcccccggcgcagcgtccggccccgctgccatactggccaccgtattgtttgctgggcagatctattgggatttttccggctattcggatattgcggtgggggctgccgccctgctgggtgtgcggctgagccgcaattttgaccatccctatcaggccgtatcgctgcgcgatttctggcaccggtggcatatcagcctgacccgctggtttaccgattatctttacattccgctgggcggctcgcgctgcgcgctgaacacgctgacggtctttcttttgagcggtctgtggcacggtgcctcgcttcattttgtggtctggggcggtgtccacggtctgctgctgctcgccgagaagcggatttttcccactgacagtcaggggcgcgttgcacctgcccgccgcctgctgacccttgcagcggtctgcctcgcatgggtattcttccgggctgcctcggtttccgatgcgctgaccctgttctctcgtctgccctgcggatgggagccggcctctgtgcgcacggcggtgctcaccctcggtctgcagccagccgcccagctggtgctgggggcgctctgtctgcgccttctgcctgaaaagccactcgatgtccccacgccgggcggtgttctggcgttttgcctgctcacgctggcagtcgcggccgcatggtttgcagcgctgcatgcggggacagccaacgcctttatctatttccaattctgaacggtattccgtaacgcttatgaagaaaatcatcgcatttatgctgggtgtttttatcgccgtaccgctgcttctggcggtgtggggctttgccctgcctgcacagtacagcagcacctttttgggggagctgcccgccaagcgcaccctgctggcagccgaaagcaataagccccgtctgatccttgtgggcggcagcgctgcagcctttggggtagacagcaccctgcttgccaaagagcttccggactaccaccctgtaaattttggcctgtatgccgcgctcggcacccgggtgatgctcgatttgtccatacatgaattgcgggcaggggatattgtcatcgtcatgccggagcagcagcaacaggctctgtcggacacggtgggggtcaccgccctctggcaggccgttgacggggacttttcggcgctgggctgcctgcatgcccgcgactttgggccgatgctcgggtcatttccacggtttgccgccgccaagttccgttattttttgaccggcgcaccggagacggacggcatctaccggcgcgacagcttcaacgctgccggtgatctggccagcccgctctgcaaggccaacatcatgcccgagggctatgaccccacgatgccaatacggtttgacaccgcactgcccgaggccgcgttctgcgccgcactcaatgactacaccgcccgggcggccgatgccggggctatggtctattaccattttccgcccatgaacgcgcttgccgtggcaaatgaagatcagctcaatgcctatgccgcgcatcttcagcaggttattgccgcaccgctggccggggacccccgcgcctgcgtgatggagtccggctggttctatgatacgaattttcatctcaacgcagcggggcggacggtttttacaaagcagcttatccgggacattaaggcaatgctgggggacaccaccgcaacagaaatagccctgcccgccatgccggagccggccgcaagcaccgccgcaggcagcggcagcagcacggatgccgcatacttcacaatggcggaggatggttctgtgaccgtgaacgcggcaggccgcgcccgccgcaggctgaccgtccccgctgagataaacggcagggcagtcacaaggctctgcgccgagaccttccgcggctgcactgcgctggaggaagtcacgatacagtccgccgtcaccgccctgccggacggcctttttgccgactgcccggcactgcataccatcattctgacccagccagaccccgcccggctgcaggtggggcaggaccttctggccgatgcccccgctgcctgccgaatccagctgcccgacggcagctacacagcctactgcctgcagtattcctggtctgcctacgctgaaagattttgcacatagtaccgcacattcaggcgctgtcttgaattgtggctgatgacatgctataataaacccatatactgtaagccagcacagttcaatattggccgctgccttacggaaaattcgcaactgcggagtataactgctatgaaaaaatacaagatcgtggtggccgggaccggctatgtggggctttcgattgccacactgctttcccagcaccatcatgtgacggcggtggatatcctgccggaaaaggtcgcattgatcaatgcgcgcaaatcgccgattcaggatgattatattgaaaagtatctggctgagaaggagctggatctgaccgccacgctggacgcaaaggcagcctacgccgatgcagactttgtggtcatcgctgcacccaccaactacgacagccagacccagcactttgacacctctgccgtggaggcggtcatccgccttgtcatggaggtcaacccaaacgccgtcatggtcatcaaatcaacgatcccggtcggctacacggtgtcggtgcgggaaaagttcggcagcaggaacatcctgttcagcccggaatttctgcgggagtccaaggccctgtatgacaacctctacccgtcccgcatcatcgttggcaccgaccctgaggatgcgcaccttgtcgcagccgcccacgagtttgcggcgctgctgcaggagggggccatcaaggaaaatatcgacaccctttttatggggtttaccgaagccgaggccgtcaagctgtttgccaacacctatctggcactgcgcgttgcctacttcaatgagctggatacctacgcagagagcaagggtctgaatacaaagcagatcattgacggcgtatgccttgacccgcgcatcggcagccattacaataaccccagcttcggctacggcggctactgcctgcccaaggacaccaagcagctgctggcaaactacgccgacgtgccggaaaatcttatcgaggccattgtggagtccaaccgcacccgcaaggacttcatcgccgaccgcgtactgaagctggccgggtactacggctacgatcaggaaaacgagtttgacgaaagccgcgaaaagcccgtcaccatcggcgtctaccgcctgacgatgaagagcaacagcgacaacttccgccaaagctcgattcagggcgtcatgaaacgcatcaaggccaagggcgcacaggtcatcatctatgagcctacgctggaggacggcaagaccttcttcggctcggcagtagtcaacgacttggacaaattcaagcggcagagtcaggccattctggccaaccgctacgatgcctgcctcgacgatgtgcaggacaaggtctacacaagggatctgtttggcagagactgaaccgcctttctagcgccttttggcagttgagtaaggctcactacgccattaccgcacagtatccttctgacttttcttgtaacttaaaaaaaggggaacacctgttgtatgaaatatgattatctggtagtcggctccggtctgtacggcgccatctttgctcatgaggccaaggcccacgggaaaactgtgctggtcgtggataagcgccccaacattgcgggcaatatctacaccgagcgcatcgagggcatccatgtccacaaatacggtgcgcatatcttccacaccaacaacaaaaaggtatggaactacatcacccaatttgccgagttcaaccgctttacaaactctcccgttgccaactacaagggcgagctttactcgctgcccttcaatatgtataccttcaataagatgtggggcgttgtaacgccggaggaggcagccgcaaagatcgaggagcagcgccgtgagatcacccacgagccgcagaaccttgaggagcaggccatctcccttgtgggccgcgacatttatgaaaagctcatcaagggctacaccgaaaagcagtggggccgcgactgcaaggatctgcctgcttttatcatcaagcgcctgcctgtgcggctgacctttgacaacaactactttaacgccttgtatcagggcattcccatcggcggctatacgaagatgattgccaacctgctcgacggcatcgaggtgcggctgaacacagattacctcgaaaacaaagccgcgctggacgcaatggctgacaagatcgtctacaccggccccattgatgcctactttgactacaagctcggcacgctggaataccgctccgttcggtttgagaatgagctgctcgacaagcccagctttcagggcaatgccgccgtcaactacaccgaccgtgagaccccgtggacccgcatcattgagcataaatggttcgagttcggcaaggacgagaacggcaacgacctgcccaaaacgattatcagccgcgagtattcctccgagtggaaacccggcgatgagccgtactaccccgtcaacgatgccaaaaacggcgcactgtatgccgagtacaaaaagctggccgaggccgagccgaaggttatcttcggcggccgtctgggtgagtataagtactacgacatggatcaggttatcgccgccgtgctggaccgctgtgagagcgagctgcactaaagcacagccaagcgaaagcacaaaatgcaaacggcagcaaagtaaaccccgaaacagcctttggggcctgctttgctgccttttttatttgctcaatccgctggcgccgcttgctataacgccgccgtccataataatgtctgctccggccaggaagcccagacgctcatccagaagcagagcaaacaaagcggcgatttcttccggcttgccgttgcgcttgagcgcggagtattttttgaacacatccgcctgctcgctttccagtgcacccatcggcgtgttgggccagcgcaaaacagctttcacgggcggaaacatcacagctgaacgcctcagcctcaccgcccgcactgcgcagatcgttgactgccttttccagcttggacgccgtgcgccccaccaaaatcgtgtaatacccttcttcacagacaagcttagctgtagcaagccccatgccgctgccgccgcccgtgatgacgcatacctttttcatcatgtacaacctcttttttctttgtcagtgcagggaatccagcgcgtgaagatagcactcccactgctggtcattcatttgcagaagcttgcagatcgtcagcatcagcggctttgccgacctgctgctggacgaggaggtcaccccagaggagcagcgcgaatatctgcaaatcatccgcgatgagagcaggcggctggcgcagctttccggcagcgtgctgctattgaatcgtatcgaggcacagaccattctgaccgactgtacagacttttcgctggatgagcagctgcgccagtgcatccttgtgacccggcaaaagtggcgcgataagccactgcagtttgaggccgaactggccccctgcacctaccacggcagcgaagcactggtaaaggagatctggttgaatctgctggataatgccgctaagttcagcccggagaacggaaccatcagcgtaacgctgcaccgcgagcagggcagcccggttgtggctgtcactgaccagggctgcggtatagacgctgaaacctgccgccatatctttgagcagttctatcagggggacaccagccatcggacgcagggcaacggcttagggcttgccatggcacaaaaaatagccgccctgcacggcggcgctgtcactgtagacagccgccccggcagcggcagctgctttacggtagctttgaaataaatatggtataaggtcggttcaaatcagcccatgggctgtgcagtattgccagataccatcctccgccacgcttgggcatactgcatcggccagcgccttgagctcgggggaggcattcgccatcgccacgccggtgccgaccgcctccagcatttcccggtcattgttgccatcaccgaaggcaagcgcctgacttttgtcaagaccatagtaggccagcacctttttgataccgatgcccttgccgccatcggccgggatgacatccaccgcacggtcccaccaggctgcgatcttagccccgctcacaccctgcagaatagcagggtagtccttggcgcggcagcccagcataagctggtaaaccggctggcggcataccgcatcaaagtcagcggtcaggtcaggcttttcgttcgcaatggcaaaatagtctgccaaatcagtgtcggtgccgttcgcagctatgcggtcccgggtggccgccgccaccggacggccaagcgatgccgcattctggattaggcgctgcagatcagcgccgttgatcgggcggctgtagatcgtatcagcccccgcatagcataaagagccgttgaaggtcagataggcgtcaaattctgccccgccgaaatccggcagcgttaccggcgcgcgccctgtggcaatgcacaggcggataccgttggcccgcaggcggtggagtgcttccaccgtgcagggggagatgtgcttggactgcatgtcgatcagtgtgccgtctatatcaaaaaagatgatcttgatttgctgcatacgggcttttcctttctgtgccgggtgtgttttttccagtataccataaaagctgcacacaggccatcaaatttcccgcaggatcacagcacaatcccgccaaaaaagcgccgtcccttgccaaaagggacagcgcacggtctgggctgtacagcagcccaacatatttattataccattttctgcccggagcggcaagattgaaactgcacaaatctttcgctgcatcgttggcatatctgcgaatagacgaattccaagggctgtggtatagtatagtcacagaaagaaaacagccggagataaggagcagacaactccaagggaagctgattttccaaggagaaattccataggaaatctccaaagaaagcaagacgccggcggtatttcgtaaggaaggaggctcaagtccaatggcaaactttaaagatcctattcatcaccggcgggcctgggcctgctgaatgaaaaagcgccgcatccgaagccgcaggtcataacctgaacaaaacatattgaacgagatgtcaggcagcttacttttaaacagcagactcaggggccgtccacaaagacccccacgcaacatatagatcaggatgaaagaaggctggttatcatgactggttccacgccacccaacagaggttatctgaaatccacctgatccataaggagaaactccaatgtactaagtgtcagaggttgatcctcaatctcaaagcctgaaattctgcaaagggaatgattccccatgaaaataggaaccaactccgaaaaataatgaataaaggttatgaggctatgactccaatcatttaggtactgccggggcgaacggaaagttcgccccggttttgtttgtgccacaatctccggttcatgtacagcgtactcaagcgcacagccttgcattttcttccggattttgttactattgatataagtatgattattaacaggattaaaggagataaatctgcatgagcgtaaaaacggtttcatcgcaggctgatgctgccaacccgcttggttatgaaaaggagggcaagctgcttgtcggctttgccattccctgcattatctcgatgctggtgacggcactgtacaacattgttgaccagatctttatcgggcagggtgtgggcctgctgggcaatgctgccaccaacattgcgtttccgctctcgattgcctgcacagccattgcgctgctgctcggcatcggcagtgcgacgaatttcagcctccagctgggtgccggcaatgaaaagcgctctgctgaatatgcaggcaacggcctgtgcctgatggcgctgttcggcaccgtgctgatggcggtcacactgctttttctgacgccaatgctgaaattcttcggcgcgacgccggatgttttgccctacgcagaggcctacacccgcatcactgcgctggggtttccgttcctcattatgaataccggcatgagcaagctgattctggcagacggcagcccgcgctattctatgatgtcgatgctcatcggcgcgctcatcaatacggtccttgacccgctgctcatctttgggttttctatgggcatgaccggtgctgcgcttgccacgatccttgggcagatcgcatcgttctgcatcagcatgcggtatctcttccattttaaatccgtacctttctcacggagctgctttacgattgacggtgacagaacgcgcaagattttcagctacggtgcctccgcctgctttaaccagattgctatggctgttgtccagatcgttttgaacaacacccttgcacactacggtgctctgtcgatctacggcagcgatattcctctggcctgcgcgggcattatctcaaaggtcaatatgatttttatgtccttcgtcatcggcatttcgcagggtgtgcagccgatcatcggcttcaattacggtgctgcgctctaccgccgcgtcaaaaagagctatctgctggcgctggctgtggctaccggcctttctctggcagcgtttgcctgcttccagcttttcccgcggcagatcatcagtattttcggcaccggcagcgagatgtactaccagttttcggagcggtacttccgcatttatatgttcctgacgctgatcaacggcatccagccggtcacatccaacttcttcaactcgatcggcaaggcgcgcctcggcgtattcatgtccctgacacgccagattttgttcctgctgccgctcatcgtcatcttcccgctttttatgggcattgacggcgtcatgtacgcaggccccattgcggacggtgctgccgccatcgtctgcggctttttcaccgtgcgtgagctgcgggagctgacccgcctgcagcaaaaaatcgaaaaaacgaactaagatactaacaaagcgcccccgcatcactgtgcgggggcgctttgctgtcccgtgacatttttagcacatgggcgatatgacgaaaaaacctgcacctgattggcaaaaaggtagaaagtacaggaaaccacttgaatcgtaccggtttccgcactacaatggaaaccagtaagctaaatcgggtttccgcaggaggcaagtgatggacgaacacaacgagctgcgcacaaggctgtgcgcagtcggaatggagctgttccgcagggatgggctgcgctttacaatgcagcaggccgctgcgatgatgcacatcagcaaaaagacgatctacgcagtttacccctccaaggaggcgctgctgctggatatggtggacgatgcgtttacaaggattcacgcccgcaagcaacgcattcttgacggcccagacaccctggcagaaaagctgcgggcagtcattatcgccctgccggaggagtacaccgcgatggatctgcagcagatggatcttttggatgaaaaatatcccagaatcgcagcgcgcgtgcgggagcatctggaaaccggctgggagcctaccttggcgctgttggagcgggcaatgggggagggcgttatccgccgggtatccctgccggttctgcagcgaatgatctccgcttccattgaggattttcttgcagaccgcgcgctcgatgcacagggcatatcctacacggatgctttggatgagatgatttccattttactggaggggttgttggtacgatgagatacagtctttgcaatcattgggaatttacagagcaatggagcgatgccttctgccggggtgaagctgttgactgccgtccggtgcgcctgccccatacctgccgggagctgccgctccactacgcagacccctctgactatgagatggtctgcggttaccgccgcacactgacttttcccgatgcgccccgggtattcctgcgctttgacggcgccgcccatcaggcagagatctacctgaacggccagccggccgggcagcatcagggcggctacaccggcttcaccatcgaaattaccgaccatgtgcgccgcggcgcagaaaatctgctagccgtgcggctggatacgcgcgaggaccccagcctgccgcccttcggctttgtcatcgactacctgacctacggcggtttataccgggaggtctggctcgagacctcgccgcagagccgtgtgagcgatcttttcgtgcatacaccgactctgaccgaggctgccgtacagctgaccgttgaggcaccggagcaggccgctgcgctgcgcgtccggctctgcagcagtgcgggcgaaacgctggtgagccgccagctgcccccggcagaatcggcggaatgccgtcttatgctgcctgacgccgcgccgtgggacactgagcatccgactctctaccgctgcatagcagagctgctcgatgccgaagggcgggtgctgcacagccgggaaaccgccttcggcttccggacggctgtgttccgggcggacggcttttacctgaacgggaaaaagatctttctgcgcgggctgaaccgccaccaaagctacccctatattggctacgccgcgcccgaaagcctgcagcggcaggatgcccgcatcctgaaaaacgagctgcactgcaacgccgtgcgcacaagccattacccgcaaagccagtattttcttgatgaatgcgaccgtctggggctgcttgtatttaccgagctgcccggctggcagcatatcggcgatgcggcatggaaggaccgcgcctgtgccatgctgcaggagatgctgctgcaaaaccgcaatcaccccagcatcattctgtggggcgtgcgcatcaatgagagcgtggacgatgacgaattctatgcgcgcacaaaccaaattgcccacgcactggacccgagccgggcgacctcgggcgtacggtatctggaaaaaagccaccttctggaggatgtttacgcctacaacgatttctcccacaacggctcaaacgccggtgccaagcggaaaaaggatgtaacgcctgatttgagcaaggcactgctgatctccgaatgcaacggtcacatgtaccccaccaagccctatgacgatgccccgcatcggcaggagcatgccctgcgccatgcgcgtgtgctggacgctgcctacgcagatggagagcacgcgggctgctttggttggtgtatgtttgattatgccacccacaaggatttcggctccggggaccgcatctgctatcacggcgtactggacagcttccgcaatcccaagctggcggcgtctgtctacgcatcgcagggcggggaggagccggtgctgacggtcagctccacgatggacatcggtgactatcccgccgggcagatcggcacggtctatgtgtttaccaatgccgagcaggtggacctttacaaaaacgatgtgtttgtgacgaccctgcacaaaagcggctggacggcgctgccgcacccgccgctggccgtggatgacacgatcggtgtcctgcttgaaacgcaggagcattttgacaaggccaaggccgacacgctgcgcgactgcctgcttgccgccgggcgctacggcttggccgggctgccgctgcgctacaagctgaagctggcgtggtgcatggtgcgctataagctgagctttgcggacggtgtggcgctgtatggcaagtatgtcggcaactggggcggcgcggctacgcgttggcggttcgatgctaaaaacggagataccgtggtaaagagcgtcacgctctgcccctgccaccggctgcatcttgaggtaacgccctccgccactgtcctgcaggagggtgactcctacgatatggccggagttcgggtgcgcatccttgatgaaaacggcagccccgccgtctatgcacagctgccgctgacctttaccataaccggggccgccgcgctggtcggccctgcggcggcaaccgctgagggcggcatgggcgggacttatctgcgcacagtagggcagaccggtacggccgcgctgaccgttttggccccgcagtgtgcgcccgtcaccgtagaatttaccgtcacaaagaaggagtgtgcagtatggaactgacaacaaagcaaaaagcagccttcggcatcggtgcagtgggcaaggatatggtctacgcgctgtctgcctcctatgtcatgtactattatcaggatgtactgggcctgcctgccacctttgtcggcctgattctgatgatcgcgcgtgtgtttgacgccttcaatgatccctttatgggggtgctggtggccaagacccgcacccgctggggacggttccggccgtggattctcagcggcaccgttctgaatgcggtggttctctacgcgctgtttgccgcgcctgtgctggagggcgcgggcatgatggtctacttcagcgtcatctacatcctgtggggcgtcacctacacgatgatggatattccttactggtcaatgatccccgccgtgacccgcaccccggccgaacgagaaaatctgtcggtcgtgggccgcacctgtgcgggcgtcggctcggcgctcattgcgatgtttaccatgctgctggttggcgcccttggcggcgacagcgagcgcgccggtttccgctgggtggcgctgctcgtggccgtcatctttgtagttaccgaggcgatctgctgcgccagcgtcaaggagaccggcagcgccgagataaagaccgccaccgtcggcgagatgttcaaggcgctgttctccaacgatcaggcgcttgtggtcgtaggcagcatcgttttaatcaactcggcgctgtatctgacctccaactttatcatctatttcttcaagtacgatttcggcggcacaggctggaaggccagctacacgttgttctcaaccatcggcggcgcggcgcagattctcggcatgatggttctctatccggtgctgcgcaaaaagctcagcaatactgccgtatttacggtaagtctggggttggcgctgggcggctatgccgtgctgctcctgctctgcctgacaggcctttccggcagtctggcactgctctgcgtgccgggcgtggtggtgtttgcctgcaacggtatgctcagcgtactgacaacccttttcctctccaacagtgtggattacggccagctcaagacggggcgccgtgaggagagcgtcatcttctccatgcagacctttgttgtaaaggctgcatccggcgttgcggtttttctgaccggcatcagtctggatctgatcgggctggccggcaataccgaggagaccggccccatcgctgcccagagcgccggcacactgctcgggctgcggctcatgatgaccgtgctgcctatggccgtccttgcggcggcgcttgtactgttccgccgcaggttcaccctgacggatgaccgcgcagccgaaatcagcgccgcacttcatagggaggaaaaccaaaatggctgagatgcagtggtatgccgcaacagacagcggccggtttgacggcacggcagccatcaccccgcgcagcggtgccgtctgcctgagggcagagctgcccgccggggtgctgcaaaatgctgttgctacgctgccatggacgatggcagacgatgaaaagctcttcatgaacggctaccagacatggaccgcctgcccggagctgggcaaatgggaccggcagcacggtgtggagcatgttccgaaattccttttggagaaatacagctttgaccgttacggcgattatcattttgttccctacagcggcaaaaggggacagagccacggcttttcctactgctatttccggcgcggaaagacctaccggcttttggccagcttggacgaggcaccgggctacacgatcttttcctatgacagccgcgccgcacagctgcgcattgagcgcgactgcgccggggtacagcataccggcggcagctttcctgcgttctccctcttttttgccgagggcaccgaggacgaggtatttgacgcatggtttgcggcgctgggctgccgcccccgcaccacgcgcagactggccgggtattccagctggtataaccgctaccagaatattgatgaggcctcgattcaggaagatctcaacggctgcaaaacgcttttccgcacaggggatctctttcagatcgacgatggctgggagcgcaaggtaggggactggctggagcctgatcctgccaaatttcccaacggactgcgcccgctggcagatgcagcccacaaaagcggctttctggccgggctgtggctggcaccgtttgtctgtgagaaggaatcactgctctgcaaaaatcacccggactggctgctgcaggtggacggtcagccctggtgctgcggctgcaactggagcagcttttatgcgctggacattgaccacccggaggtgcaggcctacctcaagcaggtctttgaccgcgttctgcaggattggggcttcgaccttgtcaagctggactttctctacggcgcagcaccgttcggcaacgcacgggaatcccgcgcaggccggatgcagcgcgccatggcactgctgcgctcatggtgcggcgacaagctgattctcggctgcggcgtgccggtcatgcctgcctttggcatcgttgactattgccgcgttgggtgtgatgtagggctggactgggatgatgtatggtatatgcggcttttccaccgcgagcgggtctctacaaagcagtccatcggcaacacaattttccgccgccagcttaacggacgcgcctacggcagcgaccccgatgtctttttcctgcgtgaggaaaactgcaagctgaccgcacagcaaaagcagaccctggcccgggtcaacgcgctgttcagcggcatcctgctcacctccgatatgcccagccgctatacggatgagatgcgccgccaatacaacgccctgcgagaattgaccgactacgccgaaaactgcaccgtggatgcagacgacggcctgaccgtacactacactttgcacgggaagcagcagacaatcaaaatatcctgacaatcgttaaggcaataccgcataatacaccatgaatagcgaggaatttccatgaagatgcaagaagatgagaactggcggctcaatcaagcgcttgaggacgctgtgcagggcctgcagcaggcccccacgcaggagcagcttgcccataccctgaccgttgtgcgccgcgccatgcaggccggcggacagtggatcgccgccgtggagacaacgcccggcgcgtctgccgcgctgcgccccaaaattgtgcagaccgccgacggcgggcgctggtggtatgccttcacctcgtttgacgagcagatgaaaagccccgatgccgtgaaatccacattctgggctgacatcagcagcctgtttgacgccgcgctggctgcgcaggagattcagggcatcatcctgaatccgtggcactgtacgctgcagctggataaaacgctgattcgcatcatcaagccgtaaaagcaggggagagggtaagtatgaaaattcgttctgttgcaattctgggggccggtgctgttggctcctatctgctgtgggggctgaccgacaagccgggggtgacggtcagcgttgtggccgagggtacacgcgccgcccggctgcgccgcgccgggcgtacgatcaacggcaagacctaccgcccgcaggtactgacccccgcgcaggcacacggcgcagacctgctcatcgttgcgctgaaatacggtgccctgcgtggggcgctggatgacatccgtgcgattgtgggcgataacaccaccgtcatgagtctgatgaacggcgttgacagcgaggagatcatcggggaagcggttggtgacagccatgtgctgcccgcgcttattaaagtggcgtcccaccgcaccgagggcggtgtcttttttgacccggacacaacgatcgggatcatctacggcgagccgcagccgccctttgacagcccccgcgtgcaggctgtggccgacctgtttgacggcacggggctgcactaccagaccacagcgcatatccgcgaggagatctggagcaagttccggctgaatgtctgcaacaacctgccgcaggcaattttgggtgcaggtgtcggctgctaccgcgacagcgcccacatgcaggccatcagtggcggtctgcgccgcgagctggagaccatcgccgccgcaaagggcattgacctgagtctggtggacaacgccatcagctacggcagccttgtaaagccgactgcgcggtactcgaccctgcaggatctggacgcccaccgccacactgaaatcgagatgttctccggtgcgctcatccgcatggggcaggagcttggcatccctacgccgtataacgagtacacctaccacatgatcaaggccatggaagaaaaaaatgacggtctgtttgactatgcagagggggaagcagcgacaagagcgcggtaaagcgtaagcctaactataaatacttggcagggggcgcacgatgtgcgccccctgcttctttgccaacctgacatgctgggcgggactaacacccgcagagcatgactttggcggagaaggtgccattctgataggtaaaggtactggtgccgccgtttttctctgcaatatgggtgacggactggataccgataccgttttccctccgcttggaagagcggaaaacgccgttcttttcgtggacctcgccgtcaaacgcattttcaacctcgatcagaagaatccggtcggcatgtatataggcggttatctcgatttgccgcctgcccggtgcggtgcgaaggctcgcctccagcgcattttccagcaggttggacagcaccatacacatatcaatctcatcaatcggcagtgcttccggcaggtcgagtctggcgcggaaggggatatcatcgcgctttgccatggcacagtaatagccgacaacgctgtccgccgcacggttttcacagaagcacatatcaagattcggaatgcgggagacggtttttgcaaggtagcttttcagattctccaaatcacccgcctcggccagcacagaaatttgctggatttggtggcgcatatcgtgccgtgcctgccgcgcttcctcgatggcggtcttgaggttctcatagcgctgctgctgcatcgaaagaaactggttctcctgctgcagctttgcattgcggttgaggctggttgccatcagcaggaaaatcgcattgaagcagaacataaaaaccagaagtgcgctgcttagcacaatatagccctgcagtacgcggccggtctggagcgttgcctgatagcgcggaatcatgaaaatgttcaaaaggatgaacgccagcggcaggacccagaacacataccatgtttgcgcaaaattatcgtcctcgaccattgcacgcaccgcatgtgtcgcaggataatacgcggccagcacggtgatccagcaaacggcgttataaaacacgcaggccccaaggcagagccacggctcgttcggcggcagctgctgattccggatgattgcggcgctgactgcgcgggacaagctgttcacacacgcgaacacggcgcagacggacagcgcaatcgtgccggatttccagagggagatatcaagcgttcgggtatacaggcaagcagcagccagtgcgaccaccgcaaggggaaagagggtagaagcctgaagccgatagcagacaagcccgctgccgatgcacaggcacgccatcagcggaaaaagccagccggccagccttccgggtgactgcttcagataggcttttacagggaaatagccaagcaaaaggccgggaagtacaacgagcagctctaaaactgggcgcagaatatctttcat

SEQ ID NO: 837 - DNA, 29752 bp, unidentified
  source 1..29752: mol_type = unassigned DNA
ccgttatgacaagaacgtctattccattatgaacgccctcggcaagaccaatacccccgcacgcaatgagctcgcctatatccgccgctggacagaggaattctgctttgagctcgacgttattttagaagcctgcggacgcaccgtcctggctaccgacagacaccgcttcgcctatgcagacagcatcctcgccgcctggtacaaggcaggcgtccaccatgtcgcggacatcgccagactcgacagctcctatcagaaagagcgtgcatctcgcccggcgcgcagcggttctacagcagaatataacagtttcatgcattccagctatgatttcgatgcgcttgaagaggcgcttttgaagcagtaaggaggtttgatgtggcactgactgtttcccaatacaattccatcctgcggcaatacgaagagcatcagacccgcaaccgccatctgcacgatcagcggctgcaccatatttatgagacagtccccggctatcaggccctcgacgaagccgttgcatccacctctgtcgcacagggaaaaaagatgctcgcaggggatacaaatgcgcttgcacagctcaaagaccagctcaaagaccttgcacagaaacgtgccgcccttttgctggaaaacggctacccggcagattttctcgatccgatctacgactgtcctgactgtcaggacaccggctatgtgcacggtcagaaatgccactgcttccgtcaggcggagatcgcgcttctttatgaacagtccaacctgaaacgaatgctcgaaaaagaaaacttcggcacactctcctattccttttttcagggagacgaactgacctcctatcgccaggctgtcgaaaaatgtaaaaatttttgcacaaattttaaaacgtcctaccaaaaccttttcttttatggtacagtaggtacgggcaagacattcctgaccaactgcattgcaaaggaatgtatcgagcagggctgttctgtactttatttcagcgcagcatcccttttcgacttactcgccaggaacacgtttgactatagggcacgggaagagctttccgcactctgtgcggatctcaacagctgcgatctgctcgttatcgacgatctcggcaccgaaactgccacggcagtgacgctctcccatttctttacctgtttgaacgaacgtctgctccggcagaaatccgttatcatttctaccaatctttctctggaagattgcagaaaccgttatcaggaccgaattttttccagaattgccagcaattttgaattctgtaaactcaccggccctgatattcgtatgtgtaaaaaggtatccgcagtctcgggcccggtccgctgacgcagatatccaaaatattaacttttaccttcagaaagtgaggaacttccatgatggaacgtgaagaaaccagaaatctcgaaaccattccggttggctccctggggattatcccgttaaggggctgcgaatcccttgcacagagagttgaccagtatcttgtaagatggcgcacccagcgcgagagcgagcacaaagacagccttgcctttgcaggctaccagcgtgactcctacattttaaaaagcaaggtgccgcgttttggttccggcgaagccaagggcgttattctggaatctgtccgcggtacggatctgtatctgctggttgacgtaaccaactacagccagacctattccctctgcggtcatgaaaaccatatgtctcctgacgatcattatcaggatctgaagcgtatcatcgctgctgtcggcggtaaagcaagaagaattaccgttatcatgcctttcctttatgaaagccgccagcacaagcgcaccgcacgggaatccttggactgcgcactcgctctgcaggagctggtaaagatgggcgtcgacaacatcatcacctttgatgcccatgacccgagagtccaaaactccatcccgttaaacggtttcgaaaccgttcaggcttcttatcagttcatcaaaaacctgctgcgcaccgagcccgacctgcagattgattccaaccacatgatggttatcagcccggatgaaggcggtatgggacgtgcaatttacattgcaaacgtactcggtctggatatgggtatgttctataaaagaagagactacaccagagttgttaacggacgaaacccgatcgttgctcacgaattcctgggtaccagcgtagaaggcaaggatatgatcatcatcgatgacatgatttcctccggcgaaagcgtactcgaagttgcatccgcattaaagcagcgcggtgcccgtaagatcttcatctgcaccaccttcggtctgttcacaagcggtatggagaaattcgacaaggcttatgcatgcggcaatatcaaccgtgtcctgaccaccaacctgatttatcagcctgaagagctgttaaaacgggaatggtatgtcaactgtgacatgagcaagtacgttgcttatctgattgataccttgaaccatgatacttccatcagcgatctgctcgatcccaacgataagatccaggctgctgtcgcaaagtataaaaaaggactggctttagataacgacgactgagccagataaaaaattgagctgaacaatattgttcagctcctattttttctatgcaaaatgtctctaaatggaggatttatgaaaatcgtagtaattgacggtcagggcggcagaatcggcagtcttgtgactgcccgcctctgtaaagagcagctgcccgactgtgaactgtatgccatcggcaccaatgcaaccgcaaccgctgccatgctcaaagccggggctgacttcggcgcaaccggagaaaatcccgtgcttgttgcctgccgggatgcggattttatcatcggtcccctcggcattttgtccgcagactccctgcttggggaagtgacgcccgccatggcggtcgccgtcggacagagccatgcccagaagcttttgcttccggtcaaccgctgcaacaaccacatcatcggaaccgccgatctgtccgtatcccagctgatcgacgaaacgatctcgtttctgaaaaagagtctttaaagcaataaaatgcgcgttttgcagacatttcattatcataaaaactccggggcaagatacagaaggtatcttgttcccggagtttctatgtttcttttatcctacaattctccgaattgtcagaatcggcttataattcgcatatccgtacttaattcctgttctcgctgtgctggcatgcacgattcgtccgccgcccagatacagcgccacatggcctgcatagcagacgatgtcgcctgcctgagcagcttcataggaaacctcgcgtcctgcacttctcatagcagcagagtttctcggcaggccgtatccgtattgcctgtacactgcccagataaatccggagcagtccgcaccgtttgtcaggctcgttccgcccgctacatacgggtttccgacgaactggcaggcatacgccgcaatgtcgcttccactcgatccgctggcaggaggaacggtctttaagccgccgcccgaagaactgccggaggaagaggagctgtcggaactgcctgcgcgattcgagctactgtcagaagagccggaattgctgctctttgcagctttttcttccgcctttgctttttcttccgccgcttttttcgcagcctcctcggctttccggcgctcttcctcggccttgatgatggcgttttcttcctcatccagccttgccagctcggaattctgctgtttgattaacgctttatatgccgctgcttcctgcttcgctttcgcaatctgcgcatcgaaatcattcgcctgggactttttctcatcgatcatctgctgcatggaagcctgttcctcttccagctcatatttctgcgtttccaggtcgctctttttatcttccaaatcgttctttttctgtgcaacctcttcttttatcaggatgtatcggttgagcatctgtttatcgtactcatacagcttctccacataattcgcctgattgagcatgccactccagttggaggcgttgctcaggatctcgatatagctggtatcgcccttttcatacaggtaacggagacgcttcttcattgcaagatactgcgcatcctcctgcgcctttgctacatcatagtcctcctgcgcctttacgatctgcttttcggtatcgctgatctgatcctgcatcaggcttacgctggcaatgacctctaccagctgggaatccagctcctgtatttcttcctccaaagcgtcctgctgcccttccagactgctgaccttgctctggctctgcttatactgactctgggtgccctgctgctcgctctttttctgctcccgttcctgctgaatttcttcccgtgtctttgcctgcacacagacaggctgtattccgatcgctgccacaagcataactgctgctatttttttccagtgatgatttcccatccgtatcttccttttttgcattctagtacatcgttttcactttatacagtatacaacaaaaaaagagcgggataaacccaaaagttcatcccgctcaaatcttttatcataattcgcagttctttaccgttctcgggaaaggaatgacatcgcgaatgttacccataccggtcagatacataacacagcgctcaaatccaagaccaaagcccgcatggcttgcggagccgtattttctcagatccagatagaagccgtaatcctctttgttcagcccaagctcgtccatgcgctgttccagaagctcgaggctatcctctctctggctgccgccgatgatttcaccgatgccgggaaccagacagtccatagcggcaaccgtcttgccgtcctcatttaacttcatgtagaatgccttgatttccttcggatagtctgttacaaataccggacgcttgaacaccttctccgtcagataacgctcgtgttcggtctgcaggtcgcagccccagtatactttataatcgaattcgtcgttgtgctcttccaaaatcttgatcgcttcggtataggtcacatgtccgaaatcggagttcaatacatgattcagtctttccagaagtcccttatccacaaagctgttgaagaagttcatctcttccggagcatgctccagcacatagcggataatgtatttgagcatggactctgccagtaccatgtcgtcctttaagtctgcaaatgcgatttccggctcgatcatccagaactcagccgcatggcgggtggtattggagttttctgcgcggaaggtcggtccgaacgtataaatgttcttaaacgccattgcataggtttcgccgtttaactgtccgcttacggtcaggttggtgggcttgcagaagaagtcctgggtataatccacagtaccgtcttcgtttttcggaacgttgttcagatccaaagttgtaacctggaacatctcgcctgcgccctcgcagtcgcttccggtaatcagaggagtgtgcacatagacgaaatctctctcctggaagaattgatgaatcgcataggcgatcagggaacgaactctgaacactgcctggaacgtattggttctggggcgcagatgtgcaatggtacgcagatattcaaagctgtgacgcttcttctgcagcggataatccggtccgcatgcgccttccactacaacctcgtctgcctgcatctcaaagggttgttttgcaccgggcgtctctacaatcgtacctgttacaatgacagctgctccgacgccgattttggcaatatcagcataattatccagcttgtccgctgcgtatacaatctgcagcggctcaaaaaaggtaccgtcatttacaaccaggaatccgaaattcttagaatcccggttgcttcttacccagccgcctactgtcaccttctggccggcaaactgttctttttctctgaataactgtcttacacttgtcagttccatgctctctctcctcactcgcctcgtgcgtcagctgtgccttggcttattctgcttcggtcgctgtctctgttgttgtctcggtttcagtttctgttgtctcttcggtcgcttcctctgtggatgcctctgtttcggttacgttcgcgttctcaatcagatacttggttaccttttcagacatcagatattctttgtagccgcgcaggtcaccaaccgcttcctcataagcttctacggaatcataaccatattcggatgcgctgctttccagatctgcctgcagctcttcatcggttaaggtcagaccttctttttctgcgatcgcctgcataaccagaatctgctctgctgcgctttgtgctgatttctgaagctcgtcttcatattcatccgcagccaggccgtagctgtatgccataaaggtctccagatcgattccatacatgcttgcagtagcggtcaggttcttaaccagacggtcataatagcggcttaccatctcttcgggagtttccttgaaggttgcatttgccgttaccgcctccagaacatttctttccagctctgtttcctgctggctcttggcagagctcatcaggttatcgtaaacgtactgacgatattcttctactgtgcttacgccgtcaatattgcgggctgctacaaaagcatcgtccagaaccgcgtcagtttcttcataaacatgatttaccgttaccgtgaatacaacgtctgcaccggcaaggtctgtattgttgtaatcctccgggaaggtaaggtttaaatcctttgtctcatccttcttcatgccgatcacgccgtcttcaaaaccgtcgataaaggtattggagccgatggtcagctcgtagctgtcggaagaaccgttgtcaaactctacaccgtcctttttgccgacatatttgatatcaacaacatcgccatcctttacggcacgatctacttcttctttatttttgttgctgtccaaaacactctgaatgtactgatccaccatctcgtcggttacttctgccctggtaaccgtaacatcaacgcccttgtaatcgcccagctctacaaagtcgccaaggttgatgccatccagataagcttcgtccgggtataccttggtttcgctttcggtttctgttgctgcttctgtctcagctgttgtgctttcctgtacagttgtctcctgcacatctgtcttgccgcagcctgccagcatcatggcagacagagacactgccgtaacggctgtcataaattttttcataaattgatctcctcatcatcttacggacataaaatccatagtaaatagaattgcaatatcctatatattatcacacttggcgggctgttacaagaccggagacaacagtctgctgatttgctccttaaaccggatccagacagatctgctcttgtacatttcctttgtgatccgcgtacagcactttaagtcttccctgaaaatccgttccatttcccctgcgatattctggtcaaaaatcatggcattgacctcaaagttgagtgcgaagctccgaatatccatgttcgctgttccgtagcagcacgcctttccgtcaatggacaatccttttgcatgtaaaaaaccattatcataggtgtagcagttcgcccctgccatgatcagctcgccgacataggaaagtgtcgcccaatacacaaatggatgatccggcttgcacggaaacatcaaattgacctccacgccggacatcgttgccatcagaagcgccgtctggatcgattcatccggtataaaatacggcgtctgaatgtaaatgctcttttttgccttgtggatcagccgcaggtaattgtcccggatactctggagctcggagtccggtccgctggaaatgatctgcattttgacattgccggctttttcttccggcaggatgaaatacttcggattttcaaacagattctctctcgctgcatagtcccagtcctgaatatagcgcagcaaaagtccaccgactgcgctgccgcagattctcagatgggtatcccgccagtgcccgaacttcggatccagtccgatatactctttgccgatattaaagccgccgacataagccacttttccgtcgatgactgcaatttttctgtgatttctgtagtttacacgcagatgcagtctgccaaacagagccgggaaaaagaccgcaacatggatgccctgcttttccatttctttccaaaagtgctttccaacgctccgacagcccatcgcatcatacaagatccgaatttctacaccctgtgccgctttttccagcagtgcctcccgaatcctctggaagagcacgtcatcttttatgatgtaatattgtaaaaaaatataggattccgcatttttaatatcctcgatcagagcatcgaatttgtcgttgccgtcagtgaaaatctctaccgcattgtctccggaaatcatgcatccggcactttccaggttaaaaaagaccagatccgaaaaatccttcaaatccgggttttcctgctccagctcgcggcttttgacgctgtattcctggcggcgcaccgcatcgtttatctgctcctctattcctttgatcttgaacatcttccgcttgtgcatgtccgtcccggcgagaagatacattaaaaatcccagacccggcagcacattcaacgccagcagccacgcccacgctgactttgcttcctttctctggaagaaaataataataatcgcaagaaccagattgatccataccatatgtgcccatgtgtagcggaatacttcctgaaatgtttgccaaaactgcacccacgtcgtcattactgcctgttccttcctgtcagcagcgccgaaggcggcgctgtcctcattcaccaacgctcgcggactcgcgctccgcgcttcttcgcctgcttcgcaggccgtccgctcgctatccgcacgagaaaaacaaatgccgccttcggcgtcgcttgtttttctttctttatctcgctcgcggacccgcgctccgcgcttctttgcctgcttcgcaggccgtccgctcgctatccgcacgagaaaaacaaatgccgccttcggcgtcgcttgtttttctttcgtgctggatacattataccccaggtggctattaacttcaacaaaactccttgtacaataccgtaaattctgctagaatgttctataagaatgctaagcggacacaccgtacagacagcgccgctgtgcagtacaaagaaagaggaggattcaccactatgaaaacctgggcagtggtattgctggtcatccttgccattctgatcgtcgcagtcgttgttctttattttcttggaagaaagatgcagaaaaaacaggaagaacagcagcagcagattgaagcatataagcagaatgtgaccatgcttgtaattgacaagaaaatcatgaagctcaaagaagccggacttccgcagtcagtcatcgacaatacgccgaagatgatgcgccgttccaagcttccgattgtcaaggcaaaagtcggtccgcagatcgttaccttagtctgcgaccagaagattttcgacctggttcctgtgaaaaaagaagtcaaggcaaccgtcagcggcatctacttaacaagtgttaaggcggtccgcggaacgctggtgcagcccgagaatcagaaaaagaagaactggttcaagagaaacatcgaaaaactgcaggaaaaagcaggcgcaaagcctgtaaaataaattcgttacagttcactcgtacctttttgtaagcagatttcatgctcgcatgaaaatctgcttacaaaaaggtacggagggagcgccactttatgagcaaaaatgagctgcgaagcagcggagagcgtcgaatacacgcttttgcgaatggcgcgagtgaactgtaacataaatttcaaatgcaaaacgccgtaacatcctctcaatagagattgatgttacggcgtttttttcaccccactccccgcagcttcatcgtccagccgtgcacgcggcgcacggttttgggcgcaatcgtcagaagcgtcagataggctctgctctttttatccagcagcggatttttccgcgtatccgaaaaatgcccgcgcagatactgctttaccgatttgtaaaacacatccgtatccaccatccgtcccaccgggatgtgcagcagataatccaggcgctgaacgagtgcgaaacgcaccgcatattcccgaagctccgggtagcgctcccgggtcagctgctccatataatccgcattttctacgatatcctcaaacactctcgaaaaatcgtttttatctttccggcgcgtattgctcccgatccggtaaaaaacgtgatagagctgctccggcaagatccgcaccctttcgccctcacataaaagctcaaccagcaggcggaaatcctcattcagctttccctccgggaagcggtgaccttcaaacaggctctttttaatcagcttcgtacagaacgagcaatcgccctgatgcagcagcagcgttttcagaaaatcttctgccgtgcaggtaacttcctgttccggcggcgtacagacgtccggtcttttgtggtaatcctcgtcgatctcatcccgcgaagcctgcgcaattgaagtgcctgcagcggtcgcagcttcatacagcctttcatacatctgcggctcgatccagtcgtcgctgtccacaaacccgatccattttccctttgccatactgattccaaggtttcgcgcgctggaagaaccgccgttcggcttatggaaaacccggattctgtcatctttttcggcaagcaggtcacacagctttccggttccgtccgttgatccgtcatccaccagcaggatctcaagatttttccaggtctgtccacagatgctgttgacgcatcgctccaggcagtccaggatattgtagaccggcacgatcacgctgatcaggcagttttgttctgttttattctccatccaatcttccctcattatagctccagcgtgcggaaagcttcggcgcggcagagagcggtccatcctcccactccggcagctttccggctttccagccttcataaaattccaggcagcgctgcgccgcacattctgcattccatttttctgtaatcgtccggtatgcctcttttccaagcactgtgatctgctccggctgcgcgcacagctccaataccgtccgctcaaaggcttcataagagccgtccgggtagcttttgccgtttacgccgtcctcaatcaaaaacggaaccgcgccgatctgacggtttgccaccacacaacagccactgttcatcgcctcactgactactgcaccccagccttccagatagttgcttgtaaacacatgcagctggcagcgtttcatcaggcttcgaacctcctgcggctttaaaaatccatgaaaaacgattttctctgccactccgagcgctgctgcttcctgcttcagcgcctcttccatcggaccgcctcccgcaaagtgcagttcaaacgaatacccctgttcctttaattttccagccaacttcactgcaaactccgggtgctttaacgaaatcatccgtcccgcccagacgatttgcagtttatccgtattctttttggcaaacaattcctcctgcggacagcgcagcgtctccggaaaatagccgaatttcagctttttcccgggataagccccgatcagtgaaaaatccgacgccacatacgcgccgcagcacaaaagccacaccggctggtttcgaaaccggatatgttctttatattttgcaagcagccccttcggagagatcgctttccactgcccctcgcggtaaatccgctcgctcacccgaaacgtcagctttcccgaggaaagccgcggtaaaaccagatccagccgcttcgtccagcctgcaaacaccagatccgcttcctcgatcagcttccggcagcgttcttcctcccgatccgcccaaacaacatatggcagagtcgctgcatccagtccccagcccatcgcaatccgttcttcttccatcggctcggtctggatgaaatggtaatcgtcccccagttgttcatacagtgcgttggaaaacggaatctgatgatgattgatataattggaaataaaaacagccttcacgttttcctccattcccgccttcctgctccggtcagcagcttcgttcattcgatgctttgataaatttctatcagtttttgataattgttttcaccgttgtaaagcttcgccgcagtcttccgttccgaagccgacaactcctttgccagctgtttatctgtcaaaatccggctgacacacgcggcaagctcgtgtatgtttcctttttcaaacaacagaccacttacgccgtcttttacaacatccgggattccgccggttctgctcgccgccacgggcacgccaagaagctgcccttctgccacggaattcggggaattttccaccgcagacggacacacaaatatctgcgcggacaaatattcccgcttcatctcctccgcggaaagatttcccagcacacgcacttttccttcgaggcgattcttcaaaatcagcctgcgcagatattttccatatgccgaaatcttgattctgctctttattccgtttacgccgagcacgctgatgcccgccaccttgatatgcgcctcgggacagttttgcaggatttcctgcatcgcctgcaatagatagtgaaagccctttaacgggtaatctccctgactgataaagatttctccgggcacagttttttcgatctcccagcatccgctgtagaactgtgggcgcattgtctcgttcatggtatgataaacaagggatggatttatctccaaactgatcgttttatcgaatgttgtccgtcccgttacatgtccgactgacaacaggagttttttctcgttttccgcgcgctgataaaacttttcctgctgctgccggatgctgtccttttttaaaatatctcgcagtgtcctgctgttctgtacattttccgggagatctgccatgtagttgtccgcgcaggaaatacaaagtccctgcaagcccacaagcgtccgctccggtctgtgaaatactttcgcacaggcatagccatgcgggaactccgtcccgaaaatatgcaccatatccggctgaaagtcctctaaaatctgtaaaaaacgcgcttccatcgcgctgtcatagcgctccgggtgctctaaatcctctgcaaagccatagcaggcgacttcttttttataactgccaagctgcagacgctgcgatagctcctccctgcccggtgcaaccggaaatgcgatgccgagcgtcagtgcagccgcagtttcggctccctgctgccgtccgccgggcgatgcagcgctgtctgtcacgtccgctgcactcagttctgcgccgttctccgtctccagataccgccccagtatcccggacagccagccctcccgcacgctatactcctgcgaaagcgcctgcgcgattaccgggagcatgatattacatacccataacactctcatttccgattctcccccggttcgtccttatggccgcaccttctgtaaattttcgccttgatcccgttgtaccactcggaatatttttcgtcctctgcaagctttgtccgaagtggtgctagtgtcagaagcatcagcagcttataacgcagcgccttgtcgcgtccgagatagcgtttcgtgatttcggcatgctctttttcggaaatccgacggttctcccttgtctcggaaaagcccccgccctcgtaatccgcaacaatcatctccacataaaccgcttccgctttccgatcgtaaatacagtacaggaaatgctcgtaatctgcgcggacacggtattttacgtcataaccacgctctgcaaacagacggacgtcgtaaaagcaaacctgatgacagggcacatttctgtaacaggtaaaatcattgacctccggtgcagaatagatcacgctgccccacgcctcatgatattgatttccataaaaaatccgctctttttccttatgtcccaggctttcctcgtcggctcctctgctgcgcttacgctccatcacagctgcaagccgttccagcaccatatcgtcgtgtaaaagatctccgcaatttaaaaactggacaaactgaccggtcacataggacatcgcctgattcatcgcgtcataaatcccactgtccggtcttgtataaacccggattctgctgtccgccggaagttgttccagggagccgtccgtcgaaccgccgtcctttaccacaatttcataatttccgtatttctggttcaatacgctctgcaccgtcttcaacagcttttcgccggggtttaagcatactaccacaatgctaaaagaaatctgcgccattgatccactccttatccgtaaaaatccaggtcttatagggaagcacgcgcatcccgcttccggatgccgtttttaaaaaccacaaaaaataccccagacatacgatccccacaagtgctgttaaaatatttttccgcttccggttctccacacagccaagcagtcccggaatgagcagcagttgcggcgtaatcatataataggacattctcgataccagcggcaaaaacgaaccgcaggtataaaacagcagtccgaaaaaatttaatttcaggcagaaacggttctgctccttttccattccacacctgccaaccactgccgccagcataaaaacgagcacgcaccggaggattccggacgcattcgctttcagaccgatatcctgtgacagatatacggtgtccctgtatgtaggataccacgtcagcgccagatttaaaagcggacgctggaaaacaaaaccgatccctccgatcacagtcagcgccggcgcaatccattttttccacggaagcacagccaacaaatacagcggaagcaccatcagaacagatttatgaaacagcgccacaatgccaatccagatcacgaaacagccatactgcctgcgcagtacaaaccggattccatacagtgctgccgcaagtgccagataataacgcaccgtcgtaaatgtccgaaaatatacgcccagcagcatgaacatcgcgaagctctgccagaagcagtcactctgctcatacagcgcctttaaaaacaaaaaagctgtaaccgcaccgaacaccgcgaataccagcagataattttcatacccggaaatcgtataaatcagccataccacgaaattgaatcctgcttctgtcaccacatacgcctgatcggttcccgcccagatttcgtggaaattctcgacatatttgccgtaatcgttaccgacctccagacgcagcgcactcacgcccgccagaatcaggaaaatagccgtgagacacacgatgtcgaaggcgcgacttcgggaaacgcccgccgaaaacaagccgccgccggatgatgagatgccgcaggcgtgcctgccattcccggatgccgcactctcggcggcttgtccagcgcacagcccagcactgcctgcctcttgccccgtgcgcgtccagaccgcgtccatcacccccgcgagggcaatcgtaaccgctgtaatcagaaaataaaataccatttacagccctccctttgcgtcgcggattccggacagaagcgcttttttcgcctcatcaaaggtcagcccctccgggcagctctcagaattcatattggatttatttttcagcagaaaccgaaatcccatcaccgccgccagctttccatacagcacatgatacaaaacgcccctgtcgtgaaaaaatttgcggtcaaagccgaaaaaccaggttgacggtctgggctgttcttctccgatttcgaccggaatgctgtagactttcagcccggctttcaggcagtcgtggataaacaagctgtcctctccgtttgcatatttcgcgccgccgccgaacaacaaagaataggtcagattcttttcgtgcatcttcgccgtacgcagtgcaaagctgtatgccggataacgaccgcagttataccacctcacccgcttataaaacgaattccagtaggtaaagcggctctcctgcacgcgcacattgaatagcagcatgtccgcctccggatgctgctcaaacccttcgataatccgctcaactgcaccatcgtcataaacgatatcttcatcagaaaagaggcacaggtcggcgtccgcacgcagaagcgcgttgttgcgcgacagcccgacaccccgctccgccagatgatagcagcggatctgatgaccgtcctgcgtccattcttcgtaacggttttcgttacactgattgatgagaattgtatccgcctgcagattcattttctctgccagcgacttgacctcctgattcagggaggaaaccagaatctgcagtttcatgagctgtctcctttgtttcttgtaatcctgcgccagttcacccgcgccattcgtagcagtctgtaggcaaattctcatgcgagcatggaatctgcctacaggcttccacgagtgaactggcagcctacattctgtagtaagcgtgcaaaaaccgtgcgtccgcgtccgtgaggatcacgcccacaaccgcgatctcccgctgagcaagcagatcgagggcaagtccgagttttttaatacagggtgtgttccagcgaaccaaaaggataagcggaattttttcttcttctccaagccccatcgtcccggaaagcaccgtgtccagcgaaatttcctgaaaagcggtctgagacgctttggctctcagctgcgcatccagaagcgcaccgaactgttcatctggctttgccgttcggtagccgagaaccggaattgcgcagcgtttttccacgtctgagctgagcaaaacggaatcgtccagaacataccagactgccacgcccaggattccggcaagcagtccgagcaccagaccgagcaccgccgcatttttcactttattttccggaagcaccgcctgtgcgggaacggttttccacacttcaattgtcgtcagaccgcgtccctgcatcgtctgtccaaatgccgtcatggcgcggttataagctgccgcaatccggtcggaaagtgctgcgtcctctgtcgtaaagtacgccgtcagaaattccgggtccgacgcgatttctgtgctgatcgaagcctcaatcacggatcgttccacgtccggcagctgcaaaagcaccgtatccatcacgcggtcggagcgcatcatatccccccaagtataggcgttatattcgttgataaattcttttaaaacctcgtcatcctcgtcgatgtcatagacgatcgaatataaaacctccgaccgatactgcttcggccccatcgtcagctgccgcacaccaagataaatccccgcagcaaaaacagcgctagccaaagctgccgccagacagatccatattttatgaatacaacagagggcaaagcgtttttcgtccatgccctctttccaaaatgcttcatctcttttcagaggcattatttttcttcctcctgcacctgttttttcatggcggtcacctgcttctcgtccacgccctccgtgctgtcgggcgtaaacaggattttcaatgtcagaagcatcaacttcaagtccagccatacggaataattctcaatataaaacagatccagcttcagcttgtcatacggcgttgtattgtactttccgtatacctgcgcatatcccgcaagcccggccttcactctggtacggtatgcgaactccggcatttcttctatatattcgcggatgatctgcggccgctccggtctgggaccgataaaggacatctcgccctttaaaatgttgaacagctgcggcagctcgtcgatacgaaccgcacggataaatttgcccaccggcgtaatccgggaatcgtttttggcggcaagccgcgccacaccgtccttttctgcatccacgcgcatgctgcggaatttcagaatataaaattctttcgcatccttcgtgcagcggacctgcctgtacagcacaggacctttatcatacagcttgatcaccaccgccgtaatcagcatgatcggcgatgtcacaacaatcaggatcagcgaacataccacatcgataaaccgttttgcaattctctgttctacgctcagcgcatattccctcgtcagcagaatcggcgtatcaaacaagtgcagctgctcgcttccctttaccagcacatccggaatcttcggcatcatataaacgcggatcgaatggctatagcaatatttgagcagcacgtttctgtccatcgtatgaatatcccagagaacgaccgcatcatactttccgacctcgcggatcaccgcatcgtacccctctttgatattcatgcactttgcaacatgatatttatccttccgtcctgcaaatttcccaaggatatcctctaccgggcgctcaccgtgcaccaaaagcagctcccgcggaggaaacgcgcgacggtaaatcagattacacagccagccccacagccctgcaaacaccagctgatacagcatcatcgacaccatatgccccccgccgatgataaaccagccgtacatcagggacagctgcgcatagctgattacattgacgcacagaagagaaaacagctgagacaggaaaatatccagcggtttcagatagccgattttgagtgctccataagtattggaaaagaaaaagagcaatatgaaatacagtgcaacaatcagcaaatgaccgtttacattaaaacggttatgtgttttccatgcaatatgatgataataataggcgaaccagtcgtgcgcataaaaagcagtcagcacgcacagtccaatcagcccaagcgccagaataatcagccgcttgacagaatcgtttttcttcatcttccgttctcccgctatattcttctccacacagcgcgcaccgcccacatacaaaaacatgctgcgcttgcgatcaccgacattttttcctgtttccggtaaagtccccagattcttgtaatcgcccggagcttgttcgaggaaagggatttttccggtcttctgtagatcaccaaattttcctttaacccgtaagcgacgtgtccgtttcttaaaatctgccaccacatcgccgtgtcctcgctcggcacgtccggcatctgcaaaagcgccttgtcaattttttcacagtcaaacagcaccgtgctcgtaaaaatgaccgtccggctgagcgctttctgataagtcaactgatcgggaacccgcacgattttgccggttccgaccgcatgctcgtctccaaattcatacgagcaaaatacaaaggctgcgtctttttcccgcaaaaaagccatttcccgttccagcttgtccacccgccagatatcgtccgcatccataaatgcgagataacgtccatttgcatgtgctgtcccgaaatttcttgcatttgccgcgccctttaccccgtccgtctgggaaagaagccgaattcgcgcgtcttttctgcagatttctgacacaagacctgcgctcccgtccgtagaatgatcgtctaccaccagcagctcccagtccgtccatgtctggcggcgaaccgattccagcgcttcctccagatacgcctgggcgttaaaaaccggcatcacaatgctgattaggttctcataattcattacagttcttcctttaccagataaatcggacgctttttcacttccagataggtcttggacagatactgtcccacgattcccaggcagaaaagctgcacgccggaaaccaacagaataatacataccatcgacggccagccgggcgtcggatcatggtaaatcaggtttttgataatcagggcaatgatcgccacaaatgctataatgcagaacacaacgcccatgatagacgaaattgccagcggcactgttgaaaatgcggtaattccatccagcgaatacaaaaacagcttccagaagctccattttgtctcgccgtgggtgcgttccacgttttcatactccagccacttcgtctcatagccgacccagccgaaaattcctttcgtaaaacggttatattcgcacatcgaaagaatcgaatccacaacctgtctcgtcatcaggcgatagtcgcgtgcgccgtccacgatctccgttttggaaattttattcatgatgcggtaaaacatccttgcaaaaaacgaccggatcggaggttcgccttttcgggtcacacgtcttgtcgccacactgtcgtagccctgcttaatgtaggaaaacatctccggtaaaagtgacggaggatcctgcagatcagcgtccatcatcacgacatagtccccctttgctttctggaagcccgcataaattccggcttccttgccaaagttgcgggaaaaggacaccaaatgcacccgttcatccttttcgtgaagcttccgaacctccgctgcggtattgtccttggaaccatcatcaatataaataatttccagctccagtttttcctgctccaaaaaagcggaatttttcatcatttcctcataaaaaatcggaacgttttcctcttcattatagcaaggtacgattacgctcagtaacatgttttcctctcattcctgcgcacgctttttgcgcatgccgagtttgtgtcaagcgcacgcagacacaaatctcgtgattgaaaaattttatttttcaattttctctcctgtagttgcgtccattcttatcttgtccgcaattctcgctatgtattcgctgtttgtcggcctcggcgcgcccgtctcccggctgaacccgaacagatcctcaaacacctccggattgccccgttcccaggacacctccaccgcgtttcggatcgcgcgttccacccgctgaagcgttgttttgtaacgccttgcgatcaccggatataacagcttcgtcacgctgccaaccagttccatatccgagacagccagcaaaaccgcctccctcagataataatatcccctcaaatgcgccggaatcccaagttccagcataaacgccgatatctcccgctccgtttcgagtgtttctttccattctgcagccatttctgattcctcctctgagtcttttttccgcaccaacagtgtgaccgcactgtgaacattctgccgctgctttctactttattctaacactcagattttggaaaccaaacggaaaacggtcgtgatatttcgcgttttttcgccgtttaaagccgttccgtcctgccttctttttccagcgtctcaacgacttccttgacgcgctgtgcctgatcgacagggcagaccagaatcgaatccctgccctctacgatgaccagattttcaacgccgaccgcggcgatcagctttttaccgccgtatacaacgcagtttttcgcgtccagaagcagcgtatcgccggagctgatgttaccggcagcatcccgggtgcgcactgcatccagcgtatcccagctgccaacatcgttccagccgaaatctccttccagcatcagaacaccctttgcgcgctccataatgccgtaatccacggaaatcttcgggatggtcggataaacctcatgcagaacctcctgctctttttctgtgccgagcgctgccccgatctgtttcagacaggcgtacacatccggcagaagttcttcgaaatagtgaagaatcgtggaggctttccagacaaacatgccgctgttccacgcataactgccggatgccagatagcttttcgccgtttccaaatccggtttttccacaaattcttctaccttacgccatacttttccagcctcttccacgctgcggatataaccatagccggtcgagggaaacgtcggatgaatcccgatcgtcacaagtgcgtccgtctcttccactgcacgaaccgcttctttcatcacgcgggtgtattccgcctcatcacggatataagcgtccgccgcaaaaatgcacatcacgccgtcaccgtatttatgcagaatttccattgccgcataaccgatacacgctgctgtattgcgcgccgcaggctctgccagaatatgatctgccgcaattctgcctgctgtgcgctccttcatcatctttgcctgtgtctcattggtcacaataaaaatgtccttctgatccatcaggtcatgctgtctgtcgatcgtctcgttaaccagaatatctttgccggacaggtttaaaaactgtttcggctctgcctttgtactcagcggccagaaacgggttccgcccccgcctgccataattacgccataggttttcatgttgtatttcctttctgaaatgctgcgcttccgtcagcccattccatgcatttttacaaatccttttcggctttttccggatcgcttctattttgccggatcatttcggctttttccggaagccgtcccgaatcgagttgccccgcagctcgatatcctgtacgattggggatgacgggaatttgttatacccgatctgccctctgtccgtcggcacatagatcgtcacaccatccacctcgtacatctctgcagatccatctacataatcctgctgccacagataatacggctcatatgccagctcccgaaccatctgtatcagattataccccttataggtaaaaaatgctaccagcaatcccacaaatgcccaatatccggcatttttcaaccatttacgcccattgtgtccctgttctgaaccagccagcttttccgccgccatacaatacaggcttccaaacaccgtcagcggcaaaaacaacacataaaaatatccgtaccgcaccagcggcgccccgagctgccagaagaaaaaaccgaccactgcacacagctgaagcagggaaaaacacaagggcgtaagatgtgcgactcggcgggcgggcaagggtgcgccgatttctcgttcagacacagcgccgtccacatggggcgcgactgtcacctggcctgctctgactgcgcgcacagctccgagcaccgccagcactgcactcaccgggatcgctgcccagcctgccagcaccagaagcttatcgaatccagcctgcgctgcaaaccagttcggcagccactgcttcaacggctgatccagctgataaacattgtaaatctcccgcgcatatgcctggatttcctttgcgtcgctgtccgcatagcctttggaaattttccagtctaccggaaaccagtccaaaaacgtaaacggataaaacagccagccggaaatcagcacattccgcgccagatacggaaatgcaatcagaagtcccagcgcaatatagcctgcaatctgcagccattttttctgcctaagcagcaacaccgccggatacagaaccagaagcaaaattaccgctgtggacagcttcaccgtcgccgcatacaccagatacaggctcagcagcgcgtaaggcacagtttgcttttccccgatgggacagtccctttcctgctcccacagttccacccaggtcattattacccagaataaaaccaacattgcaaaataatcggacgccggggaaaccatctcccggaacactgctatcagataaaagatcccgccgatagataaaaaatccgatattcgcactttttttcgtttccaaaatgccataagccctgccgcgcatttacacgcgcacagcagcgcaaaaaatccagccacgcagtgcatcggccgtccgatcagccacgtctcgctaaagaaggcgctgagtgcaaaggaagcgctgttgtaaccgaaccggctgtgcagattcgcaagccccggcacaactccgtactcttcgatccatcgaattgcctgtgcatgatacagtcccgtatcgtagtgcatatagcccctcgacgagccatatgcaaataaaagcgtcagaccggcatacagcagccagacggctttgttttttttgcgccaaaggctttttgagttttcaatcccttcgtcgcttctttccgtttttttctgacatgcctgtattttcgaaattttgaaaaaatccgccaaatcccgacgcagcagcattccgccgatgaccgcagcaaaaacggcaatcaggcttgcccagaagccaacgccggcaaacaggctgaaatactctgcatacacattcaatacgagcagccccgccatcatataggttactgcgctatgaatctgacaaccgcccttttttcgaaacggtgcaagacacgcaaagcccatcagaaacgacaacgtcgccatatacgcccattccattaaaatcattatcataattttgatacccctgtctgatgcattaaatgtaccattgcccccatttcatgtcaaggaaatggaggcgctccattttccgggtaattttcttgcttttttccctcactgacactaaactgaatccatatacagatcaaaatcgtaactgttcagtaccctcacagatacgcgcaaaaatccattccaaatcggctatgccgataggatttttgccttctagtctgagttttcctacggtcagcgcagtaaatgcgcagacctactgaacagttactcaaaatcattcattgctttccaggaggactcctatcttatgactaatatgactaatataatttcattccagaagcccggtatcactcggattactgcagcgttttttgcagcctttgcactatgcgatatcggttccatccatccggcagatattttttctgtcctgatctttgcaggcatgctcctccttttttctccaacgctgacgcaaaggctgacgaatatcggagcagcttcttctgtgcttccgcgccatttttatccaatatgcagacttctcgcagttctctacaccttattttatgcagcagcaaagcatgctgaactgtccggcagctttgacagccgcatattcaggcttgcattcctggcggctgcggttatcggtctgtattttatattcttccgattctgtgaactgtccatgctgtttcttgcatccagacagcagcggcgttttgcccaaaacactttgcagcagcctgacggtgcatgtcctgtacccccagccatatctgcagcgcatgccctgtcccgcaaacagaagctgctctgttacttcggtctgctcttctgctggctgttctggtttctgtaccagtttcccggtgttctgaccccggacagcatcagccagttttcccaggctaccggcctgatcccgttcagtaaccaccacccgatcctgcacacgcttttgttctccctgttttaccatatcggattttttctgaccggaagcataaacaccggaatcgcctgttatgtattgttccagatgtgcactatggccgctattgaaacctatacgctatccctcctcgcaagatcaggcgcttcacgcctctggctgattctgtctttttgtttctgggggctcgttccatttcacgcaatttttgccgtaaccgtctggaaagatattcttttttccggatttatgctgttatatctttgctttttatatgaactgctctgcaacccggataaccgtccggacatttgggcagggctttccctttccggctttttcgtctgcaccctgcgttcaaacgggctttatatcttcctgttcaccctcccgtttgttctgttcgcatttcgccggacatggaaaaaaatgtttgccgtgcaggccggcatactccttttatccctgatcatcaccggccctgtatacactgcctgtcatgttgagcgcgcttcctttacagaatccctctccattcctctgcagcagattgcctgtgtcgtttctaacggtcgacagctgagcccagagcaggaaatgctcatcgatgatgtagtcgatacttccctgattccggagtattacaatccggtgatctccgatcccatcaaggcactcgtctcctacaaccatgccgatgcgatcatccggaatccttcaaaatatttcaccctctggattcagctcggtatttcttacccgggcgactatctccaggcctttatcgatcagacaaaaggatactggttccccgccccggctgctttacgcacgaatgaagggatttctccgaacgaaatcggactttcctggccgcatcttctgcggggtcagtttccggtcaaaatcagtgaaattcttttaaagcttcctgatatgcttccggtttacggtattttgtggagcatcggcgcgtacttctgggctgtcctgtattttgccgcatatcagtttttatacggacagcggcggtttctcgtgctctttgtaccgtttatcggaactgtacttaccctgcttctggcaactcctgtcgcctccgatctgcgctacgcttatccgctcatccttgccgcgccgtttttcattgcgctgccgtattgccatcttcaaacctcccgtctgcaaaaatgagatgggaaacgttgtaaaactgacaaaaaaagtgtaaaataaaaaatcaggggatggcattttgcctaatttagtttccaaagagaaagaggtattttatggacttttttaacgcactgattcacaacacggtttttatgtccgcagttacggggtggttcgctgcacaggtcatcaaaacagtgatttatacctgtatcaccaaaagctttgatccggaacgtttagtcggaagcggcggcatgcccagctcccattccgccactgtctgcgcactcgcaaccgcatccggaatgcaatacggcggcggcagctttgaattcgccattgccgctattgtagcgattatcgttatgtatgatgccagaggggtgcgccgggaaaccggtctccaggcacaggtcatcaatgaaatgatggaattctgggaaaagatggggcagccgatctcctacgaagaaaagctcaaggaattcgtcggccatacccctttacaggtgtttgtcggcgcgctgctcggcatcctgatcgccgtattgtacggcctgttcctcggttaaatctttatctgcttgcgccttcctgcagacaactttcgtgtctgtaggaaggcgcatctgcgttataacgttttttcccgtaaaaatctgccctcctgacacagaattttcacagttattctgtatagtgataactaagaaatttgatggaggacataaaatgagccaacaaaaagtagaccgttataaacaggaaaaagcgcatcgcaaagaacgtctggagaaggaaaagaaacgaaaaaagctccttcgcatctgcagttatttcgtacttgcagtaatcgtacttgcgattgcttttgcaatttaccgccactatactcccaagacagagacgccggcagaaacagaaaccactgtcgaaagcgtaatcgaaacaactacagctgaagaaagcactatagaagaaggcactgtagaagaaagtaccgcagccaaaacagaggacacagatacggaaagcacctctgaagaaaccgctgatatagaaagcgctgcagaagaaacagatgcggctggcacggaaagcactgcagctgatggggaagcagcccaggcggaaagcgttgctgagtaaaacgattatcatgaaaaaactcccatttccggtgacaaatggagaatgattccttcttcatttgccaccggaacgggagtctttttattcctgataatagcatgctcacagagcacgcattactttcttgctatcaaatacaggtcacaatacagcagctctctgatcttttccatcttcacatcaccgcccattccatctgcaacagcctgcagcgcctcctcagtctgctccattctggaaacatatacaagcacctgatccgcctgccggattgtatcatcctccacagtcgaaacatctgcaaggctcgcaaaataaatttcatcatactgcatcagctccagtgaatcgtcccagatcatccaggtcaggttgggattataaaaataaacgaccggtttctctttatgctcctgcgcaaacgcgatactttctgtgtcctcttcataaagaaacagcacctttccatccgccagccctcgaatctgtcctgttgccagcaccagaaataccatcagaagtacatagccggctgctttatcgtgcacggaccgttttcccggagcagatgtatctctggtatcgctgattttccccgcagcattttttacagcagtcccttttctcatagtcaatacaaaaagcttctgtccgagcagtacaaatataaccatcatcagcagcaaaatcagcccgtagatcggaatctgatatcggttcgcttcctccgccgtcaggagcgctgttttggtcacgacaagaaaataaccgagtactgctgccgccggaatccagaaaacacgccgtgcttcccagaatgattcgcgggaagcgtcagcctgccggttcgaattttcctgcgcggctgcgtactcttctgtctgttgcccagatttctgcgcggctgcgtgctctgctgtctgctgcccagatttctgcgcagtcgcagcgacagctttccgtccggctttcatccgtccaattccccagaccgtcagcgccatcaggacaagcagcagaacaaatccgtacagcatcgacccgaaggcatattcattgagcagtcctgcgaagaaccggaatcttccaagcgtattgccaaggtcgaagaacgcacccatcgcttccgtcccccggtatccccgaaaaatatggctcagacacgccggatagctgactacggcaagtagcatcgctccgatcacagcagtcgcataaatgaggcagtctttccatttctgcccccagcttttctgctctgcacgttccaacagcagatacagctccatcgccgctgccaggaaaaacagataaacagcaaaatagtaatgcgtcagaaaaccaagataaacaaccgccatcagcggcagataaaaggaaaacccgcgttttctctcctgcaggctttttacatgcagccaggtcacgagcaaaatccacagagccagaagcatatacattcgaaccagcataacgccggaataaaccgccgggttaaaaccatacaggaggcacactccgaaaatcatcactcgcgtaatacgctccggaacgtccgccgccgttacacaggtctgcgctttcccaccaggcgcagccgcgctcctcagcgcacccatcacaatccgccgcgtcagcttcgccagcacactccagctcagaacgaaaagcactatattcagtccaattcctgaccatttgctgaaccttccgggaaacagcgagcataccgtatgcagcagcagatagtaaaacggcggatgcacgtcataggtctgcatgcgcgtaaccgtcccatactgaaaccgctgccccggcagaacccggaattcgtctacaatctcgctgcccggcttccactcccggtcggtcggcaccagaccgatcgacacgttggaggaataataggaataatattcatcataatggaaccctgcttttttacttccaaaataaaaaatcgcaatcagctgcaccaaaagcagcataccaaggatcagataccagtttcgtttcttcacattccctcctgcccgcagacgcagatttatgttctgcagttctatcatacgttgttttttgataaaca

SEQ ID NO: 838 - DNA, 22379 bp, unidentified
  source 1..22379: mol_type = unassigned DNA
atgaatacaaaagatgtgatcctggagctccgcacgaaaaaaggcctgtcgcaggacgagctggcggagaaggtctatgtgacccggcaggccgtctcccgctgggaaaccggcgagacggtcccgaacaccgagacgctgaagctgctctcgcgcttttttgacgtctcgatcaacacgctgctcggtgcgccgcggcagctcatctgccagtgctgcggcatgccgctcgaagacgggaacatgagccgcgaaccggacggctcgttcaacgaggattactgcaagtggtgctatacggacggcgcattcacgtatcagagcatggatgcgctgatcgatttctgcgcggcccacatggcaaacgatgcctttccgcccgtccgggtccgcgcctacctgcaggacctgctgccgaagctcaagcactggcagatcgccgagaacaaataaccacaagatctatcccatctggagtcaacaaacatgatcgataccatgctcgtccggggcgcaaaagtccataatctcaaaaatatcgacgtcgagatcccactgggcaagatcgtcggcatcgccggcgtgtccggctcgggaaaatcctcgctggcgctgggtgtcctgtacgccgagggttcgcgccggtatctcgaggcgctttctacctacacccgccgaagaatgacgcaggcgtcgaaggcctgcgtggacgaggtgctgcatgtccccgccgccctggccctgcaccagcgccccggcgtgccgggcatccgcagcaccttcggcacgggcacggagctgctgagcagtctgcgcctgatgtactcccgccttgccagccaccgctgcccgaacgggcatgaactcgcgccgtcgctgctcgttgcagccggaaaggagctcgtctgcccgacgtgcggcgcgcatttttatgcgccgtcggctgaggagctggcgttcaactcacagggcgcgtgccagacctgcggcggcaccggcgtcgtccgcacggtcgatcttgatacactggtgccggacgactccctgaccatcgacgagggcgcggtcgccccgtggaacagcctgatgtggtccttgatgacggatatctgccgcgcgatgggcgtgcgcaccgacgtgcccttccgcgacctgacggaacaggaaaaggacatcgtctaccacggtccggccgagaagaagcacatcctctaccacgcaaaaaaggccggctccaacgactttgccgagctggatttcacgtattataacgccgtctacaccgtggagaatgccctagcaaaggtcaaggacgagaagggaatgaagcgggtggaaaaattcctgaaggaagatgtctgcccggactgccgcggcacgcgcctgtccgccgccgcccgtgcgccgaaggtgcgcggcatttcgctggacgaagcctgcacgatgacgctcgcgcagctggtcgaatgggtgcagggcgtcccggccagcttaccggaggacatgcgcccgatggccgagagcatctgcgaggcgttccagagtaccgccaaacggctcatggacctgggactcggttacctgacgctcgaccgctcggctgccacgctctccaccggcgagcgccagcggatgcagctggcccgtgccgcgcgcaaccgcacgacgggcgtcctctacgtgctggatgagccgtccatcggtctgcacccgtccaacatcgtcggcctcaccggcgtgatgcacgatctggtggatgacggcaactccgtcattctggtcgaccacgacacgcagatcttaaaggaagccgactggatcgtagagatgggtccggaagcgggcgcgaagggcggacacgtcatcgcgcaggggacgatcccggcgatcgaggaaaaccccgcgtcccagatcggtcccttcctctccggaaaagccgagacggagctgcggccccgggcggcgaaggaagctgtgtttgcagatgggaccatgcatctgtccacgtctcagatccataccgtcaagccgctggaggtcgagatcccgaagggacggctgaccgtcgtcaccggtgtgtccggctccggcaagaccaccatggtgctcgagagcctcattcccgctctggaggcaagcatcagcggcagcgccctgcccgcgcatatccgcgcagtcaaagccgacggtattgcgcatgtcaagctcatcgacgccacgcccatcggcatcaatgtccgctcgacggtcgccacctacgcgggcgtccacgacgagctgcggaagctgtatgcgagatctgccgacgcaaaggaaaggggctatcaggcgagcgacttttcctacaacaccggctccctccgctgccccggctgtgacgggacgggcgaggtgagtctggacgtgcagttcctgccggacgtcaacatcccgtgccccgactgccgcggctcgcgctacgcaagagccgcttatgatgtgaagctcgcaaataagaccggcaaatgcgtgtccctgccggagcttatggacatggatgtagcttccgcgcttgacttctgcagggatatgaagaccgtcagccagaagcttggcattctgaagcggctcggcctcggctatctgacgctcggcgaggaaacgccgagcctctccggcggcgaagcgcagcggctgaagcttgcgagcgagatcggcaaaacgcagaccgattccgtcttcgttttcgacgagccgtccatcggcctgcacccgctggacgtgcgggtgctgctcggcgtctttcaggcgctgctggacagcggcgcgacggtcgtcgtcatcgagcacgatctggacgtcatccgcaatgccgatcacatcatcgacatgggccccggcggcggagacgccggcggccgcatcattgcagccggtacgccggacgagatccggcaggatcccgccagcgtcaccggccggtatctgtaaaaccagaaaaggaggccagcagcatggaattgcctgcctgtccggtagagacgacgctgatgctcatcggcgataagtggaaggtgctgatcctgcgcgatctgatgagcgggacgaagcgcttcggcgagctgaaaaagtccatcggtcacgtcacgcagaaggtcctgaccgcgcagctgcgcgatatggaggccaaaggcctgctcacgcgcaaggtctacgccgaggtaccgccgcgcgtggaatataccctgaccgctaccggctacagcctgcggcccatcctcgactctatggtggcctggggcacggattatcagaagcaaaacggaggcgcaccatgcgatccataagacggcctgcacggccgagatcgccgcaaagatcccctgcacgcaggtccttgggacctataccgtgacctttgaccgctgaaagagaggagacctctatgccatatccctggatcgacgactatctcctgcagaagcccagtgtcacaaaggacctgcagccggactggaactggatccgctatcagatcggcggcaaactgttcgccgccgtctgcctggacgatcaggaccagccgtattacatcaccctgaagctcgaccccgccgagggagacttcctccgcgggcagtatgaagacatcctgcccggctactacatgaacaagacccactggaactccgtccgcgcgcagggctccgtccctgacgatctgctgagaaacctcctcgacgaagcctaccgcctggtcctccgcgccctccccaaaaagaaacaacgggagatcacaggcgaataaagaaaagcatgagctgctgcgaaaaaggcaccggggctatttgccccggtgcttttcctttcgtttctgctgccggcaggtaaagcggcgctgcttttcttcttcccgctgctcgcgcgagcgggtctgcttttcaagcttctgcgcctcgcgctgcagctgcagcgcctgctgtgaccgggtgccgactgtgccggcggcggtctgcttccggatctggcgctgcatccgcttcggatttgccgcgtccggccggatggccgcggcaacagacggactgaaccgcagacggctgtggtttttcagcacgtaggccaggacctcatagtccttcggctccgcgccgaaggtgaccttgcagaccgaaagcgtattgccttcgatccgctcaaagatcccgacccagaacggcgcctcaaacaaaaccgtcagtctggtcaaattgctgtccataacgaaaccctcctgaaaagaaattccgcaggaacggacgacccggaggggagggttacttacctgcgccgcgcgggcgcagacggctgggctacctaccagctctggcggaccaaagactcagcccacgttgcgtttttatcctgcgattatattaggcgcagatctgcgcgtaataccggattcagcggccgaacagagcggcggcctgctccatgcgccgggcgatcggcacgccgaacggacagcgcgcttcgcacgcatggcagccgatgcattcggaggccgtatgccccagcagctcgtagtgcgactggatggtcgccgggacctcgggctgcatggtcgcaagatcgtagaatttgttgatcatcgcgatatccagctccgcggcgcacggcttgcagtgcccgcagtaggtgcactggccgcggtaggagtggaacggcgcgttggcgagcaccgacgcgtagtccttttcctcggccgacgcggtctcgtaggcgacggccgcgtcgacctgctccttcgtgtcgtagccgcacaggatggaacagaccgccgggcgcgtcagcgcgtaatggatgcactgcaccggcgtcagacagacgccgaacggcgagcgtttctcatcgaacagccgcccgcccgcgaagcccttcatgaccgtgatgccgacatcgttctgctcacagacgctgtacagatgtgcgcgcgccgcgtcgatgcctttgagccccgcgtcaaagcgctcggcgaacatcgtgtcgatatcctcgctcgccgggagcatgtcgaaggccgggttgacgctgaacaaaatcatttccacgaagccggactccgccgccttcaccgcgaccttcgggttgtgcgagctgaggccgatgtggcggatgacgccggtctttttgagctccatcacgtaggaaagatagtcggagtgcaggatctgctcccactcctcctcggagtccacgtagtggatcatgccgaggtcgatgtaatcggtctgcaggcgcgtcagcagatcctcgaacgccgggcgcacatagatcagatcgcgcgtgcggtaatactgcccgttcttccacgtcgagccgagatggccctgaatgtaccagtgggcgcggtcgtcccggatgcccagaccgatgatgtcccgggacttcgggtccggcatccaacagtcaagaatgttgatgccggcgtcggcggcgtaatggatcagctccacaccttcttcctccggatggcgctcgagccattccgcgccgaagccgatctcactgacctgcagccctgttttccccagtcttcgcgtttgcatctgtgttcctcctgattataagttatgttaactgataaaggaagcctgtgtttctgtttccactatagcagaagccatcggaaaaatccaccatccgacgcgaaagcatcctgctgcaggtacgaaaaattcgaaaaaaatttttttcgccgaaaatcgcatgattctttatctatgcaaagcttaaaatcgctaaagtgattctttctggaacatttcacaccgaaacgctcggcaatgccgcatttcgggcacttgacaagcggaatgcccgcgcggtattttatgggatattaaaaaaagaaggcgaaaaacatgacccattacaatctcctgaagctgaagcccggcgcggatgccggtgccatctttgcgcagtgcgaagcggtctacgccgcgctggaagcggagctgccgtttttgcacgacgccaaagtcatccgctgctgcactgtgcgcgattccaacgcggatatcctgatgatcatgcagatcgaccggccggagcagctcggcacgtatctgcagcacccgaagcatgtcgctctggcgcaggggatgaaggacagcatcgctgccagaatgtcgtttgacgcggaataacttccacgaatccgaaaaagagagaagagaaacgttatgcagaagaaaaaaacagcagttcccacctatctgggcgtggccgcagtctggatcggcagccacttcggccccggctttgccaccggcgcgttcagcgtccgctggtacgtcaaatacggctgggtcggccttgtgacgcccctgctcgccatgctgatcaccggcggcgtcatgtatttcatgctggaatacgcccgcgagcacggcacgccgaactatcgtcccttcgcccggtcctgctacggcgagaagctgggcggcgtggtcgccgtcttatacgatatctgctttctgatgaccatgatgtgcgccggcggtcttgccttctccggtgagggcaagctcctgcagggcttcctcggcgtcaattattgggcgacggccatcgtcacgatcctcatttccgccgccctctgcctctatggctccaagctgctggcaaagtcctcgggctatatgatgtacgccatcgtcggcgtcgtcctgctgatcacggtgctggccctgacctgcggcgacagcgacgtgcccggggccttcgccaactccgcggccaacgccaaggaccccagcctcctggacgcgatcctcagcgccatgcagtacggctgcttccagtccaccatcgtcttcaacgtcatgtccgtctcggacgtggtgaaggacaaaaaggaggcgcgcaaggccatcggcgcgggctatctgatcacgatcctgctgatggtctgcctgatcttcacgctgttcagctatacgaatgtctttgacgtctgcgccgagacgctgccggtcatgtccgtcctgaaccgcctgggcatgaaatggctgcagtggctgtacgtgattttgatgacgctcgccgtgctcacgagcgcggccggactcgcgcatgccggcaatgtccggtttgacggcctgttccggtttatcaaaaacgcgcagctgcgccgctttgtcatcacggccatcctgcttggcatcgccgctgtcggcgcggccctgggcttccaggccatgctgcagcagggcacctccatcgtcggctgggctgccatccccattgtcgtcatccccgccttcaccatcgtcgcctccaaggtgcgaaaagccaaatgacccatccaacccgcccggccccgccgggcgggttttgtatcgccgcctatctaatgccttccccctatgaggggaaggtggcacggcgaagccgtgacggatgaggtggaagcacttgcgttaacgagacggtgtccacctcatcagtcagcctgacggctgacagcttcccctcataggggaagccattggagtgcgttccccaaggcctcccctcccaggggaggtggctcggcgcagccgagacggagaggtcgccgcaaatttgcagcaacctctcagtcaccttcggtgacagctcccctggaaggggagcctttccccgcaagaaggtaacattcatctggatttccaaagcaccttctattgatggcagatattctacggaaactagctgcaaatttggaacccccgtatcaggcggcgcgtaccaaaacgcccgtaaggtgaccaccgagtggaacgccagaccgaaacattagggcttacctgaaatcagatgcagaaagcacccaacgcatccaagcgccccttttctcccctatcttttccggcaagacggaaaagatagggccgccggaggcgcgtcagaaacgaccacgacggaacgaagccttgcatgcaaggcttcttatcctctgtgctcgttttttcctttccaaaccgcaagcgaaacttgcggtttgggtttttctatgcaaaccagccgacaacctctcggtcagccttcggctgacagctcccctgaaaggggagccttttggggtgcttgacagccttgctatactgaaatcaggaaccaaccacaggaggtatgttttatgagcaaaaaacttgtcgcctatttttccgcttccggcgtgacgaagaagcttgccgaaaagctggctgccgccgtggatgcggacctgtttgagatccggccgaagatcccctataccaaagccgacctcaactggatggacaagcagtcccgcagcaccatcgagatgcagaatccgtcctcccggccagagatcgccgagggcggcccggacctttccggctacgacacgatcttcgtcggcttccccatctggtggtatatcgcgccgacgatcgtcaataccttcctcgagagctgcgacctgaccggcaagaccgtcgtccccttcgccacctccggcggcagcggcatgggcagcaccaacaaggccctcgcgcccagttgcaagggcgcaaagctgctcgaaggcaaggtcttcaagctcagcgccagcgccgacgcgctccgcacctgggcggagagctgcaaataaaaacagcagaaaacgcgcagtccgcatccgcgggctgcgcgttttgcctgtgcggcgcaatcgcgcgttgcaatttcaccggatccatgatatagtaaaaccaattatcagaaagtgcagggaaaccgccatgcgaatgagaagaagaaacaacctcgcgccccggatggaggcctgcgagtccgtctggatccacgagccggaggcgctgcgcggcagctggcgcagcctcatgcccggctgccgtgagctgcgcgtcgaggtcggctgcggcaagggcaagttcaccgttgagaccgcggaggccgaacccgatgtcctgctcatcgccatcgagcgtgtgcaggacgcgctggtgctcgcgatggaggccgcgatccgcaagggcctcaaaaacgtcttcttcgtctcgctcgacgcggcgaacatcgaccagtttttcgccgacgatgagatcgacctgctctacatcaatttctgcgacccctggccgcgcaagaagaacgccaagcgccgcctgacctaccacaccttcctggaaaaatacaagaaggtcctgaagctcggcggccagatccatttcaagaccgacaacgccaatctctttgcctggagcctgccggagatggagagctgcttcctcgagctgcgcaatgtcaccgacgatctgcacgcgaacggcccggtcggcatcatgaccggctatgaggaaaaattctacgccctcggcacgcccatccaccgggtcgaggccgtcgtcgtgaccaagcagccgcgcccggccgacgcaaaggagcccgaagaggccgaagcaggggaggacgcataagatgctgccctccatcggcatcatcggcggcgcggacggcccgaccgccgtgttcgtatccggcggcctgtcctggggctggctcgccgcagcggcgctggcgctcctcgccctcgtcgtctggctctccaaccgccatagatcataaaaaaccacgctgcccggctcccaggcagcgtggtttttattatgatgcttattcgtagatcgggtgctttttgacgagcgctgccacggcggcgagcacggcttcgcggtttgcgtcgtagtcggtcgcgatcttgtcgatgcagtcggcgacgacgggcatgtcttcctcggtaaagccgcgcgtggtgcaggccggagtgccgatgcgcacgccgctggtgacgccgggcttctgcgggtcgttcggaatggcgttcttgttgacggtgatgtggacctcgtcgagcttgatctgcaggtccttgccggtgatgtttttcttgcgaagatccgccagcatcaggtggttgtccgtgccgccggtgacaaggtcaaacccgcgctcgagcagcgccgcagccagcgccttcgcgtttttgacgacgttttcggcgtagaccttgaacgccggctgtgccgcctcgcgcaggcagacggccttgcctgcgatcacgtgcatcagcggcccgccctgcgtgccggggaagacggcgctgttgagcttctttgcaaactgctcgtcgcgagagaggatcatgccgccgcgcgggccgcgcagcgtcttatgcgtggtggtggtgacaacatcggcgtaggggacggggttcatatgctggccgcccgcaaccagacccgcgatgtgtgccatgtcgaccatcagcagcgcgccgctgcggtgcgcgatgtcggcgaagatcttaaaatcgatcgcccggggataggccgacgcgcctgccacaaggagcttcggatggtagcggcgcacgagatcctcgacctgatcgtagtcgatgcggccggtctgcgggtcgacgccgtagctgatgctgttgtagtatttgccggagaggttcacgcgcgcgccgtgggtcaggtggccgccgctggccagatccatgcccatgagcgtgtcgccgggctgcagcagggcggcgtagacctccagattcgcctgcgcgccggaatgcggctgcacgttggcgtaggcagcgccgaagagcgctttagcgcgctccatcgcaatgttctccagcacgtcgacatagtcgcagccgccgtaataccgcttgccgggataaccctcggcgtatttgttcgtcaggacggaacccatggcggcgatgacggccggggaggcgatgttctccgaggcgatcagctcgatgttctgcttctgacggtgaaattcgttttcgatgcaggcggcgatctccgggtcctgcgtctgcaggaagttcatgctggtttcgagtacgttagccattgcgatgtgtctccttacttgatatacgatagaaatgaaaaaatgagcaggccgtctccggtctgctcattgaaatgccgtattacaattgctgtagctgcggctctgtccttttgcctgagagattcggctcacgccttgcaccttcggcactcaactcaatgagttctccagagattccttctgtctccagtccgcgcgggcgttctgaagacgatcaacgggattcctgtattcaattgacggcgttattatacacacctgacggacaaatgtcaacaggctgtatgcggaaattttcagccttccaccttcggcagctgcgcaatgcttgcggccagctgttcgtcggtcgggatggtatcggtcatctcgtggtcgttgaacttctggtaggcgacgagatcgaaatagccggtgccggtgaggccgaagacgatggtcttttcctcgcccgtttccttgcacttgagcgcctcgtcgatggcggcgcggatggcgtggctggactcgggggcggggaggatgccctcggtgcgggcgaaatactccgcggcctcaaagacgctcgtctgctcgacgctgcgggcctccatcagcccgtcgtggtacagctgcgagaggatggggctcatgccgtggtagcgcaggccgcccgcgtggttggccgaggggatgaagccgctgccgagcgtgtacatcttcgccagcgggcagaccatgccggtgtcgcagaagtcatacgcgaacacgccgcgcgtcaagctggggcaggaggcgggctcgacggcgatgaagcggtagtccttttcgccgcgcagcttttcgcccatgaacggggagatcaggccgccgaggttcgagccgccgccggcgcagccgatgatgatgtcgggcgtgatgccgtatttgtcgagggcgatcttcgtctcaaggccgatgacgctctggtgcagcagcacctgattgaggacgctgccgagcacgtagcggtagccgggcgtcgtcgtggcgacctccacggcctcactgatggcgcagccgagggagccggtggtatccgggtccttggccagaatggcgcggccgatgttcgtggtgttcgacgggctgggggtgacgctcgcgccgtaagtgcgcatgacctcgcggcggaacggcttctgctcatacgagcacttgaccatgaacaccttcaggtcgaggcccagatacgcgcaggccatagaaagcgcggtgccccactggccggcgcccgtctccgtcgtgacgcccttgagaccctgcttcttcgcgtagtaggcctgggcgatggcggagttcagcttgtggctaccggaggtattgttgccttcaaacttgtaatagatcttcgccggcgtgccgagcttttcctccaggcagtaggcccggaccagcggcgacggacggtacatcttgtagaaatcgcggatctcctgcgggatggggatatagggcgtgtcgttgtccagctcctgctcgatgagctcgtcgcagaagacgggacgcagatcgtcgaagcccatgggcttgccggtgccggggttgaccagcggcgcgggcttgttcttcatgtccgcgcggacattgtaccaattctggggcatctcagattcagacagatagatcttgtaaggaatgttttcggttttcatggttgcttctcctttcgcatgttggtctctccgggagaagggcaacaaaaaagaccttcatccacagagaaaaccggtttcggtttgatctcttgggacaaaagtctgaaaacttctgcggtgccacccaaattgacaattgcttgtccgctcatgatacgctgacacgtatcttcccctgtaacggtgggaactccgtcaggacctacttgcttgcgcgttcaacctgccctccgcagtccattcggcaaacgtctttctgctgcactcgcaccatccggcagctctctgggagaaatcctgcttgcttactcgtctgcatcaacggtttcatcttggctcggattatacagcggccaaaccggtttgtcaagtgtttttttcaataaaccgacaaaattcctcggctatccagatgcttgcaaatggcgcgcccatatgctataaaaagcggagatattgcttattcgggggcctcgccatgaaaaactcctgccagaggacgatctatgcctgctacgccggttatgtcgtgcaggcggtcgtcaataattttgttccgctgctgttcgttatgttcgagcggagctaccagatcccgctgtccaggatcacgctgctcatcaccgtgaatttctgcatccagctgggcgtcgatctgctgtcgacctggtttcttgaccgcatcggctaccgcgcggcgatcctgttctcgcacgcgttctccgcggcggggctcgtgctgctgacgatcctgccggatgtgtttccggatcccgcggccgggctgacggccgccgtggccgtctacgcgctgggcggcgggctcctcgaggtgctgatcagcccgatcatggagtcctgtccgacggacaacaaggagcgctacatgagcctcctgcactcgttctactgctggggccatatggccgtcgtgctgctttccacggcgtttttcgccgttttcggcatcgaaaagtggaagatcatggcccttctgtgggcgcttgtcccgctggccaacggtattttcttcgccgtctcgccgctctatcccatccagagcggcgagaccggggccctgccgctgcgcgagctgtgccggaagaagctgttctgggtcttcatgctcatgatgctctgcgccggtgcggcggagcaggcggtgagccagtggtcctccgcctttgccgagcagggcctcggcgtgtcgaagacggtgggggacctggcaggcccgatggccttcgccgcggccatgggcatttcccgggcactgttcggcaggtacggcgggaagctcgacctggggcggtatatgcaggccagcgcccttttgtgcatcgcggcctacggctgcatcgtcttcgtgccctcgccggtcctgagtctgatcggctgcgcggtcacgggcttctcggtcggcattttctggccggggacgttcagccgtgcggcggcctcgatccgggacgggggaacggccatgttcgccctgctggcgctggccggggaccttggctgcgcgggtgggccgacgctggcgggcctcgtctcgagcgcctgcggcggcagtctgcgcgcgggcatcctcgccgcgctgatcttcccggctctgatgcttgtctgtctgctcggcatgcggaaaacacagtgacaaacgcgcaggagcgcctcagcggccctcctgcgcgttcatgtctgtcagggagtattttttgtgcggccgctttttggccgcgttcatgtcctgcagcgacgcgggcgcgtccggctgcccccggcggcagttcatgtcgcttagcgcgcagctgcgcgtatcgtcgtgtgagatgccgttcatgtttttcaggctgaacggctcttttcctttcggcatatcaagcgcctcctttttgctggttttcccggcacagaagcgaaatatgcagccccgcccgaaaaacaggcggggccaaggctcagtcgcggcggcagttcatgttcgtgaggctgcaggtcctgtccggctgcgcgttcgcggcgttcatatcctgcagggaaggggactgctccggctgccccttgcggcagttcatatcgcctagcgcgcagctgcggccgctgtcatccgagatcccgttcatgttggtaagaccgaaagatgtgttcttctgattcatgttgtattcctccattacaataaaaataattattactaatattattatacagatagcaacagaaaagtcaacccccaaataaaaaaagtgctcagatggatgcacataccatatttttgtgctatcctgtgtacagggcggggggcgaatgaaagtaaaacagatgaaagaataggagttcatgatgagaatcgaatttgaaaacatcgtccttcgggatatgatagagtccgacattgaagactatgtgcgctggttcaccgtggagcgtgaatgggaaaactgggatgctccctgggagaaagaggacacaaatgcggaagctgagcggaaaagctggacggaacgctatgaatacaggaaaaatcttctagatgatgtccgccgttacaggcttgagatcgaatggaacggcaggcatatcggctcggtaaacgcctatcacattgatgaaaactacgaatggatcggagcagccgagagtgggcagatggtccatctggctgtcggcgttggtatttgcgaacatgatttatggggcaatgggatcggcacaaacgctttgcgtgcctttataaattaccagttaaaaatcggcgcggacgaaatttacacgcagacctggtcaggcaatgttcgtatgatccgctgcgccgaaaagctcggctttgttgaatgcaatcgcaacataggcacacgagaggtcgacgggcaatgttatgatggactgacctttcggttggaggaataaaaattacatatcgaatatgactctgtgagccacattcccgtggatgtaccgccaaaaaagaaacaggcatgaccgaagcggtcatgcctgttttttataatcagccgttttttgtgcgatcccctgcacccctcacgcttcccaggaaagccggatcgactggggcaggacgagctggtcgtaggtgacatcgttgcttacgtagttcacgccctccagactgctgcagtacccgccgtagtaggcgaggcccgacgcgtcgaacacggcgacggtgaacccgcagttgtcgacgtatgtgccgtcctccgtgatgagcccggcggtgctcccggcgagataacgcttggtggacgccgcaccgttgaccagcaccgtcttgtcgttgcgcacgagggccagccgctcaccgtcaaacgccatctcgctgatgctggagtagccgacggcaaacggcagctccgaatcaaaatcggacgtcagcgcgacctggaattgcccgtctgcctcctgcgtcagcacgcagatgcgccgctccgacacgcggatgcaggtaaaatcgtccgtctcggtgatatttgtgtaatcctcgtccgtgaagtcgtccatcacggccagcttctgcaggacggcggcggtcttgacgtcgattaaggttacataatatatattattttcaaccgtatgcagcaccagtgccgacccgtccggcgtcagcccgaggtgccggatctcgaccgccgggtccagcgggaagaagcaggcgagctggtcggcgcacagataggtgtccgggaagctgtccgcctccgactggacatagggcaggatatagatcccatagccgcccggaatgcggctcatgtcgacgagcttgccgttttccgtccggttgctgagccggaagaagcacgcgtcatccgtcacgacgctctctgagcttggccagtaccggtcgccctgctgcacgcttgaggcgccatagctggagctgctgccgtccatattcttgtcgatctgcagctccacgtactcgtccggaagcaccgggatgcggaaaaagtcccgcagggcatgtatggcgtcccgttctgcatcggtggcgtatgcgtcgtgatcgtcccagctgtcaagcgtggtgataaacaggtgcggcagatcgacggagaaccagagcggatactcgtcgtagtagtccgcgacgcggatgaccttcgtgccggtctgcccgggctcgagcgtgtcgaggatctcctgataggcctttctgtagccgaaggggtttgtgtcactgtcggtccagacgttgacgcgcgtgtcgacctccacgccggaatactgccgcggctgttcccgcgaaacagcgacaggggagaagcggaacgcggtatctgcggtatagtcccggccggagaagcgcaccgtgctgtcccagaacagattctgccgcagcgcggcctgcagctgtacctgcagccctgcggcggccgccgggtccccggcgaagacatgctcgtcgaacgtcacgtcctcgcgcggcgcggccaccgcgtgcgtgcagaccgccgcgccgcacgcgcataccagcgccagcgcgagaaatacgatcagagtcttacgcatcgtcgtcctccctgccggtcagctcggcaagcgcctttgagacgcggtcagactgatagctgaacgtctgcttcacgtattccatcagcgtcagcccctgctcgtcgagcgccgcggtctgcgcgtcgccgacgatcttcccctcgtggagcagtacggctcgcccgatgaaccccgtcacctcctcgatgaggtgcgtggacaaaatcaccgtctcgtgcggctcaagaatgccgagcaggaccttgtagaaatcctcgcggttaaagacgtcgttccccgcgaacggctcgtccatcaggatatagtccgccccctgcgacagggccatgatgacctcaaactggtttttctgccccgtcgagaagctgcggatgggcttgtccatcggcagaccgaaaaactccatcagcccctcaaagcggcgggagaggaacgtctcaaaatgctcctcataaaattcccggtgcgcctgggccgaaagggcggggaagaagctgtgctcgcaggtggcgaaggagaaccggccgatattcgcgcgcgtgatggccgcgccgtccagcgtgaccgagccgctgtcatagcggatgagcgacaggatgcacttcatgagcgtcgtcttgcccgcgccgttctcgccgaacaggccgacgatctcgccgggcccgaccgtcaggctcacgtgatcgagcgcctgcttgtccgcatagcgcttgcagagatccttgatttccagcatcagaaatacgcctcccagatctgtaaagtttccgccggcggcatgcagcgcgccgggacgccgtggtgatagaccgtcgcgaagatcgcgagcagtatgagacttacaagaaaaccgactgcgcaggcgaccgccgggatcgtcaggcagcgcacgtgcagctcctttgcgctcggcagccgcttcatgacgtaaatgctctttgtctgccgggaaaatgacgcgtagttcgccgcggcgttgaacccgcagacgagcagatacacccagaaccccgagagccggtgccggatgaggctgttgaggctcgccatgaccgcgccattgcgcaagaccagcgccccgtagcggaactcatacagttcgcgcagcgcctgccggtagccgctgaagaatcccagcccccagaacacgacaaacaccagcagcgccagcacgtaggcgatgaacgccgtccgcagatcgtcgcccggcggggcgaagcgggcgagcttcttagtccagttcatcctcgggcccctcctttccgttgtgcgcctgcaggaatccaagatatccgcatatgcccgcggcgaacagcgccgccacgctttgcaggatccccgcggtccggccggagccgaacccgaccggcagcaccagcagcatcagtccggtcagcacgaccagcgccagccgccgcccgccgttcttccgccgcagccccagctgcatgtatgcggtcaataccccgagcgccaacacgaacaccacgttccgcacccacagatacccgtccgccagcggcagcagcccgtgcaggaattcgctgcggtaaaaatccacaaagatgccctgcgcgccctccgcataccgcgcgtccgccgcgtgcagcgccgccgtgccgaccgaagccatcagctgcacgccccacacgcacgcaaagcagagcgcattgcacacgccgctccagagcagcacccgcgtctccgggatctgcagccgccgcagcgtgtagccgtaccggctgcccgcgccgaagcagctggcgagcagcagctggcaggcgaccagccccagcgaaaagatcacccgcagcgccgtgaccagctcgctgcccgtgagtgaagcccggaacccacgcaggccgaacaggacgtaggccgccgcgtccagcgccagcattcccagcagcaccaatgccagccgcccgatcgcggcccgcgcgtgcagcgcaaataccgaaagctgctttttcatgtctcttcctcctcccacgcctgcgcgagcaggcgcagcgcgtcttccttcgtgatgcccatctgccgcagcgtccgcgccgcgttgcgcagctcctcggacaaaagctcctgccgcagcgccgcgagcgttttttccggcagcgtcatgcagcttttcgcgcccgtgcgcgattcgatcagctgttcttcctccagcagatggaaggccttctgtaccgtattcgggttgatccccagcagcgccgagagcacgcgccgcgacggcagctcatcgccgtcccggatcgtcccggcgaccgcgccgcgcttgatataccggatgatctgcagatacaccggcgtcccatccacggcccggaacgcgtcaaatgaaaccatatcctcaccaccgtattacttgactcatacacttgataactgtattatacagataacacacttctctgtcaaccccgcccttgacatttcccccgaaaccggatactctgaaaaagaaaaggctcccctttcaggggagctggcagccgcagactgactgagaggtcgtctcctgcctctgaatttaagcaagcgccaatgtttcaggcgtcgttccacacgatagtcaccttacgggcgtcatactacgcgccgcctgatatgtaggaagcaaatttgcaactgattgcctttgaatgtctgccgtcaatagaaggtgcagaagaaatccggatagcctgttcctttatgcgggcgtccctcaacgatcatcccacccacaggaggtccccatgtctgaactcaccaagcgcgctttggagcagtcgctcaagaatctgctgctgcagaagccgctcaacaagatcaccatcagcgacatcgccgacgactgcggcatcaaccgcatgacgttctactaccacttcaaggacatctatgaccttgtcgagtggtcctgccaggaggacgcggccaaggccctggccgggaagaagacctacgagacctggcagcagggctttgagcagatctttgaggccgtgctggccaacaagcccttcatcatgaacgtctaccactccgtcagccgcgagcaggtggaaaattacctctaccagctcacctatgacctgctcgagggcgtggtggaggagcaggcggccggcatgtccgtccgcccggaggacaaggcgttcatcgccaacgtctataaatacgccttcgtcggcctcatgctcgactggatcaagcacgacatgaagggcgagccgaagcagatcatcgaccggctcgaccgcgtcatccacggcagcgttaccgccgcgctggagcgcttccgcctcgacgccccatcagatccacccgtttgataaaaaactatacaatttcccgcccggtgataagaactttatcaccgggcattttctgcttatggcgctttttctggacctgtagtatgctcataccatcgaaagggaaacataaaacatcgtttccagactttttatggaggtattgatcatgtattattcgagcggcaactatgaagcatttgcaagacccaaaaagcccgagggcgtggacaacaaatcggcctatatcgtcggcagcggcctggccgcgctgaccgcagcctgctatctcgtccgcgacggccagatgaagggcgaacgggtgcacatccttgagaaggactccatccccggcggcgcctgtgacggctacaagttcgaaaacgtcggctacgtcatgcgcggcggccgcgagatggacaaccatttcgaggtcatgtgggacctgttccactccatcccctccatcgagaccgagggcgtgagcgtcctcgacgagtactactggctcaacaaggaggacccgaactactccctctgccgcgccaccgaaaaccgcggccaggacgcccacaccgacggcaagttcgacatctccgacaagggcgcgatggagatcatgaagctcttcttcaccccgaacgaggacctgcaggacaagcgcatcaccgacttcttcgacgatgaagtcttcaactccaacttctggctctactggcgcacgatgttcgcctttgaaaactggcacagcgcgctcgagatgaagctctatatccagcgctatatccaccacatcggcggtctgcccgacttcaaggcgctgcgcttcacgaagtacaaccagtatgagtccatgatcctcccgatgatcaagtatctcgagagcttcggtgtccagttccactacggcgtgcaggtcgtgaacgtggagtttgactgctccgacccggcccacaagctcgccaagcgcatcgacatcctccgcgacggcaaggaagacgccatcgacctcactgagaacgacctcgtcttcatcaccaacggcggctgcgtcgaaaattcctcccgcggcagccagaacgagcccgccccctacaacaccgagatcaaacccggcggcggctgggacatgtggcgcaagatcgccgcgcaggatccgtccttcggccatcccgacaagttctgctatgaccccgagcagaccaactggatgagcgccaccgtcgagaccctcgaccagaagatcatcccctatatcaagaacatctgcaagcgcgatccgttcaccggccatgtcgtcaccggcggcatcgtcaccgtcaaggattcgagctggctcatgagctggaccatcaaccgtcagccgcagttccgcgcgcagcccaaggaccactgcctcgtctgggtctactcgctctttaccgacaagcccggcgattatatcaagaagcccatgcgcgaatgcaccggcaaggagatctgcatggagtggctctaccacatcggcgtgcccgaggaccagatcgaggaactggcgacgaacagcgccaataccgtcccggtcatgatgccgtatatcgacgcgttcttcatgccgcgcgcctacggcgaccgcccgaaggtcgtgcccgacggctccgtgaacttcgccttcctcggccagttcgccgagaccccgcgcgacaccatcttcaccaccgagtattccatgcgcaccggcatggaggctgtctataccctcctgaacgtcgaccgcggcgtgccggaggtctggggcagcgtctatgacgtccgcgacctgctcgacgccactgtcaagctccgcgacggcaaaaagcctaccgacatgaagctctccctcgtccagaaggtcgccctcgataaggccctcagcaagatcaagggcaccgacatcgaaaagctcctgaaggagtacaacatcatctga

SEQ ID NO: 839 - DNA, 15355 bp, unidentified
  source 1..15355: mol_type = unassigned DNA
atggtgatacatatggcagcaagaattaatgagcagcagtttgaagaaaaggtattgaaagcggataaaccggttttggtggatttttattcggatacatgcattccatgcaagagaatggctggagtgctcggcgagattgaggatgattacgacggcaagcttgacgtgttcaagatcaatgtaaactatgagcagggactggctggcaaatacgaagtaatgtctgcaccgacactgatctacttcatccatggagagcagcagtggagactgaccggagtggtaaagcgtgaggaaatcacaaagcttgttaccgacatctgatgcatcacttgaaatgctttaagaggtgcccaatatttgggacaccatgaaataaaagaaatttacaggtgtaagaaaggagaatacaatgacaatcacaattgcaggaaacaagaaagagtatgacgagggcgtaaccgtagagcagttgatcgagaaggagaacgttgagaatccattatatgttaccgtaacgatcaatgatgacttcgtagacagagagaagtttggcgagacagtattaaaggatggcgatgccgttgaattcctttacttcatgggaggaggagcaagataatggcttttacaaacgaacagcttgagagatattcccgccacatcatccttcaggaggttggtgtaaagggacagaagaagctcttaaacgccagcgttctgatcatcggagcaggcggactcggggcaccggcagcactttatctggctgcagcaggtgttggtacgatcggtattgttgatgccgatgaggtagatctttccaacctgcagagacaggtcatccacaccaccaatgatgtgggcaaggcaaaggtgaaatccgctgcggagacaatggaagcgatcaacccggatgttaccgtcaagacatatcgcacatttgtagattccacaaacattatggatctgatcaaggattatgacttcatcattgacggtaccgataacttcccggcaaaatttttgatcaatgatgcctgcgttatggcaggaaagccattctcccatgccggtatcattcgtttcaagggccagctcatgacctatgtaccgggagaaggaccatgttaccgttgtgtattcaagaatccaccgccaaaggatgcggttccaacctgtaagcaggctggtgtcatcggtgctatgggcggtgttatcggaagtcttcaggcaatggaggcaatcaagtatattatcggtaagggagaacttcttaccggaaagcttttaacatacgatgcactgaaaatggaatttcacacgatcaagcttccgaaggatcatcactgtgccgtatgtggcgacgagccaacgatcacagagcttatcgattatgagcaggcagaatgtgatcttaagtaaaactattcaccggtgtgctaagtaagtttacggcctggcaagcttgcctgcaaaaagcagtgagcttactcagtgcagatgccggtgaatagaatacagaacatagagatgatatagaaagtaaggtgaaagcatggcaataacgttgaaaatgaaaaaagaagattacgagaagatcctggcacactgtcaggcaggtcttccgaatgaatcctgtggacttctggcgggagatattgacggagaagtaaaaagcatcacagaggtatatctgctgacgaacattgatgccagcaacgagcatttctccatggatccgaaggagcagcttgcggctgtaaaggatgccagagcaaagggaaagaagctgatcggaaactttcattctcatccggaatcgccatcacgtccttccgaggaggacaagagacttgcatatgattccacaatggaatatctgatcctgtctctgcaggaggcagacaatccggtgctcaaggcattcgggattgatccggacaagaatgttacaatccatgagattgaatatctataaaggcattcggaaaattttcctgaatgcaccggaataaaagccgatggcttttcgtgaaataaagggtgacaaacgacacagaaaggatggttccatgagtaaagattttgaagtacggcagatcaacacagatgtattgatcatcggaggaggtaccgcaggctgttacgcagcactgactctgagccgtgacacagggctgtccgtggtgattgcggagaaagcccatattaagcggagcggatgtctggcagcaggagtcaacgcgatcaacgcttatatcacgaaggggcatgctccacaggattatgtcgattatgccagaaaggatgccgcaggtattgtcagagaggatctgctgcttaccgcagcggagcatttcaatgaagtgactgcagatatggaaaatcttggtcttgtgatcctgaaagatgagaatggtgattatgtcaccagaggaaaccgtaatattaagatcaacggagagaacttcaagccgattcttgccaaggcagtacaggaacaggaaaatgtatcggttataaaccgtgtcaatatcacaaagcttctgacaaaggataataaagtttatggtgcggtaggattttctctcgaggatgaaaccgcttatgagatccatgcgggtgccgtgctggtggcaaccggcggggcagctggactttataaaccgaacaatccgggattttcccgacataaaatgtggtatccgccatttaataccggtgccggatatgccatgggaatccgggcaggcgcagagatgacctccttcgaaatgcgatttatcgcacttcgctgcaaggacacgatcgcaccgaccggaaccattgcacagggagtgggagcaaagcagatcaattctaagggctttgtttacgaagacaaatacggactcaccacaagcgagcgtgtctatggcacggttcgcgagaaccagcttggaaacggtccatgctacctgaagacaagcggtattgacaaggatcaggaagaaaatcttttaaaggcatacctgaacatggcgccaagccagacgctcaaatggatcgagaccggggaacttccgggcgagcaggatgttgagatcgagggaacagagccttacattgtcggcggacacacggcaagcggttactgggtagacaccaaccgtgagacaacgatccacggtctgtatgctgccggagatgtggcaggaggatgtccacagaaatatgtaaccggcgcactggcagagggtgagcttgcggcaaaggcaatcgagaagcagttaagcgggacttctgtagccgatggtgcggacgaggagattgcccgtcaggcacaggaagagactgccgcttatcaggatattttagccggagagcagtcaccgtttacggcggaggagcttgaggaggcaatgcagaaggtgatggatgaatatgccggcggtatatctacccattaccagtacaatgagaagcagttaaagcttgccgatgagaagatcgatcagctgactgcactcgcagatgaacttaccgcacggaatatgcatgagcttttattcgtttatgaattaaaggagcgactgatcgtttgcaagagtctgatcgcacatctgagaggacgtaaggagacgaggtggcattcctttaatgagaatctggatcatccgaacgaggatgagaactttttcaaatatgtcaattcccgtctggaggatggaaagatccggatcatactgagagatattgtaaaggaggggtcctatgagcatacaaattaaccggcagaaatgtatcggctgcggtcagtgcatgcaggtctgcccgggaacgctgatcgaaaagcaggagggaaaagcagtgatgcgctatccgaaggactgctggggatgcgcttcctgcgtgaaagaatgcccggttggagcgataggatttttcctcggagcagatatcggaggaaacggcagtgtgatgactgtgacaaaagacggacagatcttacattggaatattcataaaagcgatggacgcgaggttacgattgaggtagaccggcgcagttccaataaatattagaaaaggatggaggacgactatgagtggattaacacatttggatgaattagaggcagaagcaatctacataatcagagaggttgcagcggagtgtgagaagccggttatgttatattcgatcggcaaggacagttcggtaatgcttcacctggcaatgaaagcattttacccggagaagccgccatttccttttcttcacgttaacacaacctggaaattccgtgagatgatcgagttccgtgacaagaccgcaaaggaacttggcattgagatgctcgagtacatcaacgaagagggtgtgaagcagggaatcaacccgtttgatcacggtgctgcttacaccgacatcatgaaaacacaggcactgaagcaggcattaaataaatacggttttacagcagcatttggtggcggacgacgtgacgaggaaaagagccgtgccaaggagagaatcttctccttcagaaatgagtcgcatgcatgggatccgaagaaccagcgtccggagatgtggaaattatataatacggagatcaacaagggcgagagcattcgtgtattcccaatctccaactggactgagaaggacatctggcagtatatcaagcgggaaaatatcccgatcgtgcctctttactttgcggcagagagaccggttgtataccgtgacggcaacattatcatggtagatgatgatcgtatgcgtctggagccgggcgagaagccggagatgaagatggttcgtttccgtacactgggctgctatccgctttccggtggtgtggaatccaatgcaacaacactcgatgagatcattgaggagactctcagctccgtagagtctgagagaacaagccgtgtgatcgataaggacggcggcgctgcaagtatggaaaaaagaaagagagaggggtatttctaggatgaatggattattaaaatttataacctgtggaagtgtagatgatggaaaatcaaccttgatcggtcatatcttatatgattccaagctgttatatgcagatcaggaaaaagcattgatcctggatagcaaggttggctcccgtggcggtgagattgattattccttgctgcttgacggactgatggcagagcgtgagcagggtatcacgatcgatgtggcataccgttatttcacaacggacaacagaagctttatcgtagcagatacaccgggtcacgaggagtatacaagaaacatggcagttggtgcttcctttgcacagcttgccgtagttatggtcgatgcaaagcagggtgttctggtacagacaagacgccatgcaagaatttgtgctttgatgggaatccgctattttgtatttgcggtaaataagatggatttagcagattacagcgaggagcgtttccgtgcgatcgaaaaggacatcaaggatctggcagaaagccttggtctttacagcgtaaagatcattccagtcagcgcaacagagggtgacaacgtaacggttgtatctgagaatatgccttggtatcagggtggtacactgttaaattatctggagacagtcgatatctccgagcaggagaattcttccgtattctatatgccggtacagcgtgtatgccgtccgaatcatgagttccgtggtttccagggacagattgaaagcggacgtattaaagtcggcgagacgataaccacactgccgagcgatgagaaggcaacgatcaagtcaatcctgaacggttctacggaggtgcaggaggctgaggcaggtcaggcagtaacgatccagcttgaccgtgaagtggacgtaagccgtggctgcgtattggccaataaggaagatcttccttacactaaggacgtaacaacgacacttttgtggatggatgatgagccactttctcttggcaaggagtaccttgttaagcttggaaccaagaagattccgggaatgctaaagagcattgagtacaagatcgatgtcaacagcggagagcatattcaggcagaccatgttgagaaaaatgagattgccgtttgccatctggaatttgcagagaagattatcgttgacaagttcaaaaccaacaagacactcggcgagctgatcctgatcgaccgtatcagtcatgcaacttcggcctgcggtgttgttgaggatgtttccaccgatggtgaggtaccatatttccagaaggatgatatcaaaaccggcggatatattttcgaggaattctacttcaatctggagaacgcattcctctctaaggtaaatacacaggataaaacataccatgttggcgataccgtgccgatcgagggcgacagctttaagtatccggattatttcgatattcttgcagcagacagtgatgccgttatcctgatccgtaaccgtgtgatcgaggacatcattccactgtccgaatatcagtacacaggacttcctgttctcgatgagagaggatttgcactgcgcatccgtgtaaaggcagacctcgacaattatctgtacgagtacaagaatctggacaaggagaatcatttggaattcttcaacaagtggtccaagtttgaaacctaccgtagaattatatgcactgataatttctggatgatatgatgcaagggccaaaagtagatagcaatgtatgtttacatacaaattgctatctactggcttgacccgccaaacaccgacaagaagcagatttgcttgcaaatctgtgggattggagatggttgcaggattgcggaaattgcgtcgcaatggagcaatccgtggcatcagggtaatgcgaacacttgcgtgttcgcattagaagttgcttcgcatattattagtgtcaaccgtagttttagcagttagaagaggagttccatatgaagatttctaccagaggaagatatgctttgatcctgatgctggatctggcgaatcataatcgcggcgtgccggtgccgttaaaagaaaccgcaaaacgccagcagatttcagaaaaatatctggagcagattatttccgtgctcaacaaagctggttttgtaaagagcgtccgtgggcctcagggtggttatctgctgaaaaaaacaccggaggagtacacggtgggaatgatcctgcggcagacggagggcgatttaatgtccctttcttcggacacctccaacgaaatggaaaaggcttctgtgatcaaccgcgtttgggataaaatgggaaaagcggtcaatgatattgtagacaatattacactgcaggaccttttggactgggaggaagagcagacggaagaggccggattttatgtaatctaaataataaaaataataccgataatgtttcttggcgatacaggataaggcattatcggtatctttggttttgagaagagaacaacgggaaaggaaaacggatatgaaagatattataattataggaagcggtccggcgggattgtcggctgcagtttatggaagacgtgccggtctggatattcttgtgatcgaaaaggaatattgtggaaccgggcagatcgcggagagtggtcaggtggataattatctgggcattccggggattgacggatattctctgggagaaaaatttcgggagcatgctgagaatctggggacggcttttctggaggaagaggtcacgaagctggagcagtccgatggttattggaaggtacttctggcaggcggggatgttttggagacgaagaccgtgatctatgcggcaggagcatcccatcgccatttaaacgtaccgggagaggacaaactttccggcagaggtgtgtcctactgtgctacctgtgacggcgcattttttcagggaaaggtgacggcagtgatcggcggtggtgatacggcactggatgatgctctttatctgtcgcagatctgtgagaaggtttatctgatccaccgtcgtgacgagtttcgcggaaatgcggggacggtgcagaaggtaaaggatgcagaaaatattgagatcctgacgaatgcgagagtacaggagattcagggagaacagcgggtagaggctgtggtgctggaggatggccgcagactggaagtggctggtgtctttgcggcagtaggaatggagccggtaacaggactgcttcaaggcgttgcagaacttgatgagtatggttatgtggcagcaggagagcaggggatcacctcggcccagggactgtttgtggccggagatgtgcggaccaaggtgcttcgtcaggtgattacggcggcagcagatggagctaatgcagcgacagaggcggagaggtatatccggagatagtatgtaacatagaaaatgtttattgactttcctttcttttttttttataacgataaaaaaagggaagattgagtatctatacggtgaacgataatgacaatattcagtaaaaaagaaaaagccggaaatcaacggagaatatttcataaggacacagtccgtcaggcattctggcgggctttgcccattatggggagttatttgtttgtgagcatgtcctatgggcttttaatgcaggaggcgggctatcgctggggctggtcgttgcttgtgagcatgacggtgtataccggggcattccagtttgttctgatcacatttttaagcagcggtgcgtctcttctcaccatcgggctcacggcattgtttatgaacagccggcagtttttctatggactcagctttgtggaggaattccggcagatgggaaaacgttatccgtatatggtgcatacaatgacagacgaaacgtatgcggcaaactgtgcactgcagatgcagcaggagcagagggcgaaagagtctgaccagaaaatgggacagaacgaaaagaaagcggtgccggaagaggacgaaaagaacatagcaaaatcccgggagaacatcaggaaacgtgatgagatgttttggatcgcgttgttttcaaggataagctggatgcttggtgcggtggctggcggcgtgatcggacagagcattcccgtggaacttaagggtattgacttttgtatgacagcgctgtttgtcacgatatttgtggatcagtggcggtcggcaaagagccatattccggcattgcttggtcttggctgtggagtggttctgcttcttcttgtgggaccggattactttttgctgccgacgctgatactggtgtcaggtattctgcttctgatccgtggaaccatgaactctgcggtcggagcagcttctggagaggaggctgtggaaaatgaataatatacaggcatttacggcaatcatgctggcggtggcatgtactcttctgatgcgtgcactgccctttaccctgttaggaaaacgtcaggagatcccggaggtcatccggtatctgggaaatatccttccggcggcgatcatggcggtgctgatcgtatactgcctgaaatccgtgccgatggattttggcggaacagggatgtatcagcttctggctgcaggagtctgcgtactgttacatgtctggaagaagaatacactgtttagcattgtcggaagcacggcattttatatgatattgctgcagtttgcatgacaaaacgaaaaaaagatatcataataatcgggattgtggtacactaagaaagattgggagatattttgccgggtggcaggtatcttcatagaaggaaaggaatacaggattcatatgttaaatcagttttctagaacacagcttttattgggaaaggaaggaattgaccggctggcagaggcgaaagtggctgtttttggcatcggaggagttggcggctatgtggtggaagcgcttgccagaagtggtgtcggttcttttgtattggtggatgacgataaggtatgtctgacgaatctgaatcgtcagatcattgccacacgcagtacagtgggcaaatataaaacagacgtgatgcgtgaccgcattctggatattaatccgcaggcgcaggtggaggtcagacagtgcttttatctgccggaaaatgccgatgaatttgatttctcagagtattcttatgtggtagatgctgtggatacagtgacagcgaagctggagatcattatgcgtgcgaagcagaccggcaccccggtgatcagcagcatgggggcaggcaataagctggatccgacgaagtttcaggtggcagatatttatgatacgacgatctgtcctctggcgagagtcatgcgccgggagcttcgcaaaagaaatgtcaaggatctgaaggtggttttctctactgagaagtcgattcgccctttggaggatatgagtatcagctgcaggacaaactgcatctgtccaccgggagcaaagcacaaatgcacagagcgccgcgatattcctggtagtgtggcatttgtcccatctgtagcgggactgattattgccggagaggttgtgaaggatctggcaggtccgttgccggttcaagaatagaagggatgatatccgattatgaatattgaaaagttagaaaaaaatctgagagacctgatcctggaggagcaggtgaagcttggttatcgtaaggagcttttgcgtctgtattatccgttatcctctctgaatcatctgctggaggtagattgtacggaagaggaaatgttggagaggatgaaggagttttcagagaccacaagagcgcattttggcgggattacagcatcttcccaaaaagaaagattttgcattcagattccaccggagggagtggagtatgtccatgagcatcaggaagaggatgatttcctggtgaaatttatagagacgatcgcccgtcacggctgtactctgaaggatgtggaaacgctttttgcacagtattcggatcaggtgtttgagggcagttatgcaggggatgattttgattatgtgttctattttcgggacagtaagccgaatgattaccgctattgcatcaccttcgagggctgccacgtgatctatcaccggtttaccccggaggattatgtggactttgactttggagaggtcacaccagtcgtgtgttcttaaatcgtgcgcgaaggcaaaagtgaacatagagattgccagatgccgatgcttgcatctggtagctggcagatcgatatgtgaatgcgcccgcgagtgagaaaaagcgaagctttttcgaaccttttgccggagcgttgcgaaaattcattatgggcgaaatttgaaaatagaaagaggtaaattatgtttacaggtactatatggtcattgctgccaccgatcctggcgatcatgcttgctttgatcacaaaagaggtttacagttccctgtttgtgggaattgtagtaggaagctttatgtatgcgcagtttcatccgtggactgcattcaccgtgatctttgatactatcaaggacagcatgaatatcaatattttgtttttcctggtaatgcttggtatgattgtcgtgctgatgtcccgctccggcggttcggcggcttacggaaaatgggcgatctccaagatcaaaaacaaaaaggttgcacttttggcgacgatggggcttggcgtacttattttcgtggatgattattttaactgtctgacggttggctcggtgatgcgtccggtgaccgaccggtacaaggtgtccagagcaaagcttgcttatattattgatgccacggcagcgccggtctgcatcattgcaccgatctcaagctgggcggcggctgtcaattcctatgtgccgaagggatcctcgctgacgggcttcagtctgtttctgcggacgattccgtacaatctgtatgcaatcctgacccttttgatggtgctttatctgatcctcaccggttttgatttcggtttgatgaagaaacatgagatcaatgcggagcgcggtgatctgtttacgtccggagaggatgcactgaaggaggagaagcaggaagaggttaacgaaaagggacgtgttgctgatctggttcttccggtagtgcttctgatcgtatctgcgatcggtgccatgatctataccggatatttaggaggagcaacgaatgtggtcgctgcgttctccggctgtgactctgagcggagcctgatctttgcaggacttgtcacgatccttttctgtttgatctggtatcttccgagaaaggttctgaactttgacgatttcatggaaagctttgtggagggatttcgtctgatggttcctgccatggcgatcctgacctttgcgtgggcgctgaagggaattggtgatcatcttgagatcagtacatttgtgaaaagtgttgtcggacagaatgcttcggcaagtatgtttataccgatgctcatatttattattgcaatctttctggcgttttcgaccggaacgagctggggaaccttcgcaattcttgtaccgatcgtaattgcaatgttcccggagcagggacatatggagatgatgatcatttcggtgtcggcggtactggcaggtgcggtatgcggcgatcatgtgtccccgatttcggacaccacggttatgtcctcggcgggagcacagtgtaatcatatgaatcatgtttcaacgcagcttccgtatgcggctgtcgtggcggcagtctgcgtggttggctatatactggcggcattcatccagatctggtgggttgttctgaccttaagcgcggcaatcctgctggcggtgctgacggcgatgcggatatggcttcagaagaaagcgtgatcttaaagagagacaagtttcatcatctgagggttatttggggacagtctagccgactgcctcagataactctttttttgcctcttgttcctctactcttttaatcataatatacacatctccttaaatttcgatttgtcagattcataaaacactattttctataaattgtatcataatcacttaattcgaaaatgtaattattgtttatagtttgcttcaagccatctggcaacaccatcttcgtcattcgacaaaatcacctctgttgcatattgttttaattcatcgtgtgcatttgcaacagcataacttttatcagccatttgaaacatgtctatatcatttttttcatcaccaaacacaattagcttttcgcaattcaacatgctttgtaattgccttatagcatttgattttgatgcctctaacggcataatttctaaccattgttcatttgtataaatatccgtttgatatacacaatgatatttatccttatatttatcatacaaaggcataagcttttttggctcatcaatacaggtaatataaaaaatatcaccctctttcaactcagacaatgaattcacctcatttgttcgaacatcgcctctacggctttcgaggaacatattcataccctctgtacacatttttcgcacaaacgaaaatttttccaccccattaatgtatgcgtaaacaatgggatacacgttattgctaaacaaatcttctagcacggaatgtacggaatcatcaaaataattagcgattaatattttttccgtaatattatcaatcacaaatgctccattatacacaattaacggaatttttgcatttattcctgcggtcacttttttcgctgtaactaaagaacgtgccgtagcataggaaaaaatcatcccttctttaaccaatgaattgattacttgatttgtgtatttagaggttacttcgttacttctcaataatgtcccatctaaatctgaaacatacaaatcactcatgcattatcctccgtcaacttcatatttttcacttcccattgtaccatgcacaattctcacattccacttatattttttgaagatcccgcatccgtccaatcctgcatctcacctgtcaaaactaagctggcatattccatagggttgtcaagagccatatataaatttcatggctttttcgtcctttcgttttattacagataagccggttgtttttaaggttaaaaccaaaaaactatttgtatatttactattttttggtataatctataagggaagagatcataggaatgttctgtcgccgtttgaagacggcagattatattaggaaaggtctgggtattatgattataagaaatgattatataaaagcagtagaaccctttatagataagccggtcgtaaagattttgacaggtgttcgacgttgtggcaaatcaaccattttccggatgatcaaggaagaattgatccgcagaggagtatccggagaaaatatcattgagaagcggtatacggaaatggatattccggaggatataacggcacagcagatgtatcaggagttgatcgaagcaataggggagaaagagcactgctatctgtttctggatgaaatacaagaggtgcataattgggaaaaggcagtgaacagcatactggagaatggcaaagcggatatttatgtgaccggatcaaattcaaaattaatgtccagtgaaatttccacttatttaacggggcgtttcgttgaaatccctgtgtttacattatcttttagagaatatctggaatttaagaaagaacgtgcgatgtcgcagacggaactgttggaagaatatattcgattcggaggctttccgatcattgcacttggtgaatatgaggaaacatcagcatatcagatcgtgaatggtatttatcataccgtcgtatcccgtgacattgtaaaaaggcatcagatcaaaaaacaggaattatttgatcgtgttgtgaaatatattattgaaaatacaggaaaaactttttcagccaattcaatttcgaattttttgaaaaatgagcatagaagtgtttccgtagaaagtgtttataattatttacgctggcttcaacaggcatttattatttttccctgtgcacgttatgatcttcagggaaaaagtgtcttaaagacgcaggaaaagtattacctcgcagacatttccctgcgttatgctttacttggttataacagaaaaatgctggacagtacaatggaaaatatcgtttttctggaactaaaacggcgtggatatgatgtatttataggaaaaaatggaacgaaagaaatagattttatggcagagcgcagggatgaaaagatatatgtacaggtatgcgtacagcttccggtaaattcagaccgcgaaatagcaaatcttatggagatcagagatcattatcccaaatatgtcgttacgttaaacaccatggatacaggaaacgagaacggcattcgcatcgttcatctggcggatttcttgttgatggataaattttaa

SEQ ID NO: 840 - DNA, 19049 bp, unidentified
  source 1..19049: mol_type = unassigned DNA
cagccaatgacgtacccccggaccacgccgctgttctcccaaaacaataaggaaaaggtcatgactgcacaatagatccagtaaaaaatgtcctccagacctgtccataatgagccgtgaggcaccagcagccggaaaagccggagaagatcatagctgaccatgagaacggcccccagtaaaaagctcatgagcgccagggccgcctcgtcctgtatgtaaaggctcaaaaggatctccctccccgcgtcctacttaaacagtctggaaagaaacgactggccggtctttttgaagctttcgctggaggaatatacaagactgtctgcctgtccctcgatgtcgatctcccccttttccagagtcagcctgctcacatggaggtcttttcctttgatggtcagaagccccatgtctgtatccagcacgatggtattttcatcaaaggagatcacgtccaggatccccgtaagattccctttttcccggttgtacagcatgatctggtgggaaagtcctattttttcatccataaaaaaacctcctgacatactttttataagtatattaggaggtcttctcttttattcataaccgcgccatatctttgcggctacgtttcctgttgacggctgaacgcccgcagaaggaggcacacgccaggcgccatctccccgcagctgcgttccatattgcccgcgcggctgcacagctccccaaaagctgcgcccttacagtagcttaaagataccggtaaagctccttcacgtcgtccttgcggatcgtttcctggacgtccaggacctctaccttcacagatttcgttccaaactggatctcaatgatatctccctgcttcacagctgcagacgccttggccggcttgtcattgatcatgacccgtccggcgtcgcaggcctcgttggccacggtcctccgcttgatgaggcgggataccttaagaaatttatcgagtctcatggattaagcgtttacctgatcctttaatgccttgccggctttgaacttgggagttctggaagctgcgatggtcatagcctcgccagttttcggatttcttccttctctctccggtctctcagatacctcaaaggtaccaaagccaactaactggatcttctcacccttcactaattcttctgctacaacgtctgtaaaggccttcattgccttttctgcatcctttttggaaagctctgccttttctgccactgctgcgattaattctgtcttgttcattgaaatttcctcctaaaaattagctcacgatcaccagagcgtctccggcgaagtccttgaatttataacagcggcccggcatagccggaccaccgttttttgtactcttacatttatatatgtttctgctttctttgtcaaggtttttccgcaaaagaacgaggtaaaatcacggttttccggggtctggagcctccaggaaaactgcctgtcccggcgaaaaaagggcggcggtttttacgccgccgccctgggaaaacacagtcttagctgagctcgatcttttctgcctcttccggcttaaaatcgttctccagatcatagatattgtggcctgtggaatcgcccagaacgcggccctctaaggagtagcagcggataaagcgggtgtcgctgacgctggaccagtgctctacgtcccaggtcagataccccatatcgtcgctcttcttctctttcaggtacagatccacctgtctgccgtccttcatgatcttaatgagatccttataatcagcgatctccacttcctctttttttacagaatcataaatcttcattggaatctcctccccatattcgttcatacgatcccggctttaccgggacctgtatgtttattatagccttcatggggcgaaaacacaagaagagattggaaaaatgcgggaatgcccggccaggctgggcttttaccggttcttccgggccgcccgggcctctttttctctccttttgatctcctcccaggtcaggtccttctccatctccccgccgaaaagcctggggtgacggtgcaccatcttttcacagatcccattgaccacgtcgtcaatggtaaaatttccctgctccttttcgatctcacagtggatcatgatctggtacagcacgtctcccagctcctcgcacaaattttccgtatcctggttgtcgatggcctccaggacctctccgcactcctccaccagatactttttcatggactcatgggtctggacgctgtcccagggacagccgttctccttatcccggagcttctccaggatctgctttaaatcatcaaatgtatacatgatatcctccggctccattgaaatgccgccgggagcaaagaccttctgtcccggcatcctgatatcagtataacagaaaccatatggtttgtcatgggtgatttcccggccctggggaccaggccgtcagctttccatctgccttcccaggaatccggcggcagtggctgccagacgcagctcgccctcagaaaactttgcccggggctcccggctcatgatgaccaccgctccgatggcatcgccctcacaaatgatcggcgtcaccacctgggcagtgacgccttccatatcctctgcggagacctccacataattccggtcgtccttcccggcctggacggtggcccgctcctggatcacatgctccagctgtctgctgatgggcttctgcagcagctccttcttcgcgcctccggcggctgcgatcacctggtcccggtctgtgatgcagaccatgagccccgtggcctgggccatggcgtccgcgtactgtccggcaaaagcattgagctccatcatcggcgagtactttttgagaatgatctccccttcccggtctgtgaagatctccagaggcgtgccctcccggagccggagcgtgcggcggatctccttggggatcaccaccctgcccaggtcgtcgattctccttacgattccagtagctttcataacgtaaattcctccatttgctttaactatccgtttctggaaaatagtatctgtaaatggagggattttatacatttttcctcaagaatacatcaactgattcatcaactaaaagaatacttgaattgatattatgttaagatcaaaatttgattactttttggtttaattcaattcacggaaaatacagtgcatatgtattttgccaagttacccaatcccaacttatttccaacaaaactgagttctttatacacatgtattgatcattcctcctagtataataatggtatagtcaataataactacgagttaatagttacaaagtctaaatgaataactgaaggagggagattaacgcatcctccttacatgtcaagagctaaaaatccgtattggatgacagccccatttctataaaatttgaaaattgggatttctccctatttccggattatttgggttcccacggttcatatgcaccaaattctaatatatctgcaatcctcttgcatgcctttccgtctccatacggattgcaagcatgggacattttattatatgcttcttcgttttccagaagttccttgaagttcctatatatgttttcttcgtctgttccaactagtcttaatgtacctgcatcaacaccctctggtcgctcagtcgtatctctcatcacaagaaccggctttccatatgaggggcattcctcttgaattccacccgagtcagttaggcaaagatggcatcttgcttcgaaattatgacaatcaaatacctctattggctctataatgtggatctgatcacaatcaccaagttcttcttccgctgcctgcctaaccacagggttcatatgaatcggatataccgctttacaatccggatgctcatttaatactcgacggatagccctaaacatatggtgcattggctcgcccagattttcacgacgatgtgccgtgataaagatcagttttccatctcctacccaatcaagttcaggatgcgaataatcctgttgtacagtatgttgcattgcatcaataactgtattcccagtgacgtaaatatttgccggatttttcccttcacgcaagagattgtcacgacttagcggtgtgggtgcaaaattgtattgtgaaataatccctacagcttctcgattaaattcctcaggataggggctataaatattataagttcgaagtcctgcttccacatgtccaacaggaatctgaagataaaaacaagcgagtgcagtcacaaatgttgtagaagtatcaccatgtaccaaaactacatctggcttttctttttccaatacttcctttattccgtttaatatgtttgtagttatatcaaacagtgtctgcctatccttcataatattaagatcataattaggggtaacgttaaaagtattcagcacttgatctaacatttggcgatgttgagctgtcacacaaacaataacatctaaaccttctctctttttcatttcattaaccagaggacaaatttttattgcttctggccgagtaccgaatacagtcataacttttttcattgactggctctcctttatccaatttgatagtgagattatattaaataaataatgttgtacttaaattatcatttattttcttgacttaacaactttagcaggtatccccacagcaattgaatcagcgggtatgctctttgttacaacagcttttgctccgattattgaattattgcctattgtaacaccgggcattatatatacaccgtgcccaatccatacattatcacctattacaatatcttttgccatattaccttgttcaataataggcttcatataatcatgcttatgcatatcggttcttataacaccatcatatgaaatcaaacaactagcgccaataacgatacggctatcttcagtagtcaataactctgctccattaatatatgtattatcaccaatactaatgtggtttatatcattccacgtagtttcccccccaatatgatttatattgggattaatcctcttcttaaacagatttgttttgtatcgtcgcaatgctactatgtttaaccgttgaactttatcaacaatataacctattatgattaaaactgtatccatttacatatgctccctaaatatgagaaattacacttaatttctcataatatgtcatttgttcatccacactttcttgaatatactgttccttccaagaaagtttgaagaaatccgtttcacttcttaacatgtcccattctttattggaatacggtttgttcatcagagcatttaaaacatacagacatggattgttatactctactttatcgatcatatttcttgcctcttcaacattctcatatagtattcttatcagaaaattcataataaaataatctattattgcatcatgcttattccaataagctgttatagattcttttaggtaaataaacaacggattatgaggatatttactatataacatgaaccctgaccacttgcactcagtaagcacttgtcctgtccctactggttgatgtgcatccggagataagtgaaacgagaaaaaatcatacttttgaaaatctgttttcgatatctcattatcaatatataaagtgctgtcaatccaagcgccgccatattgttctaaaagataaatcctaattatatctgaaaaatgtgtaagtgtaattatctttctctcaaccttatcaagtattacctgtggaatatttatataatcacaaatattatctttagaaagtaatataatttttgtattattcgattctgcatactttacttgtgttcgatagcacatttttactatttcaggcatattatcatatccttgccaccataaagtccatagaatcagttgttcactatttttccgcttattcttttcccattctttaaatgattctctacttttctcaatataactttgattcattgtggcgagaaattctttaattatttgaatatatttatgatcatcgccgcacatttttgcaagtaaagctttggacgaaaacttgaatcccatgatactctttaaatctttagctcttttaatgcttttattattcaccttttaacctctaaatattcaatacatcaatcccgctacaaacatgctatcatgttatcttttcttatgaatcttataaacaatatttctgatttcatttttcattactctagtattggtaatagtctcaaaagcataaaccgtagcaataaaagaaatactgccaatacatatcaataggagaattgctatagtcgaacccttatctatggcatgtcctataatagtaacaataatacacattacaatacctgctaaaaaatattgtaagtttcgtttcaacatatttgcaaaattgaatgaatcccttatccttatacactgataaatacatactactaattctgatacaacagacgctatagctgccccgataattccccaaagtggaataaacaccagattcagtataatattaataatggcagcagcaacaacagatattaaataaatgctatcgagtcttctcggaataatgaactggcttcggaatacattaccccaggcaattattattaatattattgacagcacttgtaaaactggaattcctgagctaaatgcatctccataataccaaggaaccaaccaaggtgatatgctaatcaatccaaagctacaaaacgatgcaattatcaaagtcaaagacagagatttttcaatataattatacgtttctatttcttttcccattgctatcatatttgtaattcttggtagcaataccgttcccatagttgtaatcaaagcaactggaacccttgagagcttatacatattttcatatataccaacggaatccaaatccatcatcaagcctaaaaaaaccttgtcagttatggaatatagttgtattgatatcaccggcacagcaagaattagtaactgttttagatgacctactatttctcttagttctaaagtctcttttgtaagatatttcggtagtgccaaccacatagcaagaacgctaattatattagttgtagccattagaatgacatatgttaaggtgtcattttccgttcgtatcaataaaaagactaatacaagagaaagcactttaacgattatgtttctagaaacagctaatttaaattgttcaatgccaaaaaagaaccatccaatatctaaccatccagctactagaacaggatattgccatacaagatatggcttaatattatcatcggaataaaataatataattacaaaagctatagatgcaacaataaacgaaataaacagacatacaaaaatcgaccagaacgttttagttctttccttttgagttattttgctagcaatttcccttctcccatatatgctcacaccaagttgtattgcaatgacaaaatatgatgctatcgaataagtataggaatagatacctgttccagatgtacctagcactcttgctatgtagggggcggtaattaatggggcgatatatattaacacctcatatgcagccattaacagcgcgtttttgcgtgtactcactaagtctccctcactctccagtaaaaaaatttcccatcgactcttgtcctactctatctcttgcatctgcacaagctaaagccaaagccgtccatacagcaaatgcaacacacatattattttcaatcaaacttatatcaaatgtttgcttatataaaaatacaatcataaacgaaagtagtattctcgattgatatgaggtatcagacactaggcgtttccaaatttgatatagtataaggcccatgagtacgacaagtattaatcccccctcagaaagtaaagtaacataaagattatgaagagacatttccatctgggttgttatcgcttcagttttattaacgcccagtccaaatataaccgagaacccattatccatttggttatatacggaaagccacagttcatctcttccactaaagaatcttgcttttgttaagttatatgatatttcctctaacgtagccctatacggagattgagcaagatacgaatatatcattggaaaaatgttcaaaaatgcatagtaaccccaaaatgctttttttaagaaccccttccctttgcccttaaaaagaagtaacaatacagcaacaagaatgaatagcaggaaaccaaccgattgtgatctagcaccaacctgataggaaacataaaaccaaataaggcataaacagattatacgaattctcctcatccttttccattctgcaattacaaaaggaattgatactaatccaatgtatatataagattcatacattgcaatatttggggattttctataaattaaaaatcctaaaacaagcaaaacaccccaatgaataattctatttaacccttttatttcctccctcaaaagtttgaatttatccccctcaaaaacaaaccaaaaaataaaaacggttccaatatgttgaaagcatatataaattcctcgtacagaaaaactacttagtgcacaaaacaagtgataagctatccatacaaccaatagccaaaacaaatgtatttcttctttatctcttttttgcacaactagcgaaatagcagaaaaactcatcaggagtaatcctgcacctatataaaacggtcttattccaaatcccgaaaatattgctattattagtagcagagaaaacaagaatgtttcaacattcattctattttttgcatttaatgtataattattcatttttataatatccaatattttaatatttaaacgatctaagagcttctatcaaataattctgcgaagataatctcatcctaccaattcgttcatccacctgtttccaatcaattttagttgtataatcaaatttatcctgtaccactctatagggcaaaccagcaatatctagtagctgcattatccttgaatctctccctaagtcacctgtcaaaaaaacatagaaatcaacatgataaattatagaaagcgcaacacaatgaaaagaatcagtaaaaatcacttctgacccataaatcgcattcaatgcgtcagttggtccatataataaacctgttttaactctaggattcaaaatatcctttactgtaattccaccacatattttccgaattgatgcatgatcgatatttagctttctcataatttcatatgtctcttgtaaaaattctttatgaaacagataacaactcaccccctttttctttttaccataagagatatactttagccaataatcacgttctaacaggaatacaggatccaaaacaagtccaatttctttttcgagtagcaatctatttatatacaatttggcggtctgctctcttacagaaatatattttatatctctgatattgttcacaaaaatatcaatatatttttgcggcaccatttcctgtccgatacttgtagcataagttattaccttatccttattgatttcaggcaataaataattaacatcccctccatttagctcaaaattccataattgatcacttccaattataaaataatcacagatttgctcagccttgtgaaactcattactcagtattttttctgaaaaaaacacatctttgtaaaaagcagcaaagcgtctctttactatattcgataaggccgcatttattagcatttttattttgttcttgacatcaatacttctattactcaaaacagacttagagtctgtcttctggaaaattgctttatttgcatagtcaagtacaagtacatcaaacctattatcattatttgctacaaattgatataatgccttgcattgaaacgctgctccaaagttcagtgcatcctgataagttaagattccaattgttttcatgctactttagtaacccctataatacttgtcatcatttgtttgataagaaataatcttctatatggctaaaacatttttcataagtatatttctctcttacgaaccgcacaccattttcgcctaattttcttcttaattccttattatgatatagtttattaagcgcttctgtaatatcatctgcattatttctctgcaccaccacgcaagacttatcgggatctgttgcctccattaagcctggaatgtcagatattatgactgccgttccgcaggcctgagcttctattgctgacactccaaacgactcggattcaacagtcgaaggaattacagcaacatccatattcgcccactcacgcgcagcatcatcctgtgatatgaagcctaaccattttgtttcctgccctatgccaagtgaattcgctaaattctcatactcttctctataatccccccttccagctatacgtaattgaaatactacatttggattgattttcttaaacttagcaactgccttaatcagatagtctattccatatttaggatcaatacctttgacagtaccaatgataaatgagtcatccgctctatttctcctggctggattaaaaatctctgtttttacaccaaaaggtgttatttcaaaattcttatgtgtatacttacttgcatgcactgccattgccttactcgttgaaagcaacttgcttgctcgcaacaaactgaatctaatcaataattcatgaaacaatgatttttccggaaactcataaacatcagctccccatacggataaatagtattttttgattcctgaaaaagcagcaactgcaccataacttgatgcatagtgaacacttacaatatcaggatttatcttatttatgagccttcttactttattagcttgaaataaatatgagattttctttccatcactttttttagcatccattccacaatcaatgtagtagacatttacattgtcaatttctcccgcgaaaaatgaaataacacttacctcatatcctcttgcgacaaaatagccacaccatttttgggtgtgataattatttgctgcagccaaaaaaacaatcctcatttctaatccccaactcgtataattacatgctttaataatcagctctaaacactaaatcactctgcttgatcccaaggccttttttcattagatatgatagactccaggaagattacagatgttatggcaatccaaaaccaccttactctttaacttgtccatattatccttaatctcattatgttttaccataatgacaacaaaatcaacggagtctaagaactcattcaaattatggtactggttatctactacatcttttgcaataagaggatcatataccttcaaccctgccgcaagatgcctttcttgactttctaacaattgaagtgtaggtgattctcgcatatcatctacattctctttataagcaagtccatataaacctacacgttttatatcagtcatacctttttctttcattatttcgtatatgcggttaagaacaaaatcaggcatactatcattagttttcatggattcatcaattactttcgcaagagacggataatctcctaccagaaaccacggatcaacagaaatacaatggccccctactccaggtcccggctggagaatattaacacgtggatgcatattacagattttaataatttcataaacatccatgttatcttgtctacaaatctttgctagttcattcgcaaaagcaatatttactgccctaaatgtattttctacaacttttgtcatttcagcagttttgatatcagtaacaactatttctccctgacagaaagacgcatatatctcctttatgacctcgccaaccaatttatcatcagcgccaattgtacgattattatgaagtaattcataaaccatattccccggaataatgcgttcaggtgcatgtacaagattcaagtccacaccaacttcaaatccattctcttcaataacaggtctaacaaatttttcaatagttcccggtgaaactgttgattctattacaataattgctcctttacggcaaaccttcataacatcttttactgcttctattacaaaacaagcatcaactttcttgctaaacttatcatatggcgtaggcactgagacaatatagatgtccgtcatctgatactccgtagtaaacttaattccagcttctaaggcattctgaaataactcatccatccccttttccttaaaggttgtttttccagcattcagcgtggctacaagttctttattataatcagttccaacaacttccacaccatgtgttgccagcatcagcgcggttggtaatcctatatatcctagcccgataacatttatcatagtattttctccttgtatttagtaacttgctcaattacggtaagcaacttatctgtcagaacaccgaagtcaaaatcctttgctccctttttcccatttgtaccaatttcaatatattgatctttatccatatcatggaattcaataatggcatttgccaaactttctgctgtatcatcatcgagttctataccacattgatacttgttaattaatgaatagcccatatgaactgttgaaatgataggctttccactagccatatattcaaataatttatttgagctatttcctcttgaccagttatattggttctgggagtaatttaaaacgtttactgccgatctactcagaacatatggtatatattgtctatttatatatcccttaaatctaacagtatctattcgttccttgtttgccctttcttttaattcttcgagttgtactccatccccaaaaattaggaattgtatatcactatagtcacctctgctctttattatctttgcagcatcaagtaacttaccaacattattcaccgggcgaatagtacctgcatatgtaacattaaatttactattatctataagatctggatcctcaattttttcttcttcaatgctcttttggtaggccattaaatctacaccattattgatatagtagcattttttcaaatctatatctccgccctgctctgttatccattttctctctttaagataatctgtgtcaccctctttagtaaaaatcaaagcatctgcattcttgtaaatccaatgttccccttttatcaatattttacctaataggcttttctctttggcttttccaaaactaaaaatcgcttcaggccataagtctctaatttcacatatacaagggacttttattctctttgatattttgattccggcaaccatagtcaatgggtggacgcttgatgcaataattacatcaggctttcctcgctctctaacaagtttctttgtaacagggaataaattcttataaaatactacccagttttttattcttgatactccattgccatcccacggtggagttttaacaaatacaaatcttgaacactcatcctcctgctcaacaaatagtttttcgcctgtatctattttcctatttgtgtttagaaaagtactagctgtaaaaacagtcacattgtgcccttttttatttaattctcttgcaaaccaataatgtctgcccgccttatcttcgaacatttcagtagcataatgattcataatccaaatgttcatgcaattccttcctacacaactttgatttattttgaaatgatctttacttcgttgcacgtcatcatataaacgtcatcatcataatccgccatattagaccgatttaatattccctaaaggtttttcaatataagtttcatatgatcacattcacactcatatacctatggataaccgtcgtcaaagtgtggattgacctcacttatatagtatcttccattgatatcaaatatataaatacctatttgatttctatatcctgtctcatttataaatcatttaaataaagaaagcaattccggacctctaaagcttacagttttatctgtatccccagccttcatctttattttctttttgaactttgtctttttgaacaaatcttagagatgaatgttttcttctaattataaaagtgatataattcattacctttataaaagctctccaaaacttaattaaactgttttaaccttgttctcgacctcttgggatatagtattctacagctattcacatacaaacaaggaaaaactatatctctcacatatccatgactgttgataaacttaaaaatataatgagtaggaaactccccatcctaaatagtaatttcctactcaatatttatcctcccttacttacactctttgattatcttaatatcattgtatttcgtcattccccccttcattatcaccaatttttttcctatgcttccttctgtaaattgtcgctatcttgtaagttgtataaaacacttttcacactaaacttttacttcttatagcagttatctacttcacaatcaatctttttgattatcacactgtcatacatcatcataacaatattatcttcataattaccaaaacaaggctgattctcaatcccattaatattattctcaattaatttcacaaaatcaacgccagccccatacgcatgaagatatgctcctccaaatctcggattcacttctgataaataatacttgccatttcgataccaaaggtccatatctatagggccattaaactgaaacacccttaaagcctctctcacaaatttcaccaatttctcgtccttaaaggatatagctttgtttgctcctcctattttagtagcaagttttctcttactgaataaagagaccggctgatgactaatagtatctatataaatatccacatcaatatcaactgcatcacccatatactcttgaataattaatcctggctcgccctccatcgcacgttgcagttccggcatatctgttatctttcttgcaccgactgatccactccccgtccgtggtttaacaaatacaggaaatgtgatttcccctctgtcatacgctacaaaaaaactgtccaaatcgccatatgtcaataccgtttgaattctattctcagttagatattgaaacattgtaaacttatcaaaacatatttttgcagtttcttcaaaaggacagagaacttctgtaccgattcgtttaaattcgtctcgatgcattgctaataacataatttccggatcgatcaaagtggttactgcatcaatattttctttttgacatatttccagaatcgtagaaagatattctgggtcttcaattcctggaacaacataatacttatctgccatataaatagccggggctgtttcgctcatatcggttgcaataatgcatccctctgctcccatagaatttcgaaagtcttttaaaagttctgctcttcttcctgcactgcaaaataagattttcatggtatgctagtttatctcctcgtaatcctttcttattcgtttactttgtatcgccatatattccttgacagtcatccgttcacgtatttgttgaatacactccttgttttttatataaatatctggaaaataacggataaatgctcctccaagagtcattgagtatgctcctacccgatggtaaattattcgatctccctggctgagttctttttgatctttaagtatcattaggcgatcatgatccatgcaggtatatccacaaataatttgagatgttggaattacatttcccgttgtctccaaagtgtgcatataccccgtttttttccataaaggatcaatatgaactctgctcccatcagttgtaacaatccgagccttcacggtttcttttacatccaatacagacgtgaccaaatcagctgctgatccgatcaacgcactccctggttcaagaattaatttagtctccttaatattgataaccttttctaattcattttttattttatttatgtaatctctggctgttggcttaccctctactccaccaaaaaaacctcctccgatatcaacataagaaggcgataagtgatatttctcaatgagcaaagcagcatattttgcaattgctttatatacctccaaacttctggttatgctgttacaatgtaaatggagaccaatattgttacaatggtagagactctgtatgacctttaaagccttttcaaaatctccggtttcgtcagaatatccaaatcgaaatccatcatctacgtatccgatatcctccgaatgaaaccagttaggatttatgtttattcgcaagccaaggtttcccgaaatatccggatgatatttttcaatatatgctagttcctctttggaatccaaattaataaatgacttgccattaaatgcattttgcaaaccatctcttgttttaattggcccattgaatatgatttcttctccttgaaatccacataactcagctagttcatattcttcatctgatactgcttccgcaaatatctgtctttccttcataaatctcagaagccacggaagagaatttgtttttatcgagtatgcaagctgcgaatacggccacaactcagccaatgcctcttgaaattctctaatgtttttttctaaaatttcttgattgattacaaaatatggtgtttgaagcttcatctctctccctgtcttcctcaattgttccagtaaaatcctccatagtcacagcagttccggatgaaattccttccctctttaatactgtaccgatggtctgaaaaatgatcttccaatctcctaaaaaagagatatggtctacatagtaaacgtctttctcaaaacgttcctcccaggtgatggcattccttccatgtacctgggcataacctgtcactccgggacgcacctcatgccgtctcttctgctgtgcattgtaaagaggaagatactgcaccagcagcggcctaggccccaccacgctcatatccccctttaggatattaaacaactccggcagttcatccagactgctggcccgcagcttcttgccaaagctggtcagccgcacctcatccggcagcagctccccattctcatcccgggcatcggtcatgctgcggaacttatacatctcaaagatcctttcgtcctttcctggacgtttttgtttgaagagcaccgggcttcccagttttacccgtaccaggaccgctgtgaccgccatgaccggggacagcacaatgatcgcgcccgccgacagaacgatatccaggaatctctttatgtagtctcggtacagccgcttagtcattgaaacagctccttatgatctggataatggtatcctgctcctccgccgtcatcttattatcactcggcaggcacagtcccctctggaagaggtccatccccacatccagcggctttccgtctttcccgacagcccctccgacaatataagcattggtctttgcccgtccattcccttcccgggtcacaaacccgttcatccggaagatgggctgcatatgcatgggcttccagatgggacggccctcggcattatactttgccagcgtctccaggatctccatggggcagctctttcccggttccgaaatgtacagagattcctgctccccgcgcacctgtcggcacatggcctccggatcgatgaccaggcaggacagccagtagttgggctcggagctttccgcgtcaaacggattcatccgtaccggaaggcccttaaagccctccctgtaccgctcgtaaatggccttcttctgtgcgatgtgctcctttaagtacgggaactgcccccgcaccaccccggcgatcacgttgctcatccggtagttgtagcccacttcctcatgctggtaccaggccgcgttctcccgggactgggtggaccatttccgggcccggtccgccgcatccttatcatcggtcagaagcattcccccggcagagccggtgatgatcttgttcccgttgaaggaaatggcattataggtgccgaaggtcccggtctgctgtcccttataggaagcccccagggattccgccgcatcctcgatgatcatggccccatggcgttcacagacggcctgcagttcatcgatctttcccggtgtcccgtataaatgggccataacaacgacccggacctccggatatagttcaaaggccttttccagagccactggatccatgttccaggtatcgtattcggtgtcaatgaacaccgggactccgccctcatacaccaccgggtttacagtagcggaaaaggtcatgtccgagcagaacaccttctccccgggctttaccccggccagcttcacggccagatggagggcagaggtgccggtggccagggccacggcatacttacaccccacggtctcacaggccagacgctccacctcgttgatattctctccgacggtggacatccagttcttttcataggcgtcctttatatattccagctccggcccgtgcatggtgggcgagctgagccagatctttttttcaaatggtgtgagacgttcgtctgcatggaacatgtgatcatcccccttgtttttaatagaaaaacatcctgtttccacaggatgttttcttctggttaagaccccctgaaacagggcctttctgtttttcttttactgtttgattccctgggcttttgctccgggaatgaagctccggatccatccggtacttttatcccagtcatacttttggaactccggctcctgtttctggcggaaaactgtattttccacagtggttccaggcctttgggggaaagctccaatatctttcaccctcccgataggtcggatatcaggcctttacccccgccggatgatacgtccccacgatccgcatcacatcctcccggatcctgtccccgtcctcattggcggtcacatacagctcttccagctgcccctcaaaccgctccatatcgaactcaatgggctttccgatatggatcaacttattgggtgtatcctgcatcccttcctcgttcatgagaagctcctcatataacttctccccgg

SEQ ID NO: 841 - DNA, 10156 bp, unidentified
  source 1..10156: mol_type = unassigned DNA
ttacagcatcatgatgagccgcgtaccgaaggccgccagccatgctacgatgcactgatttgccaccatgataagcgcccacttgccgcccagctcccgcttgaccgaggccaccgccgcgatgcagggcgtatagagcaggcagaacaccagcaggggtgcagcagccgccggggacagcgcagcggcaaaggccgcagaggagccatagaggatggtgagggtcgaaacgacgctctccttggccataaagccggtgatcagggccgtagacacccgccagtcggcaaagcccagtggcgcaaacagcggcgcgatcccgctggccagccatgcaaggatgctctgctgcgggtcagcggtgaggctgagccgcaggtcgaagctctgcaggaaccagatgatgatggtcgccacaaagatgaccgtaaaggcgcgctggaggaaatcgcgggccttttcccagagcagctggaccacattcttgaggccgggcaggcggtagttgggcagctccatcacaaaggggacggcctcgcccttaaagacactgctcttcagcaggatggccatcagaatgcccaccgcaatgccgaggaaatagaggctgaccatcaccagagccgcgtgctccgggaagaaggccgccgcaaacaggctgtagatgggcagcttggccgagcagctcataaagggggtgagcaggatggtcattttgcggtcgcgctccgagggcagggtgcggctggccatgacgccggggacggtgcagccgaagccgatgagcattggcacgatgctccgccccgagaggccgatgcggcggagaagcttatccatcacgaatgccacgcgggccatgtatccggtatcctccagcagagagaggaagaagaacagggtcacgatgatgggcaggaagctcaacacactgcccacaccggtgaagatgccgtcgatgaccagcgagtggacggctgcgttgacgttccacgccgtgagggtggagtccgccgcggcggtcagggcatcaatgcccatttccagcaggttctggagcgccagaccgatgacgccgaaggtgaggtagaacaccagcgccatgatgcccacaaaggccgggatggcggtatagcggcccgtgaggaaccggtcgatccgggccgagcggagctgctccttgctctggcggggcttcacgacggtctgctccaccagctggtggatgaagtggaaccgcatatccgcgatggcggcggcgcgatccagaccccgctcctgctccatctggacgatgatgtgctcgatcatctctttttcgttctggtcgagcttcagggccgcctcgatgcgctggtcgccctccacgagctttgtggccgcaaagcgcaccgggatgcctgcggccttggcatgatcctcgatcaggtggatgatgccgtggatgcagcggtggactgcgccgccgtgatcctcctcgccgcagaaatccatccggcccggccgctcctgatactttgcgacatggagcgcatgatccaccagctcgtccacgccctcgttctttgccgcagagatgggcacgaccgggatgcccagcatggcctccatcttattgatgcggacagtgccgccgttgccgcgcatctcgtccatcatgttcagcgccagcaccatcggcgtatccagctccatgagctgcatggtgaggtacagattcctctcgatgttggtggcgtccacgatattgatgatgcccgtgggcttctcgccgatgatgaactgccgggtcacgatctcctcgctggtatagggcgacatggagtagatgccgggcaggtctgtgacctccgtattcgggttattccggatcgcaccgctcttgcggtccaccgtcacacccgggaaattgccgacgtgctggttggagccggtgagctggttgaagagggtcgtcttgccgcagttctggttgcccgccagcgcaaaggtaagggtcgtgccgtcgggcagagggttctcgccctttttggtgtggtagcgtccgccttcgccgaggcccgggtgctccaccggcttttcactttctgccgccgcctttttcaccgccggggctttggccagagtgaccccgatgcgggcggcatcgtccagccggagggtcagctcgtagccgtggatgctcagctccatcgggtcgcccatcggggcaaacttgaccagcgtgacctcctcaccggggatcagccccatatccagaaaatgctgccgcagagcgccttcgccgcccacggtcccgaccacggcggtctcgccgatgttcaaatctttcaacgtcatatggaatgttcctctcgagcgcgtttgttagtttgcattaacaacagtaatataggctaactttccggcgttgtcaagagaaacggggctgttctgaactgttctctgaaaaaaatcatgccgccttcctcgaatatccgaaaaagtgcaaaaaataagagcctgtacccgggaattacccgccgtacaggctcttatcgtcttttattcagttcgcggtgtggtagccatcagggttcttcttctgccagttccagctgtcggcgcacatttcctcgatgccgtactcagccacccagcccagctcgtttttggccttggtggggtcggcatagcactcggcgatgtcgccggggcggcgggcctcgatgacgtaggggatgggcttgccgcaggccttctcgaaggcgtggatgacatccagcacgctgtagcccttgccggtgccgaggttgcagatgaagaggccgcagttcgtttccagcttcttgatggcgcagacatggccgcgggccaggtccacgacatggatgtagtcgcggacgccggtgccgtcgggagtggggtagtcattgccgaagacatggaccttttccagcttgcccacagccaccttggcgatgtagggcatgaggttgttggggatgccgttggggtcctcgccgatgaggccggacttgtgggcgccgatggggttgaagtagcgcagcagagccacgttcagggtggggtcagccttgcagacatcggtgaggatgcgctcggtcatggccttggtggtgccgtaggggttggtggtggcacccacggggaaatcctcggtgatcggcacactggcggggtcgccgtagacggtggcggaagagctgaacacgaagttgtggcagttgtgcctgcgcatcacatccaggatgaccagcgtgcagttgaggttattgtagtagtattcgatgggcttggacacgctctcgccaacggccttataggctgcgaactggatgaccgccgtgatgtcgggacactcggcgaagatcttctccacatcctcgtgtttggtcatatcggcctgatagaagcggaagtccttgccggtgatctgcttgacgcggtcgaggaccacaggggatgcattgtagtaattgtccgccacgacaacgtcgtagccggcattcaggagctcgatgcaggtgtggctgccgatgtagcctgcgccgccggaaaccaaaatagccatgtccagtacctctcttgttccagatgttgctttgcgcagagcccttgtgctctgtctgactaaaggataccgctttttgcacagagaatcaagtaccggcttttttattaaaatgtatttttgttgcatcttttcagccagtctgatgaactgcaaagatttttagtccgcaaggcatggagaggacacgcaaaggacagcaaaggacagctcccgcaagagagctgccctttgctgcggctgatatttgcttacaaacggccgcactgacggccggtgaagaagcggagcgtagtgttggcccggaagactttgcctgcccgcagcaccgtcgtcgggaactccgggtgagaggggctgcaggggaagtgctgggtctcaagggcaaagccgccgtacttttccagcgggacgccgcccttgccgggggaggggcagttctgcaggaagttgccggtgtagagctggatgcccggctgggtggtgtacatcttcatgctgatgccggtcttgtcgctggacgcccaggcgcagaggctctggctggcaccccggggccggtcgaggacatagcagtggtcgaagccgccgcccgccatggtggtctggtagaagccggtgtcgaggtcgcgtcccagaggctttccggtgcggaagtccatcggcgtaccgtccacgggcaggatcttgcccgtggggcaggtctcgttgttgccctcgaggtagttggaagcgtaaatgcggagcttctggcccagcacattgccgccgccgtcgaggttgaaataggtgtggttggtcaggttgatgatggtgtcctcgtcggtggacacacggtagtccatccgcagggtgttgtccggcgtgaggatataccgcacactgaccttcagatttccggggaaaccgtcttcgcccgccgggctttcggtctccatcaaaagggtgtcgccgaacatcttcacatcgtaaattttgcgggggaaggtgccgtgcaggtgatttttgccattgttggcttccagcttgtaggtcttgccgctgagagaaaattccgcattttcaatgcggttggcgtaccggcccacgaacgcaccgcagcaggtgctgccggatgagttgaaatccgcctcatagtcggcgagggtgtcgtgcccgacgaccacatccaccatacccgtttttgtagggacgaagagatttttgatcacacagccatagttcagcacgctgatctcaagtccaccgggattggagatgatgtattcatccaccttatcaccgttttgggtcacaccaaagggcttggagcggaactgtgccataaggctcgcctccttcttcattattttcggtcagggcagcgcagccccggcctcatccataactatgattatagcacagttttccagccttgtgtgagaatgattttagatttatcttccaaaatttcgagagattttttggacatattgcctccctctcaggcgctgacgcgccagctctcccaaagggagagccattggcatgacggtcaggtctgagctgcccgcttgggggccactgtggcgcaaaagggcgggccctgctatccccgataggcggtgctttcccggcgcgccccggacgctgctgctatcagggaacaaaagaaaccgccgcacatcagactgtgcagcggtttcggggcagatacttattctatgtgagctcagaaagcccggaccacggtgggcggcttatttttcgtagatgacgatcatgtagcagtaggtatcaccgccgtcctgcacacggtggacggccacctttacgctcgtccagtccgaagaatagttggtataaactctcacgccgcctcgggagcaatggagcacataggaagcctgggtgatggcactgcccgccgactcgggcatttttgccgcataaaactgcacgctgacgctggtgctgtaatccttcagcgcctctttcagcatggcaataccggcagcgctggagttgtagaaatactcgcccgcagcgttgctggccagataaccggtagatccgttgaaccattttgccttgtttgcccgtaagtcctcatcgatcttctcaagggcagccggggagacatcgtaggtcaccttcaggtcaggttttcctatctggccccggagataatctccgtaggccttttccatggcacgctcggtcaccttgccgccgccgcagccggtaagcagggtcagtgccatcatggccgcaagggccagagacaggatacggttgagtcgtttcatagtatgcgtcctccttatagtatggcggtgttccagcgaagcatcgacacctttttcttattataccccccccccctacataattgtcaataggctgtccatgaatgctcccgccaccgacatgatcctacccggagcgagacggagagggctttccaggacagtgctctatcaaagagccttcctatcgccgtgtgggcggcccaccggcagcgggctaaccctctcaggcgctttgcgccagcaccgggttgcggcgtgactgagagggctagcccccccaaaaagaaaccgccgcacatcagactgtgcagcggtttcggggcagatacttattctatatagataggagacagcctcaggcctccggctgggcgggctgagcctcggcggcgttcgactgcgcgatatactcggcggcatcgtcggggatgtcgtccatcccgtcgtcacccacatcgaccaccagcggcggcttcttgaagaggatgtcgtagaggatggggacgatgtacagggtcatcagggtggcatagctcaggccgcagatgatgacgatggccatgccgctcatgagctggctcgccatatcgttgctgaacaccatctgcagcatggccagaacggtggtcagggtggtcatgaggataggacgcatacgggtcttgccggtggcgacaagggccgcacggcgctccagaccacccagacgcagctggttggcgtagtccacgaagacgatgccgttgttgacgacggtacccatcaggacgatgaagcccatcagggagatcatggtcagctgctggccggtgaccagcatacccagcaggccgccggtgaaggccagcggcaccgtgaacaggacgatgaagggggacagcaggctctggaactgagccaccatgaccagatagacgaagggcagggccagagccatccactgcaccatctcatcgaccatcatgttgacggtggaggactcgccgtccagcgagaaggagcagccctcgggcatctcatcggtgagggcgaaggcgtccagcttcttctgcagcacgcgggactggaccgtggtgttgtagccgtccagcgtgtctgccgtcaccgtgatgtagcgggtctggttctcgcttgtgatggagtcgggggcagtacccgtcgtccagaaagcaatatcgcccagcgtgcaggtgccggtggtgatggtgccggtggcgtccataacgctggtggtgaaggtcatgtccatcatgttttccttggtcacagggtcaagattatcgctgatctggactttcatggtggagccgtccaccgtgacgggcgtctccgccgtcgtggtggtggtgagcttggcggcgatctgctggtagacctgcgcaaccgtcaggccataggcgcggaccttgtcgcggtcgatgtccagattgatggtcgcatcgccctggccgaggccggtggcggcattggtgaagccctcggtgtcgttgaccatctggacgaccttatcgcccagtgcggtaatggtatcggcgtcagggccgtagatcttgaccgagaggccgctgctcagctggctggtcagatcctgcatgccgctgatctcgacggtgccggtgcagttctcgacgccggaaacggcatctttcagggcctgctccacggcggcgatccgggtggaggacagggactggtccagcatgacgttaaaccggtagctgccgtagctgttggcggcgctcagcaggtcggtgatagcgctgggcaggcccagctgaccgatgtcgatgccggccacagtggtatcggtggtgacgcccacctctttcacgccgtccacggccatgacagcctcgacgacctgtccggccacaccgtaggattcctctttggtcaggccgtcgtcggtggagagggcgatggtggcctcattgctggaaatttcgggcagaaggacgacgcccatggagaagaccttccagccgcagaaggccagcagcacgacagcggccagcagcggcagagcgcggtgctgctggcaccactcaaggctgtgggcatacttatcctggatcttttcgaaccagaccagacgcttcggctcagcctttttcaggacggtggaagcagcggcaggcacgacggtgatggccacgatgagagaggccatcaggcagtagccgatgcacatggacatgggctgcagcaggctgcgcaccgtgccggaggcgaacaccaccggcaggaagacgcagaccgaagtaagggtggaggccacgaccgacatgcccacctgacgagcgccctgcacggcggcgcgggccgccggtacgccccggccccgcagacggtagatgttctcgatgacgacgaccgagttatccaccagcataccgacgcccagcgacaggcccgccagcgtcatgatgttcatgtcgaggccggtgaagtacatcagagcgacggcgaacaggacggacagcgggatgctgacgccgaccacgagggtgggcttgatgtccttcaggaagatggccagcacgatgatggccagcgcagctcccaccagcatactgctgatgatgctgttgacgatgatggtgatgtagttgccctggttggacaggacgacgacgtgaaggtcagaatactgggcctgcagctccttgaatgccttcaggcagccgtccgagacgctgctggcgctggaattggcgttgcggaaaattttcagcaccacggcccgctccccgttcaggcgggtgtagctggcctcggcgttgtcgatgacggccacgtcggccacatcggagaggcggacatcgccgaagccatcaacgtggagcagaagtgcgccctcgatgtccgaaacgctgtcgtactcttcgccgaccttcagcagccaggactcgccgctcttatcggcgacgtagccggcaggcatcgagaagttctgggcgtagatgagctgggcgagggtcttgatgtccagctgcttggccacgtcggcgctggcaagagccttttccttggtctcctcgtagagctgcttggcgtcttccagctggttttcgtagtccttcagcttctcccgggcctcggtgaactgcatataggcgctgagctgctggctggaatagctgcccagagcgacggagaactggttcatcaggccggggacattgtccatggctttgatgacctcgtccagagtcttataaatggtgctcaggctgttggagacttccagctcgttggcaaggtcggagacggtgccgtcgctggtacccagacggccctgcagctcctgcagagcggcggtgagcttatcggtgatgtcgcgcagctcgccgacgatctcgatgagggagtcgatgtcccgcataccggtctggttgaactggtccacgacacgctgcaggccgtcgcggacgtcgatgagggcctgctggatctccggctcattgaccacgccgatgagctggttgacgctgttcagcaaagcctgcgcctggtcgcgcacgacggtgacggcgtcggccacctctgtacccatctgggccatgaccgtatcggagacggtgttgccgaagtttttcagctgtttttcatactcggcgcggcccgcggcgatctgcgcctcagcggcgtcgagccgggcgcgggcgtcggccagctgggtgtcgatgagctccagcaggcgggcgttcacttcgtctatcttatcctgattcagctgcacctgcaccatcttttcgatgaggccgttggctgacacgctggaaacgccgctggtgcggcccacataaggcacaagggtgttatccacgaagtccgacagatcgtagacatcgctgccctcccggctgacagccaccgtcataaaggcgttcatgttcaggctgtactcgatgatggagggggtcagacaggtgccgggcaggctggacgcggtctggtccaccttattggaggtcttgaccatcgcgctgttcatgtcggtgccttcggcgaatttcatgagcagaaggctgtagttttctgccgaggtcgccgtgatgctctcgacgccggacactgtacccagcgcgttctccatcacatcggagacttctgactccacacgctccgggctggcaccggggtagacggtgaccaccatgaggtatggcgtgctgatgtcgggcagaaggttcgtctgcatgttcgtgatggacacgaagcccagcagcaggaccatgatgaccgcaacaaggatggtgaacggctttttgacactgaatttttccat

SEQ ID NO: 842 - DNA, 14079 bp, unidentified; identical to SEQ ID NO: 577
  source 1..14079: mol_type = unassigned DNA

SEQ ID NO: 843 - DNA, 14318 bp, unidentified
  source 1..14318: mol_type = unassigned DNA
atggagatggaacagctctatgatgtgatcgtgataggtggagggccggccgggcttacggcggccctttatcttgccagggcacgctatcgcgtgttggtggtagagaaggagcatttcggcggccagatcactatcacgaatgagatcgtgaactatcccggcgtagcgaaaaccagcggtagagaattgacggacacaatgcggcagcaggcagagggcttcggtgcagagttcctgctggccgaggtcacggcttttgaactggacggagacgtcaagaccgtgaagaccgggcgcggagaataccgctgctttggcgtgcttctggccacgggcgcccatccgcgtatgataggctttcccggcgaggcggagttccgtggacggggcgtagcctactgcgccacctgcgacggcgagttttttaccggcaaggaggtttttgtcataggcggcggctttgccgcggcggaggagagcgttttcctgacacgctacgcaaagcacgtcaccatactgattcgcgaggaggacttcacctgcgccgaggctgtgtcgcgcgccgctaaagagcatccgaagattactgtcctctcccataccgcagtggtggaggccacgggcgatacggctctgcggagcctgcgatacagagatttgagaaccggagaggaaacggtttttgcaccgcatgaggataccttcggcgtgtttgtgtttgcgggctacgagccggaaacggccttgatccgggacaagatcgagactgacccgagaggctatatcgttacggacggctcgcagcggacgagccttgagggcgtatacgccgcgggcgacgtgtgcgtgaaggagctgcggcaggtggtcaccgccgtgggcgatggggcaaaggctgcgactgcgctggaaaagtatgccgcagccatgcaggaaaaaactggtcttcgcccccgaaagcctgagataaaagaaacgaaggcggcatccggcggcgaggctcagcccgaggggatattcccgcagcaggtaatgcagcagcttgaggcagtatttgaaagaatgcaggagcccctgatactggagctttgccttgacgagaaggctgtttcagaggaactccgctcctatatggaggagcttgcacgactcacacccaaactcacagtaagaaaatctaccgaaggcgctgagcatatgccgctggtgcgtgtgctgcgctctgacggcagcgactccggtctcgctttccacggggtaccgggcggacacgaatttacttcttttatcatggggctttacaacgtggccggaccgggacaggctcttgacggggaaactatgggccgaataaaggcgcttgatgcgcctacagatatgcagatattcgtttcgctgtcctgcaccatgtgcccggaactggtgatcgcagcccagcacatagccgccctcaaccctaatgtcagggcagaggcatacgatctgaatcacttccccgccttgaaggaaacgtataatgtcatgagcgtaccctgtctcgtgctgaacggcgaaaaggtactgttcgggaaaaagagcataagccagctgctggacacgctggaacagcaagagcaaaagagccgcacatcggatctgcccgagggatgatggccggaagcagtacatatcagttacttgagtaaccgctgccggcccctgcgctgacaacggcgttgtgataaccggggttgatatgcgactgaagccaaggcaggctgcacacaggcggcctgccttttcttccgccaagcggttagagatggctaactaaaatacagagcagaaaggaactcagagcttgaacagggaaaaggagatcgaaaccgttactctcatggtgcgccggtattgccggggcgtacatgggacaagggacggggtactttgcccggcgtgtgccgccctgccggaatatgccaggcagcggcgggacggatgcccgcatggggagatagacagccgtgagtgaacaaaaaagtttctgggacagaaatgccggttgttacgaccgctttatgcgaaaggatcgggcggcgtatgaggagatgtatacgctgatccggccggtcgtgaaagccaagacggtactggagcttgccaccggtacgggactgatcgcaaagcacatcgtgaatgcggcggcgcacatcgaggcgacggacgcctctgcggagatgattgcagaggccaagcgggacgaccgctcggcgaagctgcacttttccgtgcaggatatgttttgcctgccctacgcggataagtcctttgatgtagtgatcgtgtccaacgcgctgcacatcgtgccgcagccggagaaagcccttgccgagatccatcgggtactgaaagaggacggcgtgctcatcgcgcccaccttcacccacgcggggaactcgttttccggcaaggtcaaagcctttttcatgaagctggcgggctttcccctccacagcaggtggacgagcgagggatacctgcgtttcctgcggcaaaacggttggtcagtgcggaaaagcgttgttctgaaagcctcgttcctgctgacctatgcggaatgtgtgaaatcggaggggcaggatgttattttttgagaacacccgcaagcctgtggggcttggcgggaagctcatggtcgccatgatgaatgtcgggcacagtgccgtggcccggtgggggcttcaatttctgaatgctgcgccgttgtgcaaggcagtgtggcggatatgatcttcgcagacgactggttcgatgcggtcacagcctttgagatcctctatttctggcccgatctgccgcaggctgcggttcgtggactgcaacaagccgttctggaggaaacggatggaccaggcatttgtgcgggcgaaaggcggctgcgacaaatggcacgattacgagatgacgattgcgccttacgaaaacggccagcgcacttgtcctgtcccttggcatcgccattcagaattttcccgagggggcgatcatctccatgccgctccgggcggagggcgagagcaagggcagggcgtttctcggcggcgtgctctccggcgtggtggagcccatcggcgcggtgctgacgattcttgcggcgctgccgtattttctgagcttcgcggcgggcgccatgctctataaggcattggcggagtaagaaatgatgcccgccgctgacgacaactttagcgacagcttgcgcggtttgcgtttgccaaacagcctatccgaaaaggcagggacaccacttgcggggttcctgccttgcgctgtatggcgatgcttggagtattgaaaagaatatgcgcaggcatccaggacaggcggacagagagtctctgcattgaactgggcaaacagaaaaatcacaaacctcattgacaaactcgatctgctcggttataatataccagtagtatatactgctggtatatcgggaggcatcaatggaacgtacagagactcaaatgaagatcctcgaagtggggaaaaaagaatttctggaaaaaggattcaaggacgcatctctgaataaaatcgtcgcagaggcgggcttcacgaaaggcgccttctacggctattacccggataaggctgcgctttttgaagatcttgtgggcgaggcggcaaagggactgttggagcagttcaaagccgcacaggccgcccatttcgctcttgtctccgaggaaaagacgaaggacagcctgaagctgtccactgagtatttgcgtgtctttgtggaatatatgtacgcccattttgatgccttcaagctgatcctctgccgggcggaaggtacgcgctatgcaaatttcttggaggagcttgtggaactggaggtagagtgctcagaggaatactacgcacttctccgcaaaagaggaaagctctccgggaaaatgacaaagcagcttcaccacatgatcaccagcgcctattttacggcggtatgtgagacgattgcccatgatatgcccaaagatgaagcgatgcggtatattgaggagcttgcaaagtttttcaactctggctggaaaggcttgctccggctggaataatgcacgatcacacaagcgctttaatttttttacacgcgagttagcatattctaactaaacgatataaaattggaggtcgtttattatgcttaaaacagattcgaagaagctggaaacaagggactttatatcagtgggcatcttttcgctcatctatgctgtggtggcgtttgtggttggcggtgctgcgcagatgacgccggtcactttcccgtttatgccaatgatcgtggcgctctttacggggacagttttcatgctctatgtggcaaaaataccgaagaagggagctctctccattctcggtgtaatcgcggcgatcttgctgtttgttacaggaatgttctggatgatgtccgtattcttcctgggcttcggcgtgatcgcggatattatctgcgcttccgctgatttcagatcctttaagaaaaacctgcttgcctactgcgtcatggcgcttgcgccgatgggggcatacattccaatggttgtcatgcccgcacagtttgatgcttttatgaagaataaaggtgacttctcctcctttgaaggagtgattcattcgattggggctgcctggtgggcgatccccgcaatgattatcgggacgatcgtctgcgcgatcatcggcggactgattggaaagaagcttatgaaaaaacactttgaaaaagcagggattgtataaatgagactcgacccacggacgaagcttctgattctcgcggtcacaagcgtttccgtttttatgaataaaagcatcgcggtggagtgtgtgcttgcggggattccgcttgtgcttctgagcacttccggcaatctgaaaagaacgctgaaatacgcagctttttttctcacgcttctgctgatccagctttttatcgtaccgaggctgcccgtgactttcggcgggatcgtctatatgtttgcagtgtatatccgcaagcttcttccctgttttatgctgggcagctttctgattgcaacgacaagcgtaagtaaatttcttgcggcgatcacaaagctccgattgtcgaaggggctcacgatcgctcttgccgttacgctccgttatttcccgaccatgagagaggagtgggcctccatacgggatgccatggcgctgcgagggatatcagcgtccgcggccgggctgatcagccatcctgtacagacgatggagcatgtctatgttcccctgcttgtttctgcttccagaatttcggacgagatcacgcaggcagcgattacaagaggcattgagcacacaggtgaaagaagctgtatagaggaaatcgcgttttcgtttgctgatttgctggtggtgattgcttacgctgcgctcgttgccggcatggtatacgcgggcatgaaaggggtgttttgattatgatatcgtttcaaaatgtctcttttacatacgctgaaagcgggaacggcggagtccttgatttgaaccttatcgttcggtccggcgaatgcgtgctgctttgcggaccatcaggatgtggaaaaacaaccgttacacggctcgcaaacggactgattccccatttcttccacggcaatctttcggggcaggtgaaggtaaacggtatggatacccgggagacagagattgctgcgctatcggatgcggtagggacggtttttcagaatcctcgaacgcagtttttcaatacggatacggacagcgagatcgtgtttgggcttgaaaatcggggcattccgcgagaggctctgcgctcccgattggatgaacttacggaggagctgcatcttagcgggctccggggtcgaaatatctttgaactgtccggcggcgagaagcagaagatcgcgttttccagcgtgtatgcttcggctcccgatgtccttgtgtttgacgagccatcatcgaatctcgacatgaaggccatcggagaattggcggatttgctccaacgggcgaaaatatcaggaaagaccattctgatcgcagagcaccgcatctggtatctgatggacattgtggaccgcgtcgtttatatgcaggatggccggattgcgtcggacatggaggcttcagcgttcaaggcgctgcctgaagcagatattcgcagaatgggactgcgtgtcaggaatctgtcggtatccgaatcgggcggcgtgaaaacaatcgctgccgatggatcgctttccgctcagaaaatcagcgtccgtctcggcggccggtatgtattgaatgatatctcttttcaggcaagccgcggagaaatcatcgccattgtgggcgccaacggcgccgggaaatcgaccctcgccagaatgctctgcggattgcaaaagaacgtctccggtactgttttgtgggctggaaaaccgatgagccggcggttgagacggaaaaaggcatacatggtcatgcaggatgtggggcaccagctctttaccgacagcgtggcggcggaatgcgcgcttggcataaaggccccgaacaaagacgagatcgaccgcgcattagaaaaggtggatctgctggcgtataaggaacggcatcccttgtctctttccggcgggcagatgcagcgccttgcggtcgtggtgagcgatatctgcggcaaggagctgctggtgttcgatgaacctaccagcggactggatctgaaaagcatggaagaggtcggaaccttgacacgaagccttgcgacgcaaggcaaggtgcttttgatcatcacacatgatattgagtttatgatgcggatctgcacaagaatactgttcatccgggacggagaaatcgcggaggacctttccggtggacagaaagaaaagattgtaagacttttgcgaggtgaggaatgatggcgggaaaagaaaactcggcgatgacgattctgatggattttgcgaagccgtgcaaagggaaactgatcggctccgttgtatttgcggttttgggggcgctttgcggcatgatcccctatatcgcggtgtcccgcgggatcattatgatctgccacgaagactatgctttcagcaagttggcgtttctggcattgattgcgtttgcgggctatctcgggcaggtgtggttcggaacgttttctacaatgaaaagccatgagtctgcctttatcattctgcggaatatccgcatggcgataacagagaagctctcccgtgtccccatgggaacgatccttgatacgccgtccgggaaattcaaaacgatcatcgtggacaccgtggaaaagctggagcttccgctggcgcatatggtaccggagctcactgccaacatcctgatcccagttctaatgctcgtttacctcttcagccttgattggagactcgcgctgatctctcttgtgacgattccggtgggtgccttctgctatatgggaatgatgaaggattacgagaagagatatgccagagtacttgccgcagggaaaaacatggatgccgcaacggtggaatacatcggcggcatcgaagtggtgaagacgttcaatcagggtgaacgctcatataaaaaatacgccgacgccgtggcggaaaacgagacagccaaagtgacctggttcaagcagaccaacggctactatgtgatggggctttccatcctgacggcaacgcttgtgggcgtgctgcccttggggagctggctctttataaacggaagggtcgaagcgggtacgctgatcacctgcatcatcctcgcccttggactcgtaaaaccactgattcaggcattgcagtacaccgacagcctggccatggtggattccaccgtaaaagaggtaggggatcttctggatgagccggagcttgtgcggccgaccgagagagctgtccttgcggatgccgacgtatcctttgatcgtgttaccttccggtacaaagagacggaggttttgcatgggatttcctttgactgcgcaaaaaacggtatgacggccattgtgggtccctccggctccggtaaatctaccattgcgcggctcatcgcctccttctgggaggcggagagcggctgcgtccgtattggcggcgtggacgtgcggaacattcctctccctcagataatggagcttgtctcatatgtgtcacaggataacttcctgttccatctgtctatccgggaaaacattcggattggaaaaccggaggccacagacgcagagatcgaggcagcggcaaaaaaagcgagctgtcacgatttcatcgccgctctgccggagggctatgatacgctggcgggcgatgcgggaagccacctctccggcggagaaaggcagcggatcgccattgcaagggcgatcctgaagaacagcccgatcgtggtgctggatgaagccacggcatttaccgaccctgaaaatgaggccgttattcaagcatccatcgcagggcttgtagcaggaaaagctttaattgtcattgcgcatcggctgtctaccattacaaaagcagacaagatccttgtcgtggagaaagggaatgtcgctgcggaaggaacccatgaggagcttcttgaaacaagcgatctatacaaggaattgtggaaagcccatatgcagggcaaagataccgcagaggaggtggcgggatgataaggctgtttcaaagacttttgttgttctcgggcttacagaagaagcgtcttatccgctcttttcttgcatacctcgtcagctcattctttgagatgatcccaatcatggccattctaacggtgctcacaggaatcctgaagcagctttccggcgatgttatgcctgaaagcacgatctggatctcgcttggcatcatgatcgtttccattgcagggcgaatcgtgtttgtcgatctttctgccaatgccagaactcttggcagcttcgcgttcgggtcggaaaagcgcatggagatcggcgaacgcctgaaaagggcgcctatgggctatttcaatgaaaacaggctcggggatatcactgcggcggtgacgaccacacttggcgatctggagcagcagtccgttaccattatggaaaatgtggcgggcgggtttatccacgccatcgtgattggcgtttggcttatgatctatgagtggcggatcgggctgatctccttggccggacttgctgtggcgctccttgtttattcgcttatcggcaaggtcggcaggaaacacgcaccccgccgtcaggcagcccaggctggcctggtcactgccgttttggaatatgtgcagggcatgggcgtagtcaaggcgtttgggctggcggagcgcaccggaaaagcagttgacaccgcaatcgaggaaagcaaagaggcaaatatcgtgcttgaaaaggcgttttccaaaatgacggcgctctatcagacggtgttcaagctcgcacgggcggctattctggtttttgcgccctatcttttggcaggaggaagcatcacgccggagaagtgcctgctgcttctcgtgtccagcttcatgatctatgccgccgtggaggtggcgggcagtatgtcctccgttgcccgcgcggtggaggcttccctggaccggctggataacatcatggacattccatccctggacgaaaacggggcggatcttgtgccggaaaatttcaatatcgaagtgaaggatatgtcctttggatacggggaaaaggaggtattgcatcaaatcagcttaagcgtgccccagggaagctcctgcgccatcgttggtccctccggctccggaaaaaccacgctggtcggtctgatcgcccgtttctgggatgtgaaggaaggacagatcacgctcggcggccgggatgtgcgggaatataccagcggcagccttctcaagaatttcgccatcgtatttcagaatgtgtatctctttgaggacaccgtcgagaacaatatccggtttggcagaccggacgcaagcgaggatgaaatcatagcagtcgcaaagaaagcctgctgccatgactttatcatgacgctgcccgacggttatcagacaacgatcggcgaaggaggctccagcctctccggcggagaaaagcagcggatctccattgcaagggcaattctgaaggacgcacccatcgtcattttggatgaagctacagccagcgtggatcccgaaaacgagcaggagctgcaaaaggccatccgggagctgacaaaaggcaaaacgatcctgatgatcgcccaccgtctgtccaccgtgcgcacggcagatcaaatcatcgtgctggagaacggcaggatcgttcaacgcggaaaccatgaggagctgatgcacgaagacggcctgtacaggcgctttgtgggaatgcgcagccaggcgatcggctggacgctgaaaggcgggaaagcagatggatagaaggctagacaaaagatacttgaccggagcggtatctgcaatggaaaaacagtatggcgtggaaaagacaggcgcgatcatagaagatgcatggagacgttatgcggaaatcgtagacgaaaacgccgacgagccgaaaaagatgtatatgcatacgaggaaacgcatctatcctgccatcgccgcctttgacgccatgacgggaaatggaatctcccgtgaggaagcggcggcttttctgaatagatattatgaaaagcgggcagcgggcgttggtgcaaaaatccgaggggcaatgaagataccgggtctgtataagctggtgccgaggttctttgccaaaatgacaaaaagctcctttggagaggactgcggttttcgggctgattggatacgaacagagcaggaggaaatgtgcttcgacatgctggcctgcccctatcaggacacctgtgtgaaatacggctgcccggagatcgtggccggcttttgccgcgcggatgacgaggcctacgggcatatgcatccaaagctcaaatggggacggacaaagacgctcggacagggcggagactgctgtgattttagactgacgatagagtcatgaccctatggaaagacggatgagatacaagaccctccaatgctttcttgcggcgctgactatgatcgcgttcctcgctcctgctgcatatgcatccggtacaccggacgcatatgaggcaggcgcaaacgctgtttccgaaaagtatattggcaaaacggttccaggcgcgtgtgtcgtgatttcggaattgcggcggccatctgcgggtctttcacggggatcagctatgccgtaaagagaaaaaccagagcatcggtccttacgatcgttttatttgcatcgcaaattatagctgcgtggatgctcggattcttaacagtaatataaattaacagaaaacggaggaatggatttatggacaaaaagaaaaagtggacggtcaaggatgttattacaacggtattgctctccgcagtgctgatcgtgatccagctcgtcgtcaatatggtctgcatggccaacgactttgtcagcatggtactgtcggtggggatcaccatgttcctctgcgcgccggtctatatgctcatggtcagccggatcggcaagcggtttgtgacgctgatctatatgacgatcctcggcgtgattttcctgttgatgggcaactggttcttgcttccttattatgttctcgtggggatcctctgcgaggcgattctctggaaggaaggctcctgccaaaaaccgaaacggctgaccgccgtctggacagcggcaagccttttatacaacggggtcaatctgctgcccatctggttcttctgggatacctactacgattttgcgctggcaagcggcatggagcagagctacatcgattcctatgtgcgttactacacctctcccggctggctggcctttattctgctgttcacgacgctgatgggctttttaggctgcatggtgggcagccggctgatccgcaggcattttcagaaggccggcgtcctatgagagcggacgcatcctttgcggtgccggtcaagctgtgggcgctgctgtgcgtctttgccggagtgaccatcggcgggaatgtgctgctcacctgcatcctgaccggcggcgcgcttctttatctcgtcttacagcggaacttccgccttgccgcgtcctatggctgcttttatctgctgctggcgctgctgctctacggcatccgcttccacgggctgcgcatgccggtcttttcggagttttatgtcctgatgttctggaatctgtcaccgatctttctggtgtcatgggatctgatcaccacgccgccggggatgctctccgcgttcttatcccgcctccgtatgcccaccccgttcattctcgggcttcttgtggtctttcgcttcttccctaccatgcggacggagctgaaaggcgtaggcaggtccatgaaaaaccgggggctgaccgcggcgggacagctgctcgcacatcccgtgcagagcatggagtatgtgctggttccgtttcttcttcgggtattgcagcttgcggatcagctttccgtttccgccgttgcaagaggcgcggagcgtccgggcgtgcgcggcagctattatgagaaaaggatcggggcgcgggatcgcatcgcggcagccgcatgtgcgatagtcacggcttcctatttggttttggaaaggagcatggcatgatcgagcttacacgcgcttcctttcaatacgaaaactcggacagaggcgtgcgggacatttccctttcggtaaaaagcggcgaatgcgtcgtgctgacggggctttccggctgcggcaagaccaccgtgacaaggcttgtcaacggacttgcgccgtcctattatcccggagccttcagcggaagtgtgaggatagacggcaaggacatatcaaggctttccacatgggagatcgggcatttggtgggaagcgtttttcaggaccccaaaagccagttcttttcctccgagcttgccggagaggtggcctttccctgcgagaattacggcctgtccacccgggagatacgggagaggacggacgccgccatagaggcattgaagctgtcccgtttgagagacagggcagttgacgtcctctcaagcggagaaaagcagcgggcggccattgcgtccgtatatgccatgaagccaagggtctttgtgtgcgacgagccgacgtccaacctcgatgccgccgggacgcggcagcttgcgcagaccctttggcagctcaaggagcagggctttaccctgctcctcgcggagcatcggatcgactggctgatggggatcgcagaccgctttttatatctgcgggatggcagaatagcggccgagtatacaccggaggatctgctcctcctgccaaaagcggacatcttagggatgggcctgcgttctccgcacgagggaaagtgccctcccgctccctccgtattggacgagagccctgccgtcttgaagacagcagggctctcgaaaagaatatgcagagaagtcattttcgatgatgtttccctctcctttccgaaaggcagagtgaccgccataacggggcaaaacggcgcggggaaaaccacccttgcgcagatcctctgcgggctggcaaggcagacaaggggacatatcctgatagatgggaaaaaagcaagagcggcagtccggcgcagggagatctattactgcggcaacgacacgtcaacgcagttttttgcggcgagcgtggcggaggagctgctgctgaataccagatcgacagaagaaagcaagagccgtgcaaggaacctgctcgaagagcttgggctttacgagtacagggacgcgcacccgtccaccctgtccggcgggcagaagcagcgccttgccatcgcctgcgccgtcttttccggccgcgggatactgatccttgacgagcccaccagcggtcttgacgggcagaatatgcgcctgatcgcggaaaggctgaaaagcgaagcgcggaacggcagaaccatcctcgtgatcacccacgacagggaactgatcgagagctgctgcgataacattgtggaggttgaaaaacgatcatcatgaaaccgccaaggggcgctatgggatatccgcgccggagaaatcgttttccgctcctgccggcagctccaccgcgatggtcgtgcccttgtccgagctttcctccacccaaacggagccgccgtggaggttggcgatctcccacaccagagaaagtcccagtcccgcgccgccgtactcgcggctgcgggatttgtctacccggaa

SEQ ID NO: 844 - DNA, 9279 bp, unidentified
  source 1..9279: mol_type = unassigned DNA
atgagtaatgataaaagaaaagtgtacgttgtcggacataagaatccagatacggattccatctgtaccgcgatcgcttatgcaaatttaaagacgaaactgacgcagatcaggcatgaaccgcgtcgtgccggtcaattaaatgaagaaactcagtatgtactggaacgttttggagtgaaagtgccgttacttttatcggacttaagagagcagatcaaagatgtggatctaagggaaagcgaagagattaacggaaatctgtccattcgtactgcatgggaaaagatgaccgagatgaatacgcatacacttcctatcacaagagacgggatgctggaaggtgtgatcacgaaaggtgatatcgccaaatcctatatggatgtttacgataatacgatgctggcaaaggcgagaacccagtatcggaatattgcagccgctgtagaaggaaaagtggagacaggaaatgagcatggctattttcagaaaggaaaggtcgcaatcgcagcatccggtaaaaatcttatgacccgatttattgaaaaggatgacctggtgatcatgggagaccgggttgatgcacaacagtgtgccattgatatggatgcaagttgtatggtcatatgtcagggctatccgatctcggaagacatcctgcgtcaggcagagaaaaaacagatcgttgtgatccgtacaccgcatgatacatttactgctgcacagcatatcaaccagagtatcccggtccgttttttcatgaccagagaaaatctggttacatttcatatacgggattttgtggatgacgtaaaagaagttatggcaagaaaaagattccgtgatttcccggttctgggcaaccagggaaagtttgtaggacttgtatcccggagacgcctgttgaatgtgaagaaaaagcaggtgatcctagttgaccataatgaaaaaaatcaggcagtcgacggagtggaagaagcagatgtcctggagattatcgatcatcatcgcctgagcagtattgagacgatgggaccggtttatttccgtaatcagccggtgggatgtacggctacgatcgtatatcagatgtatgaagaaaatggaattgcggtggatgcagtcaatgcggcactcctctgttcagcaatcatttctgataccctgatgttccgttctccgacctgtacaccactggatgaggtaacagcgagaaaactggcagaaatcgcttcgatcaatattgaagaactggcacaggagatgttcaatgcaggaagcaatttgaaaggaaagagtgcagaagagattttattcctggatttcaagcagtttacggtgaatgatacgatgtttggagtcggacaggtcaattccatgagtgcagaggaactgaaagaaatcaaagaaagagttctgcctcatatggagaaggcacgtaaaaatcatgggctgaatatgatcttctttatgctgacgaatattatcacagaatcttcagaactgatctgctgtggagcagaggcgagagaaaaaatcatcagtgcttatgatctgcaggatgatgctgagatactgatgctcaaaggagttgtatcccgtaagaagcagctcgtgccgacactggttggtgcgttgcagcagtaaggagcaggaggaaaaaatggcaaagcagatatggaaaccgggaaatatggtttatccattaccggcggtaatggtcagtacaggagataaaaaaggaaatcagaatattctgacggtagcgtggacaggaactgtttgtacgaatcctgcaatggtatacatatcagtgcgtccggaacgttattcttatcatatgatcgaagaaagcggtgaatttgtgatcaatctgaccacggagaaactggcaagggcaacggatttctgcggtgtccgttcggggcgggatgtagataaatggaaagagtgtcatctgagtgcaaagaaagcacagacgctggaatatgctccctgtattgaagaggcaccggtcaatattgagtgcaaagtaaagaagatcgagaagcttggaagtcaccatatgttcctggcggaagtgacggcagttcaggcagacgaagcgtatctgaatgaaaagggaaagtttgaattgaataagacgggacttctggcttattctcatggagagtatttagggcttggaaagaagatcggtacctttggatacagtgtgaaaaagaaggcggaccggagacgaaagagagggaaaaagtaaatgatttcatttgaaaatgattattctgaaggggcaagtgaaaaaatccttcaaaggctgatagagaccaatatggaacagctttcaggatatggaaatgaccggtattgtgaatcggcaaaagaaaaaatccgtaaggcctgtgggtgtcctgaggcagaaatctacttcctgtcaggaggaacgcagacgaaccggattgtgatcagttccatgcttcagccttatgagggcgtgatcgcagcacagacaggccatgtaagcagtcatgaagcaggtgcaatcgaatcttccggtcataaagtactgacactgccacagcatgacggaaagatcgagccggaagagctggcagattatctgaatgacttttatggggatggaaatcatgaacatatggtgttcccgggaatggtttatatttcacatcccactgagtatggaacgctttatacaaaaggggagctggcggagctggcagatatctgcctggaataccatattccactttatctggatggtgcaagactgggatatgccctggcggcagatacggatgtgacgttaaaggatgtggcggattattgcgatgtattttacattggcggaacaaaagtcggtgcattgtgtggagaggcggttgttttcacaaaagagaatgttccggcacatttcctgacccggatcaagcaacagggaggtctgctggcaaagggcagactgcttggaatccagtttgatacactatttacagaaaatctttatctggagctggggcggcatgcgatgaaatgtgcggaaaagctgaaggcgatatttaaagaaaaaaaatatccgttttatattgattcgccaaccaatcagatttttgtagttctggaaaatgaaaaaatgaaagaacttgagaaaaaggtaaagttcagtttctgggagaaagcagatgatacgcatacagttgtgcgttttgcagtgagctgggcgacacaggaagaaatgatcgatgaattacaggagctgctgtaaaaggggctgatattcttgatttcagaagaatgaaacaggtggaattcgggaaaaatagaatagaaaaagaaatacatgagaatcattctcaataaaattcttgaattaaggagcagaatctgctaagatacatatggttagttaatactaactatgtgtgaatgaatcatggaagctccttttgccctgaaatacctgaatccagggcttgaggattcctaaagaaaggaagaacaggcaatggattatttagaaattgaaaaagtgattggaagagagattattgattcaagaggaaacccgacagtagaggcagaggtacatcttgcagatggaactgttggatttggtgcagcaccgagtggagcatcaacgggagaatttgaggctcttgaattgagagacggagataaagcccgttttggaggcaaaggtgtttctaaggcagtggagaacattaatacaattatcaatgatgcacttcagggaatggatgcaagtgatgtctatgcagttgacaaggccatgatccaggcagatggaacaaaggataaatcaaagctgggagcaaatgcaatccttgctgtatcgattgcaagtgcgagagcagcagccacatccctggatattccgctgtaccgtttccttggcggagtcaatggtaacagacttccggttccgatgatgaacattgtaaatggtggatgccatgcattatcttcaggactggatgttcaggagtttatgatcatgccggttggagctccttcatttaaagaatgcctgagatggtgtgcagaagtgttccatgcacttgcaggtatcctgaaagagcgtggacttgcaacgtcagtaggagatgaaggtggatttgcaccggcactgaagtctgatgaagaagcgatcgagacgattctcgaggcagtgaaaaaggcaggatacgagcctggaaaagattttaaaattgccatggatgcagcatcttctgaatggaagacaggcaaggttggcgaatataaacttccaaaagcaggaactgtgtatacatctgaacagttgatcgaacactggaagagtcttgtagagaaatatccgatcatttccatcgaggatgcactggatgaggaagactgggaaggctggaagaaactgacagcagagctgggagacaaagtacagcttgtcggtgatgacttattcgttacaaatacagagcgtcttgcaaaaggaattgagcttggatgtggtaattctatcctgatcaaattaaatcagatcggttctgtatctgagacactggaggcaattaagatggcacataaggcaggatatacagcaatcgcatcccaccgttccggtgagacagaagatacaacgatcgcagatcttgcagttgcactgaacacctgccagatcaagaccggtgcaccgagccgttccgagcgtgtagcgaaatataatcagcttttaagaattgaggaagaactcggagcaagtgcagtatatccgggaatcaaggcatttaatgtacagcagtaagtaaaaggaatactgccggataataaaaagatgtcggggtcaaaagcccccacttattatcatgctttcattgataatgagtgggggctttgtgatgattttttggtgttgagggaaattgcgttatgattttttatgtccttcgtccgcaagggcccgaatagaagagacatattctgatggcgtcatcccggtagaacgcttaaactgccgggaaaaatagtggatggaagagtatccaaggtattcagaaatctgagtaaaattcatctgtccgctgcggatcatggattttgcttcactgatctttaaggcagaataatattcaatcactcctgtcccttccgaatcccggaataatttctgcagacgggagcgactgatcaggttatcatggcagatctgctcaatcgttaaatgatctgccagatggctgagcagatagttctttatatgagagaataattctgcatctgtatttttggagagtgtccggtcagacagtggggtccgggaaacttctccggtcagaagagaattctgattacgccggtaaaggctgaggagaagttcttctaaatgaaggcggataagctgaccacagacaggggatgtatcttttctgatctgcagggatgtctgatagggatcgtccagccgtccttccaaaaaacttcctgcttctgcaatgattccggcaagcagccgacgttcagtttcttcgaggtgaaggatctttcctctgaaaaattccatcgcaggatctgtgcaggaaaaagagatcacgatcagattcggtgcgatctttccgtttgccttgacccagtgaaattcacccgggtagtgaaaagcgatttctccgcgtctgagagtatgggtaagaggacctgcaccaatctccacttctcctttatcaacgcatacaaactcccagaaatcatgggattctccgggaaaagaaaaggtactcatatattcaaaataatgaagggaaaacagctcttctatatgaaaaagatcctgaagctgaattccataatatttctttggatttgaaaaatgatctgtatttgcagctacaatatgcattctgagcctcctcctttttcaaaaatgttcttagtaaggatatcatagcattattttccgaaaatgcaaagagaaaatgcagattgtgcaaatgaaagataagatagtataaagatttttatggggttttatcatacaatagaagaagtgtaacatagaaagtgaaatggaggaatcaatcatgaaaaaaccggttcttgtaattatggcggctggaatgggaagcagatatggcggactgaagcagatcgatccagtcgataaagaaggacatatcattatggacttttcaatcttcgatgcaaagcgtgcgggatttgaaaaagttgtatttatcattaaaaaagaggatgaggctgattttaaggaagcagtcggcaacagaatggaaaagatcatggatgttgcatatgcatatcaggatcttcataacctgccggaaggatttgaagttccggagggtcgtgtgaagccatggggaacggctcatgcagttctgagtgcgattgatgaagtggatggaccatttgctgttatcaatgcagatgattattatggatgtcatgcatttgaagtaatctataattatctgacaacgcatgaagatgatgacaaataccgttataccatggtgggataccgtctgaaaaatacggtgacagataacggacatgttgcaagagggatctgtgacctgaatgatgcaaaagaattagttgcagttcatgagcgtacaagaattgagaagcgtaatggtggaattgcatattcagaggatgacggagctacatggacagaggtagatccggagacactggtttctatgaatatgtggggatttacaagaagtattctggatgagatcaaggcagaatttcctgcatttcttgaaaaaggactgaaagagaatccgatgaagtgtgagtatttcctgccatctgttgtgagcaacttattagagtctgagagagcaaccgtgcaggtacttgagtcagaagataaatggtatggagttacatataaagaggacaagccggttgttgtagaggcaatccaggcattgaaagatgcaggagagtatccgcagaaattatgggaggaagactaaagatgggaagagtgtctgaagcacagatcaatgaagcgattgcaaattttgattatgagggaaagcttttaagtaaagagccttttggaagcggtcatattaatgatacatatcttttaaagtatgagatttcagagatgggaatcctgaaagtgatccttcagcgtatgaaccgtgagatttttacgaatccggtagaactgatggagaatgtagtaggggttacgacgttccttcgtaagaagatcattgagaacggcggagatccggagcgtgaaactctgaatgtaatcccggcaaaggatggaaagccttactatgtggattctaagggtgagtactggcgttcttatgtatacattacggatgcaagcagttatgaccaggtagagaaaccggaagacttttacgaaagtgcagtcgcatttggacatttccagcggatgctggctgattatcctgcagagacactccatgagacgatcaagggattccatgatacaagagcaagattccaggtatttaaagataccgttgcaaaggatgtatgcggacgtgcagcagaagtacaggatgagatcaactttgtactggcacatgaagacgtggcaaatgtatttggggagcttcaggacaaaggaaaacttccgcttcgtgtcacgcacaatgatacaaagctgaacaatattatgatcgacgacaagaccggaaagggaatctgcgttattgatcttgatacagttatgccgggacttgcaatgaacgattttggtgattccatccgttttggggcaagtacagcagcagaggatgagacagacttaagcaaagtatcctgcagtatggatctttttgaaatctatgtaaagggcttccttgagggatgtgacggaaagctgacaaagaaagaagttgaacttcttccgatgggagcaaaagtcatgacttttgagtgcggtatgcgtttcctgacagattatctggatggagatcattacttcaagatccacagagaaaagcacaatcttgacagatgccgtacccagttcaaactggtggcagatatggaaaagaaatgggatatcatgcaggagatcgtagcaaaatataatcgctgatcgtgcaacatttttaccataagatgaaccaaaaatacaaggtatattcagagaatttatggtataatgtacctgtaagttgaaggaaagataacttgatcatattggttgaaggaggagttaaaatgtcaattttagtaaccggaggagccggatttattggaagccatacctgtgtggaacttctgaatgcaggatatgatgttgttgttgcagataacttatacaacgcatctgaaaagtcactggaaagagtaaaaaagattacaggaaaagacctgaaattctacaaagcagacattcgtgataaagaagctatgaatgagatctttgagaaagaagaaattgagtcagtgattcattttgcaggactgaaagcagttggtgagtctgtagcaaagccgcttgagtattatgagaacaatattggcggaacgattacgctttgtgatgttatgagaaaccatggtgtgaagaatattatcttcagttcttctgcaacagtatatggtgatccggcatttattccgatcactgagaaatgcccgaaaggaacctgcacaaatccatacggatggacaaagtggatgctggagcagatcctgacagatcttcatacagcagatcctgagtggaatgtagtacttcttcgttacttcaacccgatcggagcacataagagcggtctcatcggtgaagatccgaagggaatcccgaacaacctgattccatatatcactcaggtagctatcggtaaattagagcgtcttggagtattcggagatgactatgatacgcatgacggtacaggtgtccgtgattatatccatgtagttgaccttgcgatcggacatgtgcgtgcagtagagaaactgaaagagaaagcaggagtatccgtatacaaccttggaacaggaaatggatattctgttcttgatatggtaaaagcattcagcaaggcatgcggaaaagagattccgtatgagatcaagcctcgtcgtgccggagatatcgcaacatgctattgtgacgcatccaaggcaaaagaagagctgcactgggtagctgaaagaggactggatgagatgtgcgaagattcatggagatggcagagccagaatccaaatggatacgagggataa

SEQ ID NO: 845 - DNA, 9508 bp, unidentified
  source 1..9508: mol_type = unassigned DNA
ttacttccgcattccaagacaatggttaataaactgctgtgcggttcttcctgatatgcctccgtggcttaattcccacttattagcctcagccataagttcttcttctgacatatcaagtccatttttcttggcaagtcctattacaatattataatattccttattagatggtttagaatagcttatctgacacccaaatctattaacaagcgacatcttttcttcaatcgtatctgatctgtgaagtccgttagaagattccatatcatttctgtcgttccatgtttctttgataagatgtcttctgttagatgtcgcatatataagaatattgtcaggcttagtttcaacgccaccctcaatgactgcctttaagaacttgtactcaatctcaaattcttcaaatgataaatcatccatatatataatgaacttgtagtttctgttcttaatggccgctattacatttgataaatccttaaactgatgcttatatatctctatcattcttaagccctggtcataatattcattaacgatagccttgatacttgtagacttaccagttccactgtcaccaaataaaagagcattattggcttttctgccctgaacaaagttctctgtattctcaacaagcttctttttttgtatctcatatccaataagatcatctaatacaaccttatccatattattaatagggttaaatgtaagctttccattctctgttgcagatattctgaacgccttgttaagtccgaacatacctacgccatatgctttatagaattctgtaactatatcaaagaattcatctgcattagcagctttggcaagcttttcgcttaatgcctgaaccttttcacttacatttttattatacatcagctccttcttaacgattgccttataatcagagattatagagaaacagtcaatgccgagttctttctctataaatgaaaaatcataatggaaaagattgtagaatactttaaagtcattctttgcaaatacattaacacttccgtcattagctcctaccttttcacaggtaatgctgaatggattctcattaataataagaaaatatgtaagataattctgccataaattcttatcgaaaccataatctgttgcaacttctaaaattctttttacctgagtatatatatctgtaaccagctcttcttttgatgataatttgttatcaaaacgattgaatatatctgccattgatgataaaatagaactgttatcgagatttccatacataattaattgagatatttctttatacattttagtattcctttcgccaatgtgtatatgtaacttttatataataacacatataatatcacattgagagcgaattttgtcactttttttagaaatattagttcgattaactattgacagctaacgaactaatgatataatctgtaaagaactttgcaaaagtttgtaaaagttttaacagacttttattttttaatgattagtgaggatttcaaatgaaaatcgtatcagatatcaacgcatttgtgtatattgtattgaccatcttctattgttatcagggaatatacgttattatcgcattgcttggtaaaaagaaaaaaaagaattacaacaccgaagctaagacacttcacaaatacgcatttattattgccgcacgtaatgaaaatgccgttatcggcaatttaattgacagtattaagaaccagaattatccttcagagcttattgatgttatcgtagtagctgataactgtactgataatactgcggagatttcaagacaacacggtgccattgtttatgagcgtttcaacaatatacttattggtaaaggctatgctatggactatgtctttaataagatatgtgaagaacgcggtgattacacttgttatgacggttatttcgtattcgatgcagataatattatcgatgtcaattacgtcagagagatgaacaaagtattcgacagtgggtacaaagttgtcacaagctatcgtaactctaagaattatgacactaactggattacagccggttattctttatggtttataagagaagctaaatatcttaacaacccacgaatgatgattaagacaagctgtgctgtatccggaactggctatcttgtagacagctctattatcaagaagaaccacggctggaaatgcaatcttttaacagaggatattgaatttactgtaactaatattcttgatggcgaaaaggttggttattgcgaagatgctatgttctatgatgaacagccaacaacatttaaacagtcttggaatcagcgtatgcgttggacaaaaggcttctatcaggtattatttaagtatggcagagacttattcaggacaatgttcaaggaaaagagaatgttcgtatcctgctatgatatgataatgacacttgcacctgctactttatttacacttggaacaatacttcttaatgtaataatattattatgtggtggtcttaatcctacattattcaagcagattgctggtccaactgttcaggctattttacttggtttctttaatttctatatgatgcttttagtaataggacttataactttaataactgagtggaagaagattcttgcacctgcaagaaagaagattatgtatcttttctcttttcctctctttatagctacatatattccaatctcaattgtagcgttatttaagaaggttgaatggaagccaattcctcatactgttgttaagactattgatgatttatcaatgacacagtataagcagtaattctattaagaatttaaactaaataatgatataaaaaaaggggctgtcgcactaagaaattagtgcggtgccccttcttttatgttaaggcggtatataatctaaaaaaataaatcccaggcttcgaaaaacctgggatttatagtaaaatattagtatgctattacataataaattacaaaaagattatactttaaatcagagtggatatcaactaaaacttccactcgaaaactgcaaaagagatatcaatttcatatttcttctagaagggcattctgcacctgaccatgcaacacttgcacgattcagaagcattcattttgccccttgttctaagcgtattctcgcagaagtttcaagattgaggcaaatgccaataaatatactttcgtgtggaaaaaagccgttacaaaaaatcaggcaaaactgttaattaagttagctgattttgtagctgaatgtgaacaactctatgacataaaaatagtttatggaaatgtagtaaaaatcaaacatttaaagagactacgcaaaaagctgtatgctctcaaaaatgctggaaatatcacattcgtgcatggtataggcaaaagaaaaacaccattacaaaaaagtattgaagcattagaagaagctctttctaaacttaaagaatacactcaataataaatagtaacttaaaaatcgtatttttataggaaaaagaggctggtaccctaacgattttcaatcgttaaagcgacagccccttatttgctttattctacaaacacaatcattacttttcattcctgtcaatctttaaatctttgtaatattgcattggagtaacaccatattctttcttaaatgctctaaaaaaatgattataccctccaaatccaccaagctcatatacctcatgaatacttttcccctgctctatataatggcggcataaatcaagtttgctctttacaatgtatgaatgaggtgtctcacctgtcaattttttaaactctcttactatatgataacggcttatataaaattcattttccaagcgctccaacgagatatcttctgtcaaatgttctctgatataaataaaaatatcatccattacaacgtgttttttcttcttcttcttgatctgtacatcatcctgaacagatgagcgaagtgcaagtacaagaatcatagttaataggcttttctcgtataatgagtgggcaaatttaggcggctcattattcatcgaatagagcttttttgatatattctttataagcatagccgattcagtctcagaatgaacaatcttaacttgatacggaacaaaatcaaacgcttcatcaagtcttgtttcttcatctgacaatttccttaaaagttctccacctatataaagaacataaacttcaagaggatacttatttttacgatattcaagctttactttattacctggcttaataaatatcaaatcctccatagtacatacaatattatcgtcctcctggtgcatataccctatcccaccagctataaatacaattgtatagctctccttttgcccaaagcttcgctgggcactatccaatattttcaaatattccattttgtagccttgctttttcatatgtctattttgtacactttcctattatattttttgttcatttcgtcaaaatatacaatatatcaatttttcgtagtttgcaagcaatatttgtatatggatatcagcataaccccaatataataagattgtagctactaaaacaatataaatgtttggaggtaaattatcatgaaagaaacaagacctttttccatgaaggacaaaattggttacactcttggcgatttgggatgttgctgtactgagcagttccgtgccatgtatcttgctattttttatacactggtattaaaagttaatccagtacacgtaggaatccttatgcttgttacaaagttttgggatgctataaatgaccctttaattggtgcacttgttgatagccacaaaaacaaaggaaaaggaaaatttattccttggattaaattctttgcttttccaactgcagtactctgtatattaggatttgttaacgtaagcaatttcgcttatggtgcacgtattgcttatatgttcattacatatattgtttacgaaattatgtacacatgtgtcaacgttccatttggtagtctttcaagtgtaatgactgatgatgttaaccaacgtactgacctttctcgtttcagaagtcttggcggtacaatttttatgacagttatcgttattgctggaccattattcttatataaagataaccagccagtacctagccatttccttattatgtcagcaatctgtgcagttattggattaatctgtcttatgtttacatctcattggtgtaaagagcgtattattacagaaccagttgttgagaaaaaagaaaagtttaactacttccaggtaattaaagatattactaaaaacaaagcattactcggagttatgttatcaagctttatcggtattgttggagcaggtatggttaacggattaaatacttatttattccgagattattttggaaatgttgccatcatggcagtttcaggtatgttaagtgtactctggtcacttattgcattcgtaggcacaaaatttgttgctaagaaatttggaaagaaagaatggatcatgtacagtgcaactttctcagttgttgtttatgctattttattcttcttcccacttgaaaatcctttgctctttattatcatcaacggaatctgctatcttggagtaagtggtttccaagtattagtttgggcacttgtaaatgatgcaattgattatcaagaacttcagacaggaaaacgtaatgaaggaattgtatattcggcatatacattcttccgtaaacttgctaatgctgtatcaggaagtatgagtagttttgcacttgcaattgctggattccaggttaatgaagctgtccagaatgaagcattctcaggacatctttggaaaacatatacaggtttatatgttgtaggatatttattagctgttctggtattaaaatttatctaccctcttacaaaagagaaaacagctgaaatgttacaggatttagctgacaagcgaaatgctactactgcagaataaaattagaaatggaggtattttaaattgacaaaacaagtagaaatcacaaaccgtgatggacacatcttacgcggaatagttaacattccagaagatggcacaagatttcctgctattgtaaatgtacatggctttacagggaataaaagcggttacaaaagtatttatacgcacacagccagattattagctgaacatggatttgccagtgtccgttttgatttatacggaaatggtgaaagtgatggtgaattcgaggacatgacctttacaggtatcctacacgatatcgaggatattataaactggactaaaacacaagattttgccaatccagataagattatcttatctggtcagagtatgggaggatacgcagctgctactgccgctcctattgttaatccttatgctctcatacttatgtgtccaggtgctggaatgtggtttggatgtaaggatcgtgctgaagccatggaagctaaggggatcaccaaggccgatattgaaggactcactttcccaacatcttttaatcatgatttatttaattatgagccattctcgtcagcagaaggatacaacggaccagtcctccttataagaggaactgcagatgatttggtagatgatgcaacatgccatagatatgagtcactttacaatggaaaatgcaattataaaacaattgaaggcgctaaccacaattttgccagtgcttttgcaagagcagaattagacaaattaatgttagagtttttaacaccacttaaatagtatattcaatttgaaaggaagtatgaacaatgaaattattagagtctataaaagttggaaatattgagtttaaaaaccgtattatgttcccaccacttacaacaggatatgaggaaaaagatggttcaattggagaacaaagttttcgtttttacgagcgtctcgcaaaaggcggtgtcggatatatagtaattggagatgttgcaccacttccaacattctctcctacaccaaagctttattcacctgagcaggttcaaagcttcaaaagacttgctgacgcatgtcatgaaaatggcgcaaaacttggaattcagttattccatcctgactacaatgttaaagctttaaacgatttgtttcatcagggcaaaatgcaggaagcaagagctaaacttcaccatgatatgcagcactttgtaaatgaagttactgcagaagaacttgatgaaataataaagcatatggaaaactgtgctatcttagcacacgaagctggtgttgattgtattgaagtacatggagaccgtcttgttggttctctttgctctcctattttaaatcatagaactgatgaatatggcggtgacctggctaatcgtacacgttttgcattaacacttgtaaaaagattaaaaacaatcgtacctgacatggttatcgactacaagcttcctatagttactcctcttggagaaaatagttttagaggaaaaggtggtcttccacttgatgaagcttgcatttttgctaaagaattagaagcttgcggtgttgacacattacatgttgcacaggctaaccatactggaaatatgggtgatacaatccctgccatgggaacacagccatacggatttatggtttcttattctaaaaaaatcaaagagcttgtatctattcctgtatctgtagtaggccgtatcgttacaccagaagctgccgaagcagttattgcaaatggttctgctgatattattggattaggtcgttctcttctcacagaccctgactttgcaaacaaatgtgcagatggacattgctgtaatgtcagaacatgtatgatgtgtaataaaggatgtacagataatattcagaatcgtgctttcttaagttgtgtacttaatgctgaaaatggttacgaaggatctcgtcagattactcctgcagcatcaacaaagaatatagcaattattggtgctggtattgctggacttgaagctgcacgtgtttccgcattaagaggacatcatgtaactatatttgagaaatcacttcagattggtggtcagttacttattgctagtgtacctccaagaaaagaagaaatgatgagaagcattaattattatacaaatgtacttcctgaattggatgtaacattcaggcttggtcaggaattcacatcccaagattataattcattcgatgaagtaattgtggcaacaggagcaaacaatgcaataatccctgttcctggcaaagatcttccaactgtagcaagtgcatgggatgtacttgccaagaaagaaatcgtattcggtaatgtttctgtaatcggtggtggtcttgtaggtgttgaaaccgctgaatatctggcttcacgcggatgtaaggttacaattattgaaatgatggatcagattgcaaaagaagaaagtaacactattttacctactctaatgagggaattagagcattataatgttcaaatagtaacatctgcaaaattatcagaaattaaagatgattctgtagttgttgaaaaaacagtagacgacaatacatcaacagaagaaattgcttcagactttgttgtaatggctgttggtgcaagaaagaaccttccagagctttctgattgtcctcttccacttcactatattggtgattgtgctggagaacgtccaagtaatattgagcatgctattaaatcagcatatgatgtagcatgtgaaatataaattattaattaccctattaccacaaaggggctgtcgcactaagaaattagtgcgatgcccctttttttatgttaaggtggtatataatctaaaaaaaataaatcccaggcttcgaaaatcctgggatttatggtaaaatattagtatgctattacataataaattacaaaaagattatacgttaaatcagagtggatatcaactaaaacttccactcaaattagaaacaattattcctaagaatgattctgtgcggttactcagtcagtttgtagaggagatggatttgactgatctatataagagatatcaatttcatgtttcttttagaaggacattctgcacctgaccatgcaacacttgcacgattcaggagcattcattttgccccttgttctaagcgtattctcgcagaagtttcaaatatcctttttgatttaggtgaaatatctggtgaaactatctttattgatggtaccaagattgaggcaaatgccaataaatatactttcgtgtggaaaaaagccgttacaaaaaatcaggcaaaactgttaattaagttagctgattttgtagctgaatgtgaacaactctatgacataaaaatagtttatggaaatgtagtaaaaatcaaacatttaaagagactacgcaaaaagctgtatgctctcaaaaatgctgaacataacttaaaattcaaatataagaacataactgcggatgctggttatgagagcgaggaaaactatctgtttcttgaagctaataatcag

SEQ ID NO: 846 - DNA, 9894 bp, unidentified
  source 1..9894: mol_type = unassigned DNA
tcaatataaaatatatttttcatcttcatacctatactgcattctattggtagaagctattgtttgaagtacttcgtcaatggtgtttcctattattttaaaactaccatagaatcgtttgttccgcaaagaatcagccacttgtattttcacatcatagctacgcatcaatttcttcgcaatatcttccaacaattcttcatcaaaaaacaattcattcctagaccaggcatttgaatattctacatgggtcttcgatttctttattataccagttcgtttattcaaaaccattttttctcggggagtcagatacaaagcgggcatctttttcagttcattttgcaaagccacctttccttccatcagatttacagtaacctcctcgtcttctggataatttttaaaattaaacttcgttccaagcaccttcaaattaagttcccttgtttcaacaacaaaaggaatcttctcatttttagtaacttcaaaatacccttctccttccaaagacaaatttctatcatctacaccaaatccctgcgaataaacaatcttagaacctgcattcaaccataccaatgtgccgtccggcaaatataatttagtacgtgctcctaatggagcctctactaccatatctgcaaaattatgtttgacagcctcctttccttgccaataagtagccaaaggcaacaacaaaagtaaaactacagcggctacgcgatatatcactttccaagaaaaacgtcgaagtcttttattccttccagcctcagcaacccgttgcttaaataaatcaaatgcttcattcttattaaagaaggtcttatcgctcaatacgcctgaagagaaccaaatttccaactgatcacgtacataaatacgattagtttctgactccatactccaccgctttaactcagaaaaggatttttcatccaattcattggataaatacgatgctatcagcttatctatatcgttatatttttcttctgtatgcataattacaagtacgtttattagtaagacaaaatagaaaagaaagagggtagtctaaaatgtatttttttcaattttcccaaaacatatacaatatcagcagtttcagatagtctcccatatgtaattgaatggatgctaaagcatttttaatatgatacttaactgtattcaccgatattttcagttcatctgctatttcttcatattttttttgttcaaaacggcttttcttaaaaaccgcacggcattcttttggaagttcctcaatacatttcaataatttttcttccaactcttgctcaagtaaagtacctaaaggatgattatcctccacaaaaacactatctaaaaattccatattttctggaagcataaaagaagagaaatgaagttctttgcgatgcctttgtgaattcaattcattcaagcagcgattacgcactgcacgcatcaaataggcacgtaaggaaaaggttatttcaatatcagtacgatgctcccacaaatagaagatagtatcatccactatttcttctgctaaagcaacgtcatccaacagttgatatgcaaaacgacaaagaagaatgtaatggcaatcgtatatatatctaaatgcctgttcatctcctaatctcagtttttcaataatatatttttccatagtaattaaagtgacaaagggtaaattcttaattattaatactttctatcaagaaaaccatattgttcgctctatattggttgattataagattaaagcaaaagtaatattttataataacacagaccatcgattacagaaaaagattaatctattccaaataaggtttatcagacttataaacaaaaaactccatggatgaagcccgaatccttatcaaagccccagatttaccttcagataaaatcaaatgtatatacaaaaatcatctgcattagttttataaaacaatcatctatgtatttttccagtatatgcataagacaaaataaagagaatagagggtagtcccaaaatgcacttttttatttctaagattattgccttccagaacaaataaagctcatctttcaaagaaaaatgcacaatacatacataaaacaaagaaaaaagtctcctttttgcatattctttccgaaataatccctaattttgcgccactcttagaataattatacagaaaatgaagaaaaaagccaatcggttagacgccatcaagatgattatctcaagcaaagacgtcagttctcaggaagaactgttgcaagctttgagcaaggaaggctttgaactgacacaagccaccttgtcacgcgacttgaaacagctgaaagtagcgaaagcagcgaacatgaacggtaaatacgtatatgtgctgcccaacaacatcatgtataaacgttcgaacgaccagagtgcaagtgagatgttgatgacaagcggattcgtttcacttcaattttcgggcaatattgccgtcatccgtacccggcccggatatgccagcagcatggcctacgacatcgacaaccgggagtgccccgccattctgggtaccattgccggagatgacaccatcatgctggtggtgcacgaagcggcatcacacgacgaggtacgcagcttcctatcgcaaatcataccgaacattaaatgacagataacaacaaaaaacaagaaattaaataagaaatggattcgaaacaaattgatgtgatggtggctgacgcctcacatgaagtttacgtggacaagattttggataccatccgggaagctgccaaggtacgcggaacgggcatcgcagaacgcacacacgaatacgtagctactaagatgaaagaaggaaaggccatcatagccttatgtggagacgattttgccggtttcacctacatagagagctggggcaacaagcaatatgtagcaacctccggcctgatagtacaccccaaataccggggactggggttggcaaaacgtatcaagaccgcctctttccgcctggcacgcctacgctggcccaatgccaaagttttcagtctcaccagtggagctgccgtcatgaaaatgaataccgagctaggatatgtgcccgtcaccttcaacgaactgaccgatgacgaatccttctggaaaggttgcgaaggctgtatcaaccatgatatattggtagccaagaaccgtaaattctgcatctgcacagcaatgctttacgacccgaagctgcacgaagaagataaaatataaaaatataaggatatggaaaagaagaaaaaagtggtagtcgcattcagcggcggtttggatacctcattcacggtcatgtatcttgccaaagaaaaaggatacgaagtatatgcagcttgtgccaataccggcggtttcagccccgaacagttgaagactaacgaggagaatgcctacaagctgggtgctaaagaatacgtcaccattgacgtaacgcaggagtactacgaaaaaagcctgagatacatggtattcggaaacgtactgcgtaacggcacctatcctatctctgtaagttccgaacgtatcttccaagcattggccatagcacgttacgccaacgaaatcggtgccgatgccattgcccacggttctacgggtgcaggcaacgaccagattcgtttcgacatgactttcctcgtcatggctccgggcgtggaaatcatcacgctgacacgcgatatggcactgagccgtcaggaagagattgattatctgaacgaacacggctttgccgccgacttcaccaaactgaaatactcctataacgtaggtttgtggggcacttccatctgtggtggcgagattctggattccgcgcagggattgcccgaaagcgcctatctgaaacactgcaccaaagagggcagcgaacagttgcgcctcacttttgaaaaaggtgagctgaaagccgtgaacgacgagacattcgacgaccccatcaaagccatccagaaggtagaagaaattggtgcggcatacggtatcggccgcgacatgcacgtaggcgacacgattatcggcatcaaaggtcgcgtaggtttcgaagctgccgcacctatgctgattatcggcgcacacaagttcctcgagaagtacactttgagcaaatggcagcaatactggaaggaccaggtagccaactggtacggtatgttcctgcacgaaagccaatatctggaaccggtaatgcgcgacatcgaagccatgctggaatcctcgcaacgcaacgtaaacggtacggctatcctcgaacttcacccgctctgcttctctaccgtaggtgtagaaagcaaagacgaccttgtgaaaaacaagttcggcgaatacggtgagatgcagaaaggatggacagcagaagatgccaagggcttcatcaaagtaacgtctacggcactgcgcgcttattactcaaaccataaagacgagaaaatctaaatgacggacaagaagcaaaaactgacacgtccccggactggaaggatgctttcaggcgtatgtgcaggactggcaaactttttcggactcgatgtctcattggtgcgtatcgtttatacattcgccacgatctttactgcatttgcaggcatacccatatacattataatgctaattgttataccacaagaaccaaatagatattatcgaaatgattaaagtaggaatcataggcggagccggatacacggcaggcgaactgatacgtctgctgctcaaccatccggaagcagaaattgcatttatcaacagctcaagcaatgccggcaacaaaattacggacgtgcacgaaggactgtacggcgaaacagacttggtatttaccgaccagctcccgctggaagaaatcgacgtactctttttctgtacggcacatggtgacacgaagaagttcctcgaaagccacaacgtgcccgaggaactgagaatcatcgacctctccatggactaccgcatagcctctcccgaacacgacttcatctacggtttgccagagctgaaccgccgtgccacctgcaaagcgaagcacgttgccaatccaggctgctttgccacctgcatacagctgggtctgctgccgcttgccaaacatctgatgctgaacgatgatatcatggtgaacgccattaccggaagtaccggcgccggtgtgaaaccgggtgccacgagccacttcagctggcgcaacaacaacatgagtgtctacaaagctttcgagcaccagcatgtgcctgaaatcaagcaatcgctcaaacagctgcagaacagctttgatgcggacattgacttcatcccctaccgtggtgacttcccgcgcggcatcttcaccaccattgtggtgaagaccaaagtggccttggaagaaatcgtccgcatgtacgaagaatactacgccaaagattcctttacccacatcgtggagaagaatatcgacctgaagcaagtggtaaacaccaacaaatgcctcatccatctggagaagcacggcgacaagctgcttatcatttcctgcatcgataacctcctgaaaggtgccagcggacaagccgttcacaatatgaatttaatgtttaacctggaagagaccgtaggattacggttgaaaccttctgcattctaaaaaaaatgaatttattcgacgtataccctctctttgacatcaacatcgtcaaaggaaaaggctgccatgtatgggacgagaacggtaccgaatacctcgacctctacggtggccatgcagtcatctcaatcggacatgcacatccacattatgtagagatggtgagtaaccaagttgctacgttaggattctactcaaactcagtaattaacaagctgcaacagcaagtggcagaacgcttgggaaaagtctgtggctatgacgactactcattcttcctcatcaacagcggtgccgaagccaatgaaaacgccttgaaactcgcctctttctacaatggccgtacccgtgtgatatccttctcaaaagcattccacggacgtacctcactggcggtggaagtaacgaacaatcctaaaatcatcgctcccatcaacaactgcgggcacgtcacctacctcccgttgaacgacatcgaagccatgaaggccgaattgtccaaaggagatgtctgcgcagtgattatcgaaggcatacaaggtgtaggcggcatccaactgccgacagacgaattcatgcaggctctccgccagacttgtacggaacacaacacggtcttgattctcgatgaaatccaaagcggctacggacgcagcggcaagttctttgcccatcagtacaacggcatcaaagccgacatcgtcaccgtggcaaaaggcatcggcaatggtttcccgatggcaggcgtactcatcagcccaatgtttacaccggtatacgggcaacttggaaccactttcggtggaaaccacctggcttgcagtgccgcccttgccgtactggacgtcatagagcaagaaaaactgatagaaaatgcagcgcaagtcggtgacttcctgatgacagaactgagaaagttcccgcaaatcaaggatgttcgcggacgaggactgatgataggactggaatttgaagcccccatcaaggtactgcgcctaagactgctgaaagagcaacatgtattcaccggcgtaagcggtacgaatgtgctccgcctgctgccgcctctgtgcctcagcatggacgaagcaaaggaattcttgaaacgcttcaagaaagttctttaatttatctacctttgccaacagacaactcttttaacaacaagaaaatatgaaaatagcaattatcggtgccggaaatatgggaggctccatcgcccgcgggctggcaaaaggaacaatcatccctgccggtgacatcattgtctccaaccccacccaggacaagctggacaaactgaaggcagaattccccgctttgcaagtgactaacgacaatcaggaagcagtgaccggtgcagatatgataatctttgccgtgaagccatggctgatgaaacttgtggtaaaggaattgaaactgagaggcacacagattcttatctccgttgcagccggtattcccttcgaagaactgacacactatgtagcagacaaggaaatgaccatgttccgccttattcccaatacagccatcagcgaaatggaaagtatgacactcatcgccagccgcaatgccaccaaggagcaggagcagctgatgctggacattttcaaccagatgggacttgccatgctcattcccgaggaaaagattgcggcaaccaccgccatgacttcctgtggcatcgcctatgtgctgaagtacatccaggcagctatgcaagccggcattgaaatgggtatctaccccaaagacggcatgcgcatggtggcacagtccgtgaagggagcagccgagctgattctgaacagtaacacacaccccagtgttgagattgacaaggtgtgtactcccggaggaattaccatcaagggaatcaacgaactggaacacgaaggattcacctccactgtgattaaagctatcaaagcgagtatttaatgtgccaatatgccaatgccctgcggcgtaacggtgtatttcaataacaacccatttaaaacaaatataattatggacgaacaaatcagacaaatagccgaacgcctgcgcggactgcgtgacgtattggaactgactgccgacgatatcgcccgcgactgtgacatctctgcagaagagtaccgccttgccgaaaccggagaattcgacatctcggtcagcatgctgcagaagatagcacggcactacggcatatcactggacgcactgatgtttgggcaagagcccaaaatgagctcctacttcctgacacgtgcaggaaaaggaaccagtatagaacgtaccaaggcatataaataccaatcactggcagccggtttcatcaaccgcacggcagacccgttcatcgtgaccgtagaaccgaaaccggacagcgagccgatacattacaacagccatgccggtcaggagttcaacctcgtactggaaggccgtatgatggtcagcatcgacggcaaagacttaatcttaaatgaaggagacagtctgtacttcaactccaaactgccgcacggcatgaaggcgcttgacggaaagacagtaaaattcctggcagtaatcatgtaataaagttatggtagaaagatttttatctcaaacatccttcacctcacaggaggacttcatcaagaacctgaagataaacgtaccggagaatttcaacttcggctatgacgtagtggatgcctgggcagccgagcagcccgacaaacccgcactgttgtggaccaatgaccagggcgaatgccggcagtttacctttgccgacatgaaacggtacacagacatgacggcttcctatttccaaagcctcggcatcgggcacggagacatggtgatgctgatactgaaacgccgttatgaattctggttcagcattgtggcactgcacaaactcggtgcagtggtgattcccgccacccacctgctgacgaagaaagacatcgtataccgctgcaacgccgcagacattaaaatgatagtctgtgccggcgaaagcgtcatcaccgaccatatcacggcagctatgccagagtctccttctgtgaaacgcctcgtaagcgtcgggccggaagctcccgaaggattcgaagacttccacaaaggtatcgaggccgccgctcctttcgtgaaaccggaacatccgaacacgaacgatgacatctccctgatgtacttcaccagcggtactaccggagagcccaaaatggtggcccacgacttcacctatccgttgggacatatcgtcaccggcagcttctggcacaacctgaaagagagcagcctacacctcaccattgccgacaccggttggggaaaagccgtgtggggcaagctctacggacaatggattgccggcgccaacgtatttgtatacgaccacgagaaattcactcccgcagccatactggagaagatacaagattatcacgtcacgtcgctttgtgcaccgcccaccatcttccggttcctcattcacgaagaccttacgaagtacgacctatccagcctggaatactgcaccatcgccggagaagccttgaaccccgctgtattcgagaccttcaagaaactgacgggcatcaagctgatggagggcttcggacagaccgaaacgacccttaccgttgccaccatgccgtggatggaaccgaaacccggcagcatgggattgcccaatccgcaatacgatgtagacctgatagaccacgaaggacgttccgtggaagccggtgaacagggacagattgtaatccgtaccgacaaaggcaaaccgctgggattgttcaaggaatactaccgtgatgccaaccgcacccacgaggcatggaacaacggcatttactacacgggagatgtagcctggaaggacgaagacggctacctctggttcgtgggccgcgccgacgacgtcatcaaaagtagcggctaccgcatcggcccgttcgaagtggaaagtgcattgatgacccacccagccgtagtagaatgtgccattaccggtgtgcctgatgaaatccgcggccaagtggtaaaagctacgattgtgttggcaaaagagtacaaggcacgcgccggagaagagcttgtcaaggagttgcagaaccatgtgaagaaagtgacggctccctacaaatacccgcgtgtcatcgaatttgttgatgagctccccaaaaccatcagcgggaaaatccgccgtgtggaaatccgggagaacgaccggaaataa

SEQ ID NO: 847 - DNA, 27333 bp, unidentified
  source 1..27333: mol_type = unassigned DNA
gcataatggtgttatgtacagaaggggagggcgcaaagccttccccttcttgttctttagaggaggtggatgcagatggcgatacggatcgagcaggtagatgccggcagcgaagccgaagctcttggccttgcccccggtgacgagctgctgagcgtggacgacaacgagctgaacgacacgctggactacgatttttataccgacagcagcagcttccacctgaaagcccgggtagcagacggcatccgggagtgggaagtacagcggccgcagcgcggtccctttggctgcgggttcaagacctatctgggcgatgcaaagcattcctgctccaaccactgtatgttctgcttcatcgaccagctgccccccggtatgcgcgagagtctgtatttcaaggatgatgacgagcggctgagctttttgttcggcaactacatcaccatgaccaatatgcaggatcacgagatcgaccgcatcatcaagatgcacatctcccctatcaatatctcggtgcacacaaccaaccctcagctgcgggtgcggatgctggccaataagcgcggcggcgaggtgctcaagtacctgccccggctggtggagggcggcattgccgtcaactgtcagctggtgctctgccgcggcgtgaacgacggcgacgagctgcgccgcacccttgccgacctgctggaactgacccccatggtgcaaagcattgcagccgtgccctgcggcattacggattaccgcaaaaatctgtacccgcaggtgccctacgatgcaaagaccagcgccgaggtcatcgacattatggaagagttcggcgatgagtgcaagcgccgccacggcaagcgcatcatctaccccagcgatgaatggtatctcaaggcaggccgtcccatccctgcgccggagttctacgaggactacgaccagctggaaaacggcgtgggcatgatgcgcctgttcgaggaagaatttctggccgagctggacaagccccaccgggtctacggcaccaaggagctggatgtggtcaccggcaccatggcagcgccccttattacccgcatgatggaggagctgcaccgccagtaccccatgatcaccgtgcacgtccacaccatccagaaccgctttttcggcggcaatgttggggtgaccggcctgatcactgccaccgatatcattgcccagtgcgcaggcaaacttgccacaaaaacgctgggcatcccggctgtgatgctgcgggaggaaaaagataccttccttgacgatatcacggtagagcagctgggacagcagctgggcgtaaaggtggaggttctgcccacagcaggcggggacgaagcccgcgctttgctgcgcagcggcctgcacattgcccgcagaagaaagagcggcagctgataacgccatttttattgtattttaccccttttaagaaaggaggagaccccatgagcaaaccgatcgtagcagtggtgggccgccccaacgtgggcaaatccaccctgttcaacaagctgtgcggccagcgccttgccattgtggaggataccccgggcattacccgcgaccgcatttttgccaactgcgagtggaacggccacgagtttttgctggtggacaccggcggcatcgagcccaaggccaccgagggcattctggcccatatgcgtgagcaggcacagatcgccatcgacaccgccgactgcatcatcatggtcacggacgtgcgcaacggcctgaccgcagccgacgaggacgtggcgcatatgctgcgccgcagccacaagcccatcattcttgccgtgaacaagtgcgacaaggtgggcgaagctcccatggagctgtacgagttctacaacctcggctttgacgaggtgatgcccatttcttccgtacacggtcacggcacaggcgacctgctggatgcagtgtgtgcacatctggacttcagcgagaccgtggtggaggaggaccgcatccccgttgccatcatcggccgtcccaacgtgggcaagtccagcctgaccaaccgcattctgggcgagaaccgcatgatcgtggctaatgaagccggtactacccgcgatgccatcgacaccccggtggacaacgcctacggcaagttcatctttaccgataccgccggtctgcgcaagcgcagcaacatcagcgatggtctggagcgctacatggtggtgcgcgcactggctgctgtggagcgcagccgcgtggcgctgatccttgtggatgccaccgtcggctttaccgagcaggacagcaaggtggcaggctacgcccacgagcagggcaaggcctgcatcatcgtggtgaacaagtgggatgccgtggaaggcaaggagaccaacaccatggagctgcagcgccgcggctatgccgagtgcttcagctttatgggctacgcacccatcatcttcatctctgcccagaccggctacaacgtgaacaagctgatgcagctgatccgggatgtggacgccgagaacggtgcccgcgtacccaccggtgtgctgaacgagatgcttgcccgcgctaccgcccggatgcagccccccagcgacaagggccgccgcctgaagatctactacctgacgcaggcctctacccgtccccccacgttcgtggctttcgtcaacgcaaagcacctgttccacttcagctatcagcggtatctcatcaaccagatccgcgaaaactttggtctggagcatacgcccattcgtctggtcgtgcgggagcgcggctccggcgaggtgggtgccaaggacgtataacacgtcaggagggctcagatgatggaatctgttctcatcgctgcggtgtccgccgtgcaggcatacctgctgggcagcatcgacaccggtatcctcgtcagcaagtttttgtaccacgatgatgtgcgcaagtacggcagcggcgctgccggcatgaccaatatgctgcgcaccttcggcaaaaaggcagcggcacttaccgctttcggcgatgtgctcaagggcgtgctggctgtgtgcatcggccgctggctgttcaccctgatgccggagagtaccacgctctcgccgtatcttgcggtgtatcttgccgccatctttgccattatcggccacttgaagcccctgtatttcggctttaagggcggcaagggcgtactggtggcgggtggtaccattctggccatccagccggtgctgatcccctttctggcggtcatctttctggcctgcctgctgcccaccggcatggtatcgctgggcagcgtgaccatggcggcactttacccggtgctcaccatcctgtacggcgtgttccggggctactctgccgccgaccttactgtgtgcgccatcggctcggtgatcatgggcgcgatggtcatttatatgcaccgctccaacatccagcgcatccgcgagggcaaggagtaccgctttggccgtcacggcaaaaagtaacctcaaatagcactacgccccgcagcggccttctatcagccgctgcggggcgtttttgtcagacagcagtcaatggcaggccgcggcttttccgcttctccaagctctgtgacggattcgaaacatttttgtgaaagactgccaaggcgcattgacaacgccgtccggtcatgttatgttagtattgacaaatcagtaccttatagggcattatatactctgtttcaccatgccgcagctgcggcagaaaggataaaaccatgaccactgccttaaaacgtaccggcgctgccctgctgacgctgctgatgttctgtgtgctcacactgggcgcttctgccgcagccaatacccccgttggggtcaaattctggaaggaaaagtccgataaggaatccatggccaactctggcatcgattctgaccgcgaagccacccttacccgccagtccaacggcacctacaccctgacgctgcccgtcaagcaggtgaccaagctcaatgtgaccggctacctgtccggcctgaccatcggcgatgtgacctacaccggcaccctgaccggcgatattgaaaagggcaacggcatcctgaccatcaaaaacctgcctgcctcagtgctgaccggcagcgaggtgggcaaagcgctgaccgtgacctgcaatatccagatggatctgagcctgctgggcgagatcaacaccaccgcccggatgtgcatctgggcaaaataagccgcacgataacaaaaaagcgccgttccacccgggacggcgctttttgctgttcagcagtcgatgtgcttttccacaaaatcggtggccatcttatccagctgcatcaccgcgttttctgcgcccttcatcaccttgcgcacgttgcggcgcatctggcgcttgctctgggtggccatcatggcaccggcagcccccagggctgcaccggcggccatgcccactaccatgcctgcggcagaattttctcgctgtttcattctgaatttctcctttcggcctgtcatgacagggcttgcagtgctattatttccgcaaaagaatctggtatgcgctttttttatgcagcaatttgtggtatactgttgtatgatgctttttataggccgctgcgcgcggcttttcggcaaggaggttttcctatttgcaaaaacccgttgaaccaaaaaagatcctttgcatccacgacctgtccggcgtgggacggtgcagccttgcagtgatcctgcccgtgctgtcggtcatgggcttccagccggtggcgctgcccacggtggtgctttccacccacaccggcggtctgggcacccccgcccggatggacggcagcgcctacggcatggccgcgctggagcactatcaggcgctggaactgcaatttgattgtatctataccggctatctgggcggcgaagcacaggtagcgctggctgaaaaagcctttgccctgtggcctgccgcctacaaggtggtggaccccgtgatgggcgataacggcaaggcctattccactgttaccccggcgctgatcgagcgcatccgcaatctgtgccgcgcggcagacctgatcctgcccaactacaccgaagcacagctgcttttgcagcagcagcccgtgaccgagcagctggacgatgccgccgcgcaggcgcttgcagatgctttgccgccgctggcccccaacgcggtggtcaccggcctgccgctgggcaagtacatcggctgtgccggtaccggcacggatcgttttgttatcaaaaagctgcatatcagccgcagcttccccggcacgggggatctgtacggcgcagtgctcatcggctcgctgctgcagggcaacgccctgagcgccgctgccgataacgccgcagagtttgtttcgctggctattcagggcacgccctacacgcaggacacccgcttcggcgtgtggttcgagccgctgctgccccgcctgtgccccctgcgggaggaaccggagggcatcttatgatgaacaagccgactttgaatatcgttctggtagagccccgcatcccccagaacaccggcaacgtggcgcgtacctgcgcctgcaccgcctgccgtctgcatctggtaggccccatgggttttgccatcgacgacaaaaaactcaagcacgccgggctggactactggcactatctggacattacctactacgacggccttgcggactttttcgcccgcaacaacggcccttactattactttaccaccaaggctccccagcgctacaccgatgtacagtacccggacggggcttatctggtgtttggccgcgaggatgccggcctgccggaagcactgcttgcggaaaatcaggagcactgcattcggatgcccatgcgggacacctgccgcagcctgaacctttccaacagcgtggcggtgggcgtgtatgaggtgctgcggcagtgggattttccggagctgctggaccacggccacctacgagattatgaatggaaatgagggaaattatgagcaagatcgcgatcctgaccgattcctcctgcgatatcccgcaggagatggccgaaaagtacggcattgatatcatgagcttccacatcctgctggatgatgtggactacgttgagcgtgtggactgcaccaacaccgaattctacgataagatgcgtgcggcaaagggtgtgccctctaccgccgccatcacgcccatccagttctgtgaaaaatactgccagtatgtggacgagggctacaccgatgtcatccatgtgcccatcaacaagtccggctcctccacctacaacaacgccctgatggcgcaggggatgctgcgggaggagcgcccggagcatcatctgaacatccatctgcttgacccccacacctattctatggtgttcggctggtatctgtgcgagatggcgcgcaagctgcagaacggcgcagagatccgccatgtcatccacgagtttgagcggcagatgaactgcatggaggtcgtgctggggccttacagcctgaagcagatgaaaaagagcggccgcatctccgccgccgcagccgtcatgggcgagctgatgggcatccgtcccatcattaccctgatcgatggcaagaccaaggtggaagccaaggtgcgcggtgatgaaaaagtcgtgcccgccatggtggatctgtgccagaagcgcgctggggatgtggaggattttgagtatatgatcggccacaccaacatcccgcaggcagaggatctggaaaaagcctgccgcaaagcctttggcaagccgccgctggccgtatttgagctgggcggtgtggtctctgccaacaccggccccgacaccgtagcgctgacatatactggccaccccagaggttaaaaacatttggaatggccgccgctgcgctttggccatattcagcggaatcattatttgaaatttcggaataccggagcgtctgcggacgctccggtattccatttttacatgaatacgcccagagcagcgcggcgggcaagttttaatcgtcctcttcccattgcaatctgtccgattttgtgatatacttccttctgctgtgcttttttgtgcagtatcctcaaagagcaacttaggattttaggctccccggcatcactcgagcagtgccgggcaaaacccacaggagctggcggttcctgtgcggtcaaaatcaaaccgctggagtattatcatgaatcagaattcttccgtccgtaagctggtgcactgcggtgtagtggcagccatctatgtggtgctgtgtctggcactgcagcccctttcctatggtgctgtgcaggtgcgcgtggccgaggctctgtgcctgctgcccgtgttcggtgccgagtacatcgtaggtgttgtgctgggctgcttccttgcaaacctgctgggctctaccatcgtggatgtgatctttggcacactggctaccctgctggcctgtctggttacctacaagctgcgcaatgtgcgcttcaagggtctggccattgcagccagcctgcccccggtgctgttcaacgccgtgatcatcggcattgaaattgccgtgatattcccggaccccacgtccagcgcacccatctggctggcctgcatcaccaacggcatctcggtgggcattggtgagctgatcagctgtaccgtgctgggcgtcgtgctggtaaagctgatcgagagcaacgccgcactgcgcaaggtgtttgcgacggaataacacaaggaggtttccatgcagccgaacggtatgatcttctgggactggaacggtaccctgatggacgatgtggattttacccacagctgcctgaactggatgctggagacccacggctacccccagcggtacgatctggctgcctaccgggagctgttcggctttcccatcgaggactactaccgctgcgccgggttcgactttgcgcggcatccctacccggagcttgccgcccgctttatggagcactacaacgccggtgtgcccggctgcgctgtaacggcacacgccgttgacaccctgcaaacgctggcccgcatgggctggcagcaggctgtgctttctgcctcccgccgtgattacctgatcgagcaggtatccgcccggggtctgcaaggcttttttaccgagttgctcggccttgcggacatttacggcgtaagcaaagtgcagcttggcaccgactatctgcgccgcaccggcattgatcctgcggcctgcgtgatggtcggcgacaccgaccacgacgctgcggtggctgcagctatcggtgcggtctgtgtgctgtacaccggcggacaccagtcccgcgcccggctggaaaaggccagtccctatgtcatcgacgaccttgcccagctgcccgcactgctggaaacgatataatattagtggctcagaaacgcctgtcggcgtttctgagccacttttttgcagacagcggtctgccctgttcaagtcctgctgcttcgaaagaaagatcgtacctgcctaagcagcaaaaagtcccggtcatttgaccgggattttggaattcatgcggatttttctcactaaacgacttataattcaccgctggaaaagatcgtggaaagatgctgaaaagaagcttttactgtatcaacaaatccagtttgctgtgcgctcactaatgatgtatcgtggacggtgcttggcttccatatagattttccccacgtattcaccaataacgccaaggcagatgagttgtgccaaacaaataacattggtcataggaaactagccggaaacgatgtgcttaatcaatgcccatataaccaattagattatcttgttattagccgagcgaaattgcttcccaggggaatgcctttattctccatacaaaatgtcgcatacaagccatagccgacagtaaagcatacaaaatcagaacgcataccgtaacagcattgaatatgtaatgaacgtccattgcaaaaacctgcagatacatctgctcaatccatcccttagctacgcaaaacaccatgaagaactttagcagaacatctcgttgcgcttcaatattcttgaaattatgcttcagataatacgccagccgataagcacgctgctttaagcttttgtcttcccgatgaagattcatatcaagccagcggatatcttttttccagcgtctcctcgcaaatttctgttcttccggcggaagctgttccaccaagggcattaccatttcctgatccatttttagcagatccgaatagtagctccgggcagacgccgacaatgtatcactctgaccgtgactgatacctccatcgcgatgtttgatcgttacacgattaacataatgaatcacccagccctcatttgcaagacggcagtgcataggaaaatcttctactagtttgtactcctcattgcagtcgccaaaacgctcaaagaattctcttttgaaacaggtactggtggtgggtagacaggtgccatatattgccagcatttttttcagagcatcggtgttgattgcggtttccactaccgcatcttgaaccggcttagacatataatagcccatcagcttttccaatttttcgtcaaacatagccgtctgagccatttcaatgcaacacccttcaggcgctttctgaaaaccctcgtagtaatttgtcaggacttgcgcgttataaagtgcatcgtcgcccgccagaaaaatcaaatactgccctttgcaatactctttgacatggttgatgtgccggactgtaccaacattttgcggttcacaacgaaccgtgacagagcgaatattttctctcttgttctgctcaatatactcctcgatcttcctcgcaggaaaattagatgatccatcatctgaaataatcaactcaatattttcataatcctgctccagaacagagtttactgcagttttcagatgttcataatggcgatataccaaaacaacaacagagaataagggtttattcatcacaattccctcttttctttttgcctaaagtacagcttcgttatgattgctactaagacaaccgtaaaatatccaccagctgctacagtaaagattccggcccagaaacgggcaatattctgaatcggcagaaccccggcctgaacaatatagaacaggaaacatagcgccataactattttattgcggaactctaacttgcatttgccgaatccaaattgtttccgcacgattccaaagtagagcatatatgcaaggcacacgatttctacagcaaggatggcttctggcttctgttgtacgaaataaaataccagaatcaccaataaggacagcagcgccagaaaattatccaacggaatctgaaaaccgctggctcctttccgatagaaacgtgactgcataagaaaacaaaaatgagaaagtctccaggacagtttttccgcgagcgtcatatcattccattcgaactcgctcgtaattctggcacgaatcgcttccacgcagtgtcggcattttttcaggctcttcccatctccgtttttctcaagctctggtatcgcaatttctttcagcatacgaatgcattcctcgtaatggtctttgcctaaggcgcgattcgctgcgctaaagtcattagaaataccgccatagcgataaatcgttgtcacatctttaatggagtggatttttatccccttctgtgtaatgcgcagccaagttggccagtcttcggtgtacttatacgttgcgtcaaatccaccaatctcattatacagctctcttctccaaaatacagccggagcattgatatattcaccccatgtttgcgtgctcatgagccgaaactgccccacacaatttgtctcctgcattttttcgattgccctacaagaaggataatagtctttggttcgttttccatctggggtacacgctacagatcgacccgcaataatctgcacactttcatcctttaaaaatctgcataccatattgctcacaacgtgcgcagaatacagcatatcatcgcctgcatggagcttaaagatcgtacccgcggacaattctatccccttcattgcattcgccgttgttccgacattttcagactgctgaaaaacaatataattcttcaggttctctttttttagccgttcaaccatccgggtggtctcttctgcatcaaaatccgggcttgcatcgtcgcaaatcaccagctccagctttggataatcttgtttcagaattgacgcaagacaatcctctagcagatattgctgattgtaggtcaatacaataatggaaatgagaggcaggttttcctcctttacccccaaaatttcttgcacagattttttctctttgagtactaactttttgttcttttgcttttgttcgtccataacgcttccttttgattccctacctcagcagaatataggctttcacaattgcactatctacaatttcaagacgatttgaaaaatatcttactcctccaaattttcaatatgatatgcctccttctgcggaatgtccaaacttgcataccaagtttcaaagtcactttctgcccatggcatataatgtgcgaagtgatttctccaaggataagctgccgcaccggtaactttgtgtttgagcttccgcacatcggataccacttttccagggttacccactacaactgcataagacggtgcgtctttggtaacattagaacacgcaccaatcagcgcatcctgtccaatctcaacgccaggcattacaactgtacctgttgccaccaccgcaaatgggtgaatgtgaacacccataaagtgatctgatggcggcgttgggtcgtttgtcagaacaacatacgggaagatccaaacaaaatcatccaccaccgacagttgaccaatatggacattgctatgcattctgacataattgccgattcggcagtttccctgaatatctgagagcgtacctacgctcacatgatttccaatctcagcacgctcccgaaccgtaacccgatgcccagactggaaaccgtctccaatcttagaacctgcatagagaatcgttccacttcggagcaaagcatcttggccgattatcaatggatgttcatgggacttccgatccatgcaaaaatccatccaatactcgcccaaaatgcaattggattccacaaatgcgttatcacccagcgtaacatggctgcgaataatcgtattgctgtctatatacgagttgtttccaatcacaacgtcatcctcaatgataacattatgccccaataccacattctcgccaaatgtcacgttttgaccaataatgcaattcagcccttttttcatggtagcctccttatatttttaagagaagttgttgattgcatcaatcacataatcaatctgttcatcggtcattccatagaacatcggcaggctcagcactgtacgactaatctgctctgcaatcggcaagcttccctccgaaatattcaagcactgatagcagggttgcagatgcattggcacaggataatggatcaccgtcagaatgcctttttctttcagataagccgccaactcatctctcttttcgcatcgaactgcaaacacatgatagatatgcataaaggtatcatcactaggcagtggcaactgaatcagcggatttctgatttcgctcaaatagcgggctgccgttttttggcggtcggcattccatttttccagatgcggcagctttacgcgaagaaatgcggcctgtagttcgtccagacggctgttgcttccttgataaacgtgatgatacttgcgatcactgccataattgcccatcgcacgcacagtgtctgcaatttttttattgttcgtcacaacacagccgccatcacccaatgcacccagattttttcccggatagaagctaaacgcggccgcgtcaccaaaagttccaattctgcgtcctttataacaagttccatgcgcttgagcagcgtcttccaccagtttcagatggttgcgttttgcaatttccacaatgggatccatatcggccgaacgtccttgcaggtgtacagcaataatcgctttggtccgttctgtaattttctcctcaatccgtgcagggtcgatgttgtaagtttccaagattggctccacaaaaaccgggcatgcgccacagtagctcacagccaacgccgttgcaataaacgtattgctaggcacaattacttcatcgccttctccaatgccaagggcacgcagaattagatagattgcgtccaagcccgttgccacaccaatacagtactcggctccgcaaaacgctgcaaactctttttcaaaagctacacactctgggccttgaataaaattgctgttttccaaaacccgagcgtacgctgcgtccagttcggaacgcagttcattgtgcatcggcctaaaatccgcaaaaggaactctcatttttctaagcctccattactattagaaacagccgcataatcaaatacataatcattgatgtcatattttttatctacgattgcaagcaataccgtattcggcgcaaaattggacatttcccgccatacaaaagagtgaatatagatacccttgcttggagtatccaaatgtaccgttctgcgctctctcccattatcaaccagaatatcgcagcttccattgatgcacaacaaaacctgatgcaagtctttgtgcgcatgcttgccacgagttacattcgcagatgtattataaatatagtaaactcggttcatctgaaatggaattccatttccctcttcaattgcgaccaaatctcctcggtcatctccatgttcgtccagacaaatttgatcaacgccatcaattatagtggtaaatcgtgtcattctctttttaacctcctagtttctttatatatctgattaaattttcgggatacatcgccaataacccaaacttttggcacaaagtattcgctcgtgcatagcgcgcaagaaatttgccgtaccgtatcgtttttatcttccacagcccatgttttatctttatattccgctgtgcagaacaataaggataaatctcagctgagaaaatcgactcattttcgtccattaaacttaggattcttccgggcgaactgacgccttctgattggcaacatactacctctttcgggaaaaaataaattttgactccgttgcgcagtagtttcatcacccgtgggtaatcttctgtcaatcggtatcgcacatcatagagcccatatttttcaaaggctgtcatactctgtgcagtagacgaaccaaatatgtaattgcacaccgcaaggtcgtcaaataattcttgcggtgtatatgttagaatcttcacgatttcattttcgcacggctcaactcgaactttatcaactccttttgacgaaacgatctgacgccttgccgtacaaatttccgcttggttttgcagcatatacgccgtccattccttaagaatttctggtccagtaaacacatcatcatccgccaaattgaagatgtatactccataaacagccgatagtgccgtgttcaatgcatacacagtccctttgttttccggcagtcctataacctgccagtgcacccgtgacggtgcctttttgtgcaagtactgccgaatttcttccacggaatatccttctgtaccatccacaacaaggacatattgaatactcgggtatgtttgacataaaaccgagtcgattgtatcgaacagtgtcttacttttataatgaggagtaatcaccgatatcgtctgtatcttactcattggcagaacgatacatcttaaaggcttcttctaccggcaggaagcacattttgtttccgtgatccaaccaaacagccttctgacaaaggtttttcacctgttcctcgctgtgactgacgaaaatcaaagtcgttccgcctttcagcatatcattcatccgttctttacatttttcttgaaagcgatagtctcccacagataaaatctcatccactactaagatatctgcatgaacctccgttgcgatcgaaaagcccaaacgcgctaccatgccactggaaaaattcttcaccggtacatcaatgaattcccacaattctgcaaagtccacgatacttttgaaatgtttatccataaatgctcgatcatgtccgaacaccgcgccattcaggtaaatattttctcgtgcagtcaggtccatatcaaaaccagcgcccagttcaatcaatggtgcaatgctcccgcggacttcaatgctacctaccgtcggatataaaactcctgcaatgcatttaagcagcgtgcttttgccacttccatttgctccaatcagcgcaacagcttcacctttatttaccgtcaaacttacgtttttcaaggcataaaattcattaaacatcagttgatgttttagaagctttacaacatattctttaattgtgtcagttttctctgttgccagattaaacctcatagacacattcttcacttcaataatcggtagttctttcatagttcccgttttccaatcaaatgtacagaataaaattacgctgcatttttctaaataccactaatccaaggatcaaagccaaaaggctcgctgcaatacactgcaaccacataaacgctgttggcatagttccatacaacactacctcgcgaaagaaagtgatatacgcacaaatcggattcacctgaatgataggctggatgttttctggaagagcgctcaccgggtaaaaagtcggcgtcatatacatccatgccaatgtcaatacgctgtacaagtgtgtaatgtcccgaaaatagacgctcagtgcagaaaggatcatgccgacgcccatagaaaaaagcaataatagaaacaatggtataggaaacaacagaatcgtccagtaaaaaggcgattgcgtcccaaccataacaatcaaaatagctattagactaaaactcatggtaacgaaactagatagcacacggctgaccgggaatataaattttggaatgtaaacctttttaatcaatgctccattctgaagaactgaatacatactcatatttgtactttcattaaagaaagtccacaaagtttgacctgtaatcaggtacaacggataatttggaatatcaaatcgaaagacgtaactgaacaccaacgtcattacgcacatcattaataacggattcaaaagactccatacatatcccaaaaaactacgtcgatacttaactttcaaatctctcgcaaccaactcgtataaaagtggtttatattgtataaaatgttgccacgccaagttcattggtataaccttcctttttctatatcgctattttaattaccttgtttctccatattttctgtcaacattcttttggtgtacttttcaagatattccacttccgggctgaaggaccaacctgcgcgtataccacagaaaagcactctaaaacggatccctttgggctttccatagcatacgattcgaaaaaaatcttggcatcgctttaccgcgcaatgcatccttcctttaaaaccttcctgcctatacagatacacctcatttcgaaacgaataaaaatatcgttcaactctttctatgctatcgcgcgccacattagagcccatgttatttctggttgcatgaacaacttgactactacgtaccacatatcccatcatatttccgcgcaccgcaattctccgagtatactcaatatcgtcgccccacaagaagaattcctttatcggcaacccgaacctgcagattttttcagcaggaagaaacaatgatacaaaagttgcctgctcggcctgaacaagcccatccttcaaaagagaaccatactcgcaattgttcttcttcagtttttgccgattcatcctgcattcgctaccatcagtccacaaagcaacgctggaaagccatccataatttccttttaagatttcgtctgcgtccaataatctctccagtgcattggttttgggtagggtatcatcatccataacccatacatagtcatatcctgcttctactgcccatcgcatcccataattgaagcctccggcacctccaaggttgcttccggtattccgaaaagcaatacttgtctgcaacttcagccactgggaggtttcatctgtgcttgcattatctacaatcagcacatcacatggagccgtttgttcttgtagagacgccacacactttttcagtagctccaagcggttatatgtaacaaccaccgctgcaactctattcttcggtttattttgcatcatcccacataattcctatcttttccaacttttccgctcgttctgaagttatgatgcaattactgtttttgcctgacttcttccgggcactttttgtcaagccaatcatcggctccgtttataaccatctgccatacagctgacacaaggagtattcagatcgccgtaagggtagcttccattgcaatcattttcgacataattgtacgaattctcctgttattttatcatggatgcagagggaaatcaatataaacagagcgggttttctcagataaaaacattgcatgaagcgtttcttttcaacaacacgcttattttaaggagaaacgtcccagccggtcccccatgctcgaataggttgtcaatccagcgtcaacttctgcttgccagcagccacacaaaaaaagacagtcccaccacccggtggaactgtcctcgacatttttctcgttcagctttacaaaaaagtctgtcagcgtcagcctccaacagatttcctgtttgcgcctgaaataatttttggcgcttttttcaaaaccggctcgtcattctgccgaataaagaaaaaagcacgaaaattcttagcgaatcaacgtgcatttttttggtcggagcagcgggatttgaacccacggcctcctcgtcccgaacgaggcgcgctaccaactgcgctatgccccgaaaataccgcagcttattcggctgcggtaactggttggggatgagagaatcgaactcccacaagtagagtcagagtctaccgcactaccactatgcaaatccccaatattcggttgtgtcagccgcgccgtgcgttgctgacaagggatattatacacgccggcgggctgcttgtcaaccattttttcagtttttctgcaaaagttttcgcagcggccgcccggtgtacataggcttgtaaatttttggtttttctcttgacagcactcccctttcggaatactctaatactataaaaaggtaggaccccgggcgctccggcatcctttgccgggcggttcggctttgcctgaatgataaggaaagagggcttttgaatgaaaaaacgtgttggtatcctgacctccggcggcgattgtccgggcctgaacgccaccatccgcggcgttgcaaaagcactgtacgcccgcatgggggataacgtggagatcgtaggcatcgccaacggctacagcggcctgatcaacggcgattaccgcgagatgaccgaggacgactttcgcggcatcctgaccttaggcggcaccattctgggcaccaagcgcaccccctttaagatgatgcgtgtggtggaggacgacaacattgataaggtcgccgccatgaaaaagacctacaaggctgccaagctggactgcctgctgtgtctgggcggcaacggcacccataagaccgccaacctgctttcacaggaggggctgaacatcatcggcctgcccaagaccattgacaacgatatctacggcaccgatgtgacattcggtttccataccgctgtagacatcgccactgacgtcatcgaccgcatccacaccaccgccggcagccacagccgcgtgatgtgcatcgagatcatgggcaacaaggccggctggcttaccttgtattccggcattgccggcggcgcggacatcatcctgctgcctgagctgccctacgatatcgaccgcgtgtgcgaggccgtggagcgccgtgcgaagaagggctcgaacttctccatcctcgccgtggccgagggtgccatcaacaccgaggaagcccgcatgaagcgcaaggactggatggccaagcgtgctgaggcagggcttggcaccaccgccaccaaccgcattgcgcaggcggtacagaaaaagaccggcatggagacccgcgtgtgcatcccgggtcatatgcagcgcggcggcagccccagcgcctacgaccgtgtgcttgccacccagttcggcagctatgccgcacagctggtggaggtggagcgctacggcgtgaccgtggccatggtgaaccgccgggtgaccgagaaccgtctggcagacattgccggcaagacccgcaatgtgcctgaaaactgcgagctgctgagcgtggcacgccgcatgggcgtctgtctgggctgagcaccaatttgcgttgggatactatggataaatagcacaaaaatcggacagaccgcggtctgtccgatttttgcatttcaccatttctcagcggtcagtcacatcatgccgggtgggcaagccctcggcaaaggcggaagcgctttccagcacactgagcaccatgctctttacagcttcgtaggtgtagaaggccgtgtggtcggtcaggagcacattgggcatcgcgcgcagcgcagccagctccgtgttcgggatcacatcccccatgcggtcgtaatagtacagaccgttctcgttttccagcacatccagactggcagcacccacctgcccgctttccagcgccttcagcagggcatcgctgtcgatcagcttgccgcgggcggtattcacgatggtcacgccgggcttcatcttggcaaaggcttcggcgttgagcaggtgatggttttcctcggtggcattggtgtgcagggtgatgacatcactctcggcaaacagggtatccagcggcacatactccgcgatcttctttacctcttcactctggtacaagtcgtaggccagcagacggcagccaaagccggacaggtgcttcagcacggtctgcccgatgcgtcccgtgccaatgacgcccacagtgcagtgggagatatcccgtccaagcttgcccttcagggagtagtcctgcacttcgccccgcttgaggatgtgccccgccttgcgcaggctcatcagtatgagcataatggcaaagttcgccacgccctcgggaggataatccgcattggatatcttcatgcccagctcccgtgccttttccagatctatatggtcgtagccgatggagcggcagcagatggctttcaccccaagatcgtggaagcgctgcagcatgggtgcgctcatatcgcagggagtcaccgataccgcatcgcagcctgcggccagctgggcgttctccatggtgggatacacctcagtataaccgtactcgatgccatactgctttgccagttcctctacgatgccctgctcatcgtaggggcgcagggtgtagaaaaacactttgactgccataaaatctcctcctgatctttctgctgtgcggtgcgcccgcttctttataagggtgtctttattgtagcacgtttatgactgacggacaactttttaggttgaattttgttattgcgcccgtgctttctgtcccaagtgggcaaaaaaggttgtcaaaacaggaaaaacggggtatgatagaagctggatcacgggctgtgatccttcaatattgctaaaggagtgtgctttattatgcgcgcctatgaacgactgcttgattacgtcagggtctacaccacctcggacccggagtccggcacccatccttccgctgcgcgggagtttgatctggctcacaagctggtggaggaactgaaggctctgggcgtggaggatgcccgggtggacgaacactgctacgtctacggctccctgcccgccacccccggctgcgaggaaaagcccgcgctgggtctgatcgcccacatggacaccgccccggatgccggcggcgagaacgtgaaccccatcctgcacgagaactatgacggcggtgatgtggtgctgcccgccaccggcaaggtgatgaaggtctctgccttccccttccttgcctccatgaagggcgagaccctgatcaccaccgacggcaccaccctgctgggtgcagatgataaagccggtgtggctgagatcatgaccgctgtggagaccgttatccgcgagggccgtccccacggcaagctgtgcatcggctttaccccggacgaggagatcggcgagggtgccgatctgttcgatatccccggttttggtgcagactttgcctacacggtggacggcggcgatgccggcgacatcgagtacgagaacttcaacgccgctgctgccaccgtgaccatccacggcttctcggtgcaccccggctctgccaaggacaccatgatcaacgcttccaacgttgccatggagttccacggcgctctgcccgtgatggcgcgtcccgagaccaccgaggggcgtcagggcttctaccacctgtgccagatgtacggcgacgtcaccaccgcaaagctgggctacatcctgcgcgaccatgatgccgccaaactgcagttcaagaaggacaatatgcaggacattgccgattacctgaacggcaagtacggcgcaggcaccgtagaagtggagatcaaagacagctaccgcaatatgctggaaaagatcaagccccacttccacctcatcgagaccgcccgcaaggctgtgcgcatggccggtctggagccggtggaggtgcccgtgcgcggcggcaccgatggcgctaccctgagctggaatggtctgccctgccccaatctgggcaccggcggcttcaacttccacggcgtgtgcgagtgcaccaccgtggagcggatggaccgctgcactgagatcgtgctgaacatcatctctctgtacgcagaataatttttctttcgttttctgtaaaacccttctgcataaaagcatgaccccgcgtgaaaacgcggggtcatgttgtatagtttcccaaaaacgtataaaacacaaaaacccgcctggcagcgggtttttgtgtatagaggggtgggaaagtatataaagtggtgaatctcaatatcagcggcaggcttttgtgcagtgcgctgccttgcatgatgtattatacccgtttttcttttcttgtcaaacaatatttttggattttgctttaaaataatactttactttttcgcaaaaactttatataattaacatagaatttcagaaacgaaattttattccatttccgtgggtttgcacaacataaaaactttactttcagaaaattttatacaatccaacatattttttaaggagacttttatatggacgatctcgatcgcaagatcctcacgcttctggccaaaaatgcgcggatgcccgtcaaagaaatcgcagagcaggtatcccttaccagcccggcagtttccagccgtatccacaagctggagacagacggcatcatcagcggctataccgtcacgctgaaccgtccggcagaccggatgtatgtggatgcgctcatcagcctttcggtggctccctccaagcaggatgcctttctggagctgctgcagaacagccgcgaggtgctgcagtgctaccacgttaccggcgcgtatacctttctggtcaaggtcagctgcggcagcatggcacagctggaacatctgattctgcagttccagaagctgggcactaccagcacccagatcatcctgtccaccccggtgaaccatggcgatctggacgctttgatgctgtaagcgggcactgttcataaaactgttactttttccctgcaattctgctgtgcagtgattcgtatccagaatagcagcccaaaaccggcacacactacctgtagcgtgtgcgccccggctgcaccttccacacacagcactatgaaaggaactttaatactatgaaaagattcatcgccgccctgctggcagggctgaccctgtttaccttggtgggctgctccggcggcagcaaggccgacagctccacccccaaggactactcccagatcatccacgatgcccgcagcgacgaggacaacgagtacgatatgatctttaccaagggcgaggacggcaagtttaccgccattgacggttacagctccgagtacaaggccgaccagctggacgaagagatccgggatatcctgatgccgctgctgaatctggaggacgaccagtacaccgcctttgccgccagcatttccagcatgatggtgcgcagctatgctgttgccatcgtaaagcccgccgagggcaagaccgatgcagtaaaggctgcactggaagcctatgttgccagcgaacagcagtccatggagcattatctggaggatcagtaccttgttgcaaaggctgccaccgtcaccgtagcgcccaccggcgaggtggttctggtctgcgctgaggatcacgacaccattctgtccaacattgaaaaggctctggccgcgtaaaatgcgtttctgagagaagccgctgcacagcgttttgtgcagcggcttctttttttcagaacttcagctgctcctgcaaaaaacggcacagcggtgcaagggcatccggggcaaagccgggcaccagcagggtctgcccgtccagctctgctggtcaatatgcgtccgctgcacaaaagggctgctgcacattgcggtgcagcagcccttcagtttacctttccatgcacagcacatccatgttgccaaagccctgcatggcgttgacatccttgatgatggcgctgcctgcggaggctgccgcaatttcaccggaatttttgctgaaaatcattgattttatctgtcaaagcattcataatatctttaattgtaaaagacgttttcgtgtgcaggaggaaaagcatgaaacaggagctgatggacgccattcaggaaatgccggtcattgctgccgtcaaggacgatgccgggctttgcagcgcgctgaccaacgagaatatccgggtggtctttgtattatatggagatatctgcaatatctcctccatcgtgcgccgcatccacgaagcggggcgctttgccgtggtgcacatagatcttattgccgggctggcgggcaaggaggtagcggtggacttcatccgcaataccacagaagcggacggcatcatctccacccggcagtccttcatccgccgcgccaaggagctggggctggttgccatcctgcgggtattcctgctggattccatcgcgctggaaagtctggacaaaatccccgcaaacctgccggactgtctggatctgctgcccggcgctatgcccaagatcctgcgccgcgtctgcgccaaggccaaggtgccggtgctgaccggcgggctgatcgcggacaaggaggatgtgatggcggctctggaagccggtgccaccgctatttccaccaccaatcaggcggtgtgggatatgtgatccgcattctgcgcaaaagcggcgggtgttttttgtaagggtttcacaaaaagtgcaaaacaccttgctttttgtgcagggacagggtatcataaaagcaaacaagtgctgtttgtttcaagagatatgagcgaaacggacaagggcagttgcctttgtttcggttcgctctttttttgtgcaaccaacagatgcccggctcccgcaggccaaggcagaacagacaggaggaaaagaacaatgtatgatatcgcgatcatcggctgtggcgtcattggtgctgctgccgcctatgcgctgtcgcgctacgacaacagggtggtcatcctcgaggccgaaaacgatgtggcagactgcaccaccaaggccaacagcgccattctccacgcaggctacgaccccgcccccggcacccgcatggcacggctgaatgtgcgcggcgtggcactggcaaaggagatctgcgcaaagctggatgtctcctataagcagtgcggctcgctggtgctggcactggacgaaaaggaactgccccacctgcagcatctgttcgaaaacggcaccgccaacggcgtgcccggcatgaagatcctttccaaggaagaggcccttgccatggagccgagcctctctgagaaggtctgcggcgcactgtgggcacccagcgccgccatcgtgaacccgtgggagtacgcactggccatgaccgaggtggcagtgcgcaacggcgtggagctgcgccgcagctgcaaggtgaccgatgccgaagccatcgagggcggttaccgcctgaccgtgcccggcggcacggtagagacccgctgcgtcatcaacgctgccggtatctgggcagacaaggtacactccatggtggagcccgccaacttccacatcattcccacccggggcgagtactacctgctggacaagagcgagggcacccgcgtgagccacgttatcttccagtgccccaacgcgctgggcaagggcgtgctggtagcacctaccgtgcacggcaacctgctcgtcggccccaacgcagagccggtggaaggcaacgacacctcctgcaccagcagcggtctggaattcgtcaagaccactgcccagcgcagcgtgcccagcatcaacttcggcgagtccatccgcagctttgcgggcgtgcgcgccaatctggacgtggacgactttatcattggcgaagagccggaggcacccggctggatcgatcttgccggcatgaagagccccggcctgtccgctgccccggcggttgctgaggaagctgttgccatcctgcagcagcgcggtgttctgggcgctgaaaaggccgattacaaggacggccgccgccatatccgcttcaaggagctttccgcagaggaaaaggcggcactggtcagggaacagcccgcctatggccgggtgatctgccgctgcgagaccatcaccgagggcgagatcttagcagccctccacagcgaggtgcccgccaccaccatcgacggcgtaaagcgccgcgccggtgcgggcatgggccgctgtcagggcggtttctgcggcccccgcgtgctggagctgatcagccgtgagctgggcatagaccccttggacatcctgcaggacaagaacggctcgaacgttctggtcagcgaaacgaaggtaggaggaaaaagcaatggttgatctggtcattatcggcggcggccctgcgggtcttgctgctgcctgcaaggcatgggaaagcggtctgcgcgacatcctcattctggagcgcgacaaggagctgggcggcattctgaaccagtgcatccacaacggcttcggtctgcaccgctttggcgagcagctcaccggcccggagtacgccggacgctttattgcgatgctcaaggacaccggcgtgaaggtgcagctggacaccatggtactggaagtaaccccggacaaaaaggttcactgcgtctccaaggagtacggctatcagatcatcgaagccaagagcatcgttctgggcatgggctgccgtgagcgcacccgcggtgccatcggcaccccgggcacccgccctgccggcgtgtacaccgccggtgcagcacagcgctatgtgaacatggaaggctatctggtgggcaagcgggtgctgatcctcggcagcggcgacatcggcctgatcatggcacgccgcatgacccttgagggcgcaaaggtgctggcctgcgtagaggtgatgccctactccggcggcctgacccgcaacatcgtgcagtgcctgaacgactttgacatccccctgtacctttcccacaccatcgtggatattcagggcaagaaccgcgtagaaaaggccatcgtggccgagatcggccccgaccgcaagcccatccccggcaccgagatggagtttgatgtggacactattctgctgagtgtgggtctgatccccgagaacgagctgaccaaacaggccggtattgagatggacccccgtaccaagggcgccatcgtgtacgaaaacatggagaccagtattcccggcgtgtttgcctgcggcaacgtggtgcaggtgcacgatctggtggactttgtttccggtgagagcgagctggccggcgcagccgctgccagctacgtccagaacggccccgtagccgaggggcgtgtgctgaccgtgaagcccggcgcagaccttggctacaccctgccgcagcgcatccgtctggaaggcgtggaaaagagtaccaacgtctccttccgcgtccgccgcatctgcggcaag

SEQ ID NO: 848 - DNA, 12430 bp, unidentified
  source 1..12430: mol_type = unassigned DNA
atggcaaaacgcgtatttttgatcgtgctggacagctttggcgttggcgcagagccggatgcgccgcagttcggcgatgccggtacaaacacgctggccgctatcgccggtcatcccaatttcaagggagaaaatctggcaaagcttggccttttcaatctggacggtgtgacctgcggtaagccggaggcaacgcccgttgccagctttgcccgcctgcgcgaggcaagtgccggcaaggatacgaccatcggccattgggagatcgcgggtctgctcagcgctgagccgctgcccaccttcccggacggcttcccgcaggaattgcttgatgcattcacggccaaaaccgggtatcaggtcctctgcaacaagccctattccggcaccgatgtcatccgcgactacggcgaggagcatctccggaccggggcgctcatcgtttacacctccgccgacagtgtgttccagatcgctgcgaacgaagcccttgtccctgtggaaaagctctatgagatctgtgccgaggcgcgggagctgctcaccgggaagtacggcgtcggccgtgtcattgcccgaccgtttgtgggggactgcgccgccaactttacccgcacaccgcgccgccatgactacagtctggtgccgccgcgcgatacaatgctggacgctatcctcgctgccggaaagcagaccatcggtgtgggtaagatccacgacatttttgcaggcaagggcattggggaaaccatccgcaccgccggcaacaccgagggacttcaggtgacgctggagctggccgaccgcgattttgagggccttgccttcgtcaacctcgttgactttgacatgctgtatggccaccgccgtgacattgccggctatgccgctgccgctgcggagttcaatgactggctgccgacctttatggtcaaaatgcgccccggcgatgtgcttatggtcaccgctgaccacggctgcgaccccagctacaccaagaccaccgaccacacccgtgagcatgtgccgttccttgtgtatggcgatgagatccgccccggtgtgaacctgcatacacgctacagctttgcgaccatcgccgacacggtctgcaaggcgctgggcgttgcgtactgcccggcgggctgcggcgtctatgatgaaattgcgaagtaacgtgggcgtacttcttctttacctgctggcggcggtgctggtggtttactccctctcgctggtgttcctttccaacttcaacatgggcaaccttatggtctggctgctcaccggctgcgttaccggctacgctgtctttcgcagacccgttaatgcgtggttttctgcaggtatcgggcgcgtggtttttggggtgctggcggtcttggtctgcctttatctggctgttattgcctttgttgctgtcagcgggtatcttcacccgcctacagggaacgagcaggtcgtgatcgtgctgggggcgggcctgcacagggacaagcccagcaagctgctgcaataccgccttgacaaggcctatgcgttcgccgctgcccaccccgacacgctggtcatcaccagcggcgggcagggccgtgatgagtggatccctgagggcgatgccatgcgggactatctgattgcaaagggcttgccgcccgagcgggtcctgtctgagaaccgctccacctccacggaggagaactttgccttttcgcttgcgctgctgcagtcgcggggcttttctcaggcgacccccatcgtctatgtttccaatgaattccactgctaccgcgccgggcagtatgccgcaatggctggctttaccaatgtgtctgagcttgccgctgcaacaccgctgcgcagtgtgctgccctgctatatgcgggaggcactggcgctgctttattactgggtattcaaaacctcatcctccgggccgatgcatgcaatggtcggtctgctggatctgaataagaaattcttttacaaataggaggggactgccatgcagatccgctattacaaagagtacagccgttttctgaaccgatttatggagttcaaggtctacggccacgccggacggcccatcgtgattttcccgtgccagagcggccgcttctttgactgggaggaccgcaacatgtgcaacgccgctgcccgctgggtggatgacggccggctgcagatcttcacagtggacagcatcgaccccgagagttgggacaacaccggccccgagcgcccgcgtatcgagatgcaggagcgctggtacaattatatctgcgaggaatttgtgccccgcctgcttgagatcaaccgtgagcagggcgacgacaacaccggcaagatcctgaccggcggtgccagcatgggcggcggccacgccgtcaacttcttcctgcgccgcccggacatcttcaacggcacgatcgcactcagcggcctgtattcctccggcatgttcttcggtgggtatatggacgatctcgtctaccgcaattccccctgcgattacatgcgcaatttccccacgacccacccttacatgaagctgtttgaaaaggccgataagttcatcatgtgctgcggtcagggtgcctgggagggcgacctgctggcctccacccgagagctgcaggccattctcgagagcaagggcatccatcccatcgttgatatctggggcgaggatgtgtcccacgactggtattggtgggagaagcagtgggtctacttcctgcagatgacgctggatgacaagaagtaaggatttgtatatggatttctggcacgatgcagccgcgcaaaagcgctggctgcgccgttttgcgctgttgatcggcctgctgctggtgccggtgtttgtactggccgtcttcgcccgcccctcggcggatgattatatctacgcggcccgcacccatgcggtcatacagcagtacggctttgacctgccgcggctgctcaaggccgcgtgggacaccaatgtctactactatcagaactggcaggggctgtatgtctccggctttacgctggcgtttcagcctgctatcttcggtaaccggttttacggcgtcacattgctctgtgtgctgctgccgctctttttctgcctgtacgggctggcgcgctgtgtagtgctgcgcttatctgcggcgcaaagacggctgccttgggcgctggcgctgctgctgaccttcgcttttatcgagggaatgcccgccccggtcgaggggctgtactggttcaacggcgcgatgaactacctgccgtatttctcgcttgcggtgctgaacgcaggccttgcctttgcgctctgctttgctgcgcagcttacgctgcggcacagggtgctgtacgcagccgcaggctgcctgtgcagtctggtcatcagcggcggccatcaggtggccgggcttttgaatcttcttttgctgctgcttgcggcagtgctctgcgcacggcggcgtaacttctggcagctgcccgcctttgcggcggcaatccttgggctgctgttcaatgtgctggcccccggcacgcgggtgcgcacagcaggcttttccggtgcaggcttcgccgaggctgttatcaaaagctttatccttgccgcgatggagtggatccgctggctggatgtaccgttgctctgcctgctggcgctgctggcgtttccgctgcttcaccttgcccgcagtgccgctctgccggaccgtgtgttccgctacccgttttttggcgcggcagtcacctttgtgctgatgtggggcatgatcttcctgccgtcctacacaatgggcggcatcggcgcgggtcggcttttgaatgtcgtctggatgacctttgtgctggggctggctgctacagagtttcttctgctcggctggcttgagcgtgtgcgcggcctttccctgcatggcgcagagcagttttgtaaacgccatgcccggcgtctgccgcaggcggctgcctgtatgctggtctgcatggcctgcatcggcagccataccgttaaggaggggcaggacaaccactttgccaccagcttggaggctgcctatgaactggcggacggacaggccgcacgctacgccgcggcactggatgcgcgggaggctgttctgaccgatgccgcccagcaggatgtaatgatccgcccgctgaacggcgaggaacgcccctggctcctgttctacaccgatgtggcgcccgggccggacatgtggggcctgacgccctattttgacaagcagtccgtcacgattgctgagccgaacggatgatttcccctgccttggggcaggcaggctgtcaaaaaattattgtaggggcgagcattgctcgcccgtgcccgtttgtctgtaaaaatttttcccggaaaatgcgttgctgcgctaagttggcgggcgaccaatggtcgcccctacatatgaaataggctaagcatgtgattttttgacacatagccccctgccttgtgcaggggttttgcgtggtgtcaattcctattgacaaagtaggaaactgcggtatactattccggtatactactgtaaaagagggcacacgccatgatctaccttgattataccgccaacaccccggcagacccggccgttttgaacgcctttatcgcggcggagcaacgctacattgccaaccccaactccacccacatcgccgggcagcaggcccgggctgagatggaccgtgtgacgagctctattgcgcagcacctcggcgtgcagccggctgagatcatctacacctccggcgcaagcgaggccaacaaccttgctgtcaaaggcattgcacaggccgcacggcatatcggtaagcacatcatctccaccgagctggagcattcctctgtgggggcgtccttgtccgtcctgcagcagcagggctacgagatcgacctgctgcgcatcggccgtgacggtagggtagaccttgaccagctgcgggagctactgcgcgatgatacgattctggtagcagtctgcaccgtggacagtgaattgggcaccgtgcagcccattcgggaaattgcagagctcgtcaaattgtaccccggctgccgcctgcatgtggacgcaacacaggccgtaggcaaaacggacctctggctggacggtgtggacaccatgagctttacggcccataaattttacggcctcaacggcatcggcgcgctgtataagcggcgcgggctggtgatcacaccgcagatctccggcggggccagcactacgatctaccgcagcggcacgcccacgctcgggctggcggtcagtctggatgcggcgctgaccttggcgttggacgcacaggcggcgcgcactgcgcaggtccgcttgctgcatgaccgccttgtggcagcgctgcggcgctacagccttgtgcgcatcaacagccccgaaactgcagtgccgcacatcatcaatgtcagcgttaccggcatcaaggggacgcggttccagcaggctctcagcgagcagggggtctgtgtttcggtcaaatcggcctgttcctcggacgggatgccgtccaaggccgtgtttgccgtcagccgcgaccgccgcaatgcgctgtccagctggcgcatcagcttaagccacctgacgaccgaggaagaaatcgaaggcttcctgcaggtcttcgatacctgctacaaaaccctgacaaacaaggagaattgaccgttggaacgccaattagaagcatatcaaaaaatcgagcgcagcatcatcaaaaaatttcgcaagcagctgtggacaccctttatcgtggccgtcaagcggtatgagctgattcaggcgggggacaagatcgccgtctgtatttccggcggtaaggattctatggtcatggccaagcttttgcaggagctgcagcgccacagcgaggttccgtttgagctggtctatctcgtcatggaccccggctataacgaaatcaaccgccaaaagatcgagagcaacgccgcactgctgcatattcccatcacggtgtttgaaacaaacatctttgatgtggcaaacaacagcgataaatctccctgctacctttgtgcccggatgcgccgtggccatctgtataaaaaagcgcagcagcttggctgcaacaaaatcgcgctcggccatcatttcaatgatgttatcgagacgaccgtcatgagcatgttctacggctcgcagctgcaggccatgccgcccaagctgcacagcacaaatttcccgggtatgacgctgatccggccgctctactgcatccgcgaggaggacatcatcacatggcggcggtacaatgaccttgaatttatccagtgcgcctgccgctttaccgaggcatgcaccatctgcgacaatgggggcggcggctccaagcggcaggaaatcaaggtcctgctgcgccgcctgatgcgtgacaatccgaatattgagaacagcatcttccgcagcatccacgctgttgcgctggacacgatgcccggctacaagaccgagggagaggagcattcctttctggagcggtttgaccgcatcgaggaggagctgaaaaacgcccgggaatgatttggctgctatacacagggggtacctatgaaacggatcctttgcgcccttgcaatactgctgctggcaggctgcgcgtcacggccggctgatgtgatcggcacacctgcgccgacgacaacgcccgcccagacaccagaaactgccccgacctgccagcccggccaaacaaccgaaaccgcagccagtgaatatacggccatccagctgcagcagcaggatacccgaagcggccagctgctggcgcaggacgggcttgccacagacggctattatacgatgtgcatggacggaaaatggggcctgatgaaaagtaacggcaccgtcctgctgccctgtatctccgaccggccgatcgaacgctgcgccaacggctgtctgcgctggcattttctcagcacctcggccccgatggatgatgcggagcgcagcagctatgagacggcgctcgccgcagaaaatgccggtacactctgcaccggtgagcatgacgggcagagctatacatggacctatgacatcaacaccggccgtgtatgcaaaagcgccggcatgatgggcggtgctgccgaactgaacgatggcgatgccctgtatggggattatctgccctgtgtgcggagtgtgtggacatccggaaacggtgacccggactattatacgacagccgagggcggcggaattgtttttgccaattctgacggagaccttctgaacggcattacctatgcgtccgcaggctgcttttatgaccaacctctggccccggtcaagatcggtgacaaatgggcctaccttgaccggaagggaaatttggcaacggaagccgtgtatgacgcagtctacggcggtctggatttttatgaggattacacgccaaagtatgcctcacccctgctgaatgggtatgctgccatctgccgtgacgggaaatggggtgtgctggacgccgccgggaaggagtacatcccctgcgattatgcaggtgccgcttggaatggccatatcctctggctgcagcgggacggacactggcagagcagaacgctgcccggcgtgccggagcattggcaggatgccaaaatgcgctttcaggttggtccgaaggagctaaaggcaacagacgccttttggcgggtcaccgcagccggaggcctgcggctgcgtgtagggccggacacaagctacgaaaaaatcagccttgtgccggaatacaccgccctgcaggaactgggccgcagcgaggatggttgctggatgctgactctctacggcaggtggcacggctgggtcagcatggatcatcttgaaaaaataacaccatgaaacaacgcaggagccatgccgcccaagcatggctcctgcgctttgcttaccattgccgccggtactggcccggtgttgtgccctccacctttttgaagatgcgcgaaaagtaattggcatcgctcatgccgcattcctgtgcgataacctcaatgtttttatcgctgaatcgcaacaggcgctttgcctgcgtgatgcgcagctgcatcaggtaacctgtgaccgtctgaccgaactgctctttaaaaacgcgggtcaggtagaatttgttgatgtaaaactgctccgccaaggcgtccagcgtgatcttttccccatagtgggcgtcaagatagtccttgatttcctgcagattctgccgttttgcaccttctgcgcgcacggcctcggggtgccagctttcctgcatcagcagggtcagcagggccagcagcttttcgcatatctgcatgtcgcgcacataattgtcggaatcggccagcgtatacagggtttccagcagcgcggcataggcagctgcattctcggcgcggaagcttggctgaccgccgcgctcctcgtattttttgtagatggcccccatgttcgggccgtaaaaatgcacccagcgcagctgccacaggtcctcgcccgtataatggcggtacggcttgcggcagtcaagaaatgcgcagtccccggcgcgcagggcgcgagtggtgccatcatattccaaggtgccgctgccgctctccaccatgaagaacaggtaggaggccagccccttacgggtgctggcatgagggctgcgcgcctgcagccggccaacctcctgtaaatgcacaagattcgaccgtgcaaagggggagggtgtataaataatgcgctgggaatgcaccagcttgccgtcaaataacggtgcttccataactgtaccttccttgttttgtgtgggtgagcaatgcccgccccgacatctttacatctcagcactgcaaacccagtataccaaaaaagtcaatataatgctagtcttttgcaagattcgccctgcaaaaaagaaaaatagtgcggtagaataacaaacatacagagaactacgcgcaaaatcaccgcgcaagatacagatgaaagggaaaccgcattatgaaaaaagcactgatcaccggtgttaccggtcaggacggcagctatctggcagagtttttgcttgagaagggctacgatgtccacggcgttatccgccgctcctccgttgattaccgtgagcgcatcgcccatctggagggtcaccccaacttccacctgcactacggcgatctgagcgattcgatgagcatcctctcggtcgtcagcaccgtgcgccctgatgagatctacaatctggccgcccagagccatgtgcaggtcagcttcgatgtgccggagttcacggccgatgtcgatgccaccggcgtgctgcgcgtgctggaggctgtgcgcctctgcggcctgaaggacacctgccgcatctatcaggcctccacctccgagctgtacggcaaggtcgaggaggtcccccagaacgaaaacaccccgttccatccctacagcccctacgctgtcgccaagcagtacggcttctggatcgtcaaggaataccgcgaggcttacaacatgttctgctgctccggtatcctcttcaaccacgagtctgagcgccgcggcgagactttcgtcacccgcaagatcacgctggctgccgcccgcattgcgcagggcaagcaggacaagctctatctcggcaatctgtccagcctgcgcgactggggctatgccaaggattatgtcgagtgcatgtggctgattttgcagaacaagacccccgaggattttgtgatcgctaccggcgagcagcactccgtgcgcgagttctgcgagctggccttccacaatgtcggcatcgagctggaatttgtgggcgagggcatgaacgaaaagggcatcgacaaggctacgggcaaggttgtcatcgaggtcagccccgatttctaccgtcccaccgatgttgtcaacctgtggggtgaccccagcaaggccaagcgcgagctgggctggaaccccaccaagaccacctttgcagagcttgtcaagatcatggtcgatcatgacatgaagaaggtcgccgtagagcgcgccgaggagcatatcaagaccaatctggctgaatatctcgaaaagggcgttatcaaataatttcatcaaaagcatcaaaagaaggtaacaatcatgatggaaaagaatgctaaaatttatgtcgccggccatcgcggcatggtgggcagcgccatcgtgcgcgagctgcagcgtcagggctacaccaatatcatcacccgcacgcataaggagttggacctctgccgtcaggaggatgtcgagcgcttttttgcagaggaaaagcccgagtatgtctttctggcagccgccaaggtcggcggtatcgttgccaatcaggaggcactggctgactttatgtggtttaatatgacgctggagatgaatgtcatccactccgcatggcagaacggctgcaaaaagctggaattcctcggctcctcctgcatttatccccgtatggcgccccagccgatgaaggaaagctgcctgctgaccagcgagctggaaaagaccaacgaggcctacgccctcgccaaaatcagcggcctgaaatactgcgagttcctgaaccgccagtacggcaccgactatatctcggtcatgcccaccaacctctatggccctaacgacaactatcacccgacccacagccatgtggtcccggcgctgatccgccgcttccatgaggccaaggtcaacggtgtggagagtgttacctgctggggtgacggctctccgctgcgtgagttcctgtatgtggacgatctggccaacctctgcgtgttcttgatgaacaactactccggtaacgagactgtcaacgccggcaccggcaaggagctgaccatcaaggagctgaccgagctggttgccaaggtcgtgggctataccggcgagatcaagtgggacacctccaagcccaacggcacgccccgcaagctgttggatgtctccaaggctacgaatcttggctggacctacaggaccgagctggaggacggcctgcgcctgtcctatgaggacttcctacacaacccgatgcgcgccgagcgctgaaaggaaacgctatgaatatcattctgctgtccggcggctccggcaagcgcctgtggccgctgtcgaacgatatccgttccaagcagttcatcaagatcttcaagaccgatgacggctacgagtcgatggtccagcgcgtctaccgccagatcaaagaggtggacactgatgccagcgtgacgatcgccaccagcaagacgcaggtgtcgtccatccacaaccagcttggcaattcggtcggcgtctgcgttgagccctgccgccgcgataccttcccggcaatcgcactggccacggcctatctgcacgatgtaaagggcgtgggccttgatgaggctgtggtcgtctgcccggtggacccgtatgtcaacaatgactattttgccgcgttaaaggatctctccgatcttgcggaaaagggcagcgccaacctctcgctcatgggcattgagccgacctatcccagcgaaaagtacggctacatcatcccggagagcgccgatgctgtcagcccggtcaagacctttaaggaaaagcccgatgccgccacagcggaaaagtacattgcgcagggtgcgctttggaacggcggcgtatttgcctacaagctgcgttatgtgctggacaaagcacatgagctgatcgactttaccgattatcaggaccttttccgtaaatatgagacgctgaagaagatcagcttcgattatgcggtcgttgagaatgaatcgaagattcaggtcatgcgctttgcaggccagtggaaggatatgggcacctggaacaccctgaccgaagccatgcaggagccgagcatcggcaaggccatgctgaatgagacttgtgagaatgtgcatgttctcaatgaactggatgtacctgtgctttgcatggggctaaagggtgttgttgtctctgccagcccggagggcattctggtctccgataaggagcagtccagctatatcaagccctatgtggacagcatccaccagcagattatgtttgctgaaaagtcgtgggggtccttccgcgtgctggatgtcgaggatgaaagcctgaccatcaagatcacgctgaacgccggtcacggcatgaactaccacagccacgagaaccgcgatgaggtctggaccgttatctcaggcaccggccgcgcgattctggacggcagggcgcagcccgtcaaggcaggggatatcctgacgatgaaagccggctgcaagcacacgattctggccgataccgagctgaaggtgatcgaggtgcagcttggcaaggccatcagcgtggaggataagcagaagtatcccatgccgcaggcttga

SEQ ID NO: 849 - DNA, 24850 bp, unidentified
  source 1..24850: mol_type = unassigned DNA
gagagtagtgctcatatctatttcctcctgataagctttttgtacgtttcaggcgtccttttggggcgcgagtgtcagtatacaacacaaaaacgcgcctgtcaacatgatttttggattttttcagcgaaattttttgaaactctcaaaatcgcttgttttctcttgaatactcttgatttctgaatttcgatttttgcaaaagttttttgcccgccccggcatatttttgccatttgcccgctacaaatcccgctgcggttgtggtatactataaaggatatgggcggcgtaccgccgccttgccaacacaaggagaatacatccatgccaaatgagatcgaccgcacttcttcggcgcagcgccgcagctccaggctgctgacggcgatggccattttcatctgtctgggcatcgcagcctacatggtgcttaccctgctggtgaaccggcagacccccgcgacacccgacacccactataccggcacgaacggcgtctctgtctactacgacagcagcgtgtggagcgtgtgccgcatgaccgaggacgcaaccctcggcaccgtgctggaacttgccaccgccgatacggcagacagcgaggattatcaggccgtgctgctgcagcgcggcaccgccgacagctacgacaactttattgaggattcggaagccgacctcaagcaggcttacggcgtcatcaagccccgcaaggtcaacctgaccgtggagggcgcgacggtagaggcggtgcgctgtgatatccgcacctactacgccgtgctggcgaccatcacctacgacagcggcgatgtggtctatgtttcggcgctgacaaagctggcgtccatcagcgatgtggtcaatctggtagaaagcgtgagcctgtcatgagtgatcttcgtgcaatgcagcggctttgcggcctgatgcgcaaggccgtgcaggactatgaaatgatcgcccccggcgaccgggtgatggtgggcgtttccggcggcaaggacagcgtggcgctgaccatcggcctttccatgctgcgcaagtacatcggctttgactacgaggtggtggcggtcacgctggacccgcagttcgaccatcagcccatggactactccgcgctggcagagctgttccggcggcacggcatcccctacgaggtgcgccgcaccgagatcggccctgtggtgttcgagtaccgcaaggaaaagaacccctgcgccctgtgcgccaagctgcggcggggtgcgctgcacaccgccgcgcaggagctgggctgcaacaaggtggcgctgggacatcatctggacgatgccgtggagaccttttatatgaacctctggcgggaggggcgcatcggctgcttctcgccggtgacctacctctcccagcgggatctcaccctcatccgccccatgctgctggctaccgagtacgaggtgcagtgcgccgtgcgggaggcgggtttgcccatcgtgaagagccgctgccccgccgacggtgttaccgtgcgggaacagaccaaagaatttgtgcaggagcgctgccgcaccgaccacgccttccgccaaaagaccctccatgccttgcaggagagcggcattgacggctggcgtcccgtccacacgggccggggcagctttatcgtaccaaaaaaggaaacagatcatgcagaaacaaccgtttgaaaaacacgtctgggccgagatcgacctcgaggcccttcggtataatttccgggaggtaaaagcccgggcaggggaactgcccctgtgcgcagtggtcaaggcggacagctacggccacggcgcggtacagtgcgcccgggtgttcgccgaggagggtgccgcatggctggcggtcagctgcctgaccgaagctgtgcagctgcgcaaggcggggcagactttgcccatcctcattctgggtcatgtacagcccgcctacgccgccgccctgatccagaacgacatcaccgtggcctgctactcccttgcgcaggcacgcgccctgagcgaagctgccgtggcggcgggcggcagggtgcacatccacctcaaggccgacaccggtatggggcgcatcggctttgccctgcgcaccgattttgacgccgccatccgggagatgttggaagcctgtgcgctgcccgggctggaaatgaccggcctgttccagcatttttccgtggccgatgacactgccccggagaatgtggcctataccgccgaacagcacgcactgttcgtgaaagctttccacgcgctgaaagctgccgggcgggagcctgcccttgtacactgcgacaactctgccggggtcatgctgcacccggactggccggagggcttgccccgggagcgctgcatggcgcgccccggcatcatcctgtacggctacgaccccagcgacgaggtacgctttgggcgctttaagccggtaatgaccctcaagaccgtggtgagcatgatcaaggagatgcagcccggccagtgcgccagctacggccgccgctttaccgccgaaaagcccaccaaggtagccaccctttgcaccggctatgccgacggttacccccggcttttgagctgtggcaagggcgtggtggagatccacggcaaggcctgcccggtgctggggcgggtgtgcatggatcagatgatggtggacgtgaccgacgtgccggaagtgcgcgaggacgacgaagccatcctgtggggcggcaccgtgagcgacaccgcagagaccattgcccgcaagaccgataccatcccttacgaagtgctgtgcggcgtttcccgccgcgtgccccgcgtctaccgcgaccatggacagatcgtggccgtggaggactggatcttagaagcataaagctgcccggaggaactacatggcaagagacaacatccgcaacttctgcatcattgcacatatcgaccacggcaaatccaccctgtccgaccgcattctggaactgaccaagagcgtggacgagcgcaccatggaagaccagatccttgacaacatggatatcgagcgcgagcgcggcattaccatcaaggcgcgtgccgtgaccatgaactataccgcaaaggacggcaagacctacgagttcaatctgatcgacaccccgggtcatgtggactttgcctacgaggtcagccgcagtctggctgcctgcgagggcgctattctggtggtggatgccacgcagggcgtggaagcgcagacgctggccaacacctatatggcactggagcacgatctggaactggtgcccatcctgaacaagatcgacctgcccagtgcccacccggacgaggtggcgcaggaggtggaggacgtgatcggcctgccctgcatggatgcgccccgcgtctccgccaagaccggcctgaacatcgatcaggtgctggagcgtgtggtcagcgatatccccgcacccaccggagacccggacgcccccttaaaggcgctgatcttcgacagtatctacgacagctacaagggcgtcatcgtctacatccgcgtgttcgagggcacagtgaagcccggcgacaccatccgcatgatggctaccggcgcagagttcacgctggtggaggtgggtcacatgggcgccaccgccctgactccctgcgcccagctgcaggccggtgaggtaggctacctgaccgccagcatcaagacggtgcaggacacccgcgtgggcgataccgtcacgctggcagagcgccccaccgcagaagcactgcccggctaccgtcaggtcaagcccatggtgttctgcggcatctatcccgccgacggtgccaagtaccctgacctgaaggacgcgctggaaaaattgcagctgaacgacgcctccctgacctttgagctggagaccagcgccgcgctgggctttggcttccgctgcggcttcttgggtctgctgcacatggagatcatcaccgagcgtctggagcgggagttcgatctggacatcatcaccaccacccccagcgtgcgctaccgtctgaccctgaccgacggcacggtggagatgatcgataacccctccagctacccggatcccagcaacatcgtcaagcaggaagagccctttgtggatgtgcatctgtacacgcccaacgactatgtgggcggtctgatggatctgtgccagagcaagcgcggcgtcctgatcgatatgaagtatctggatgatgtgcgggtggacctgcactacgcgctgccgctgggcgagatcgtgtacgatttctttgatgccatcaagagccgcagccggggctacgccagctacgactacgagttcaaggagtaccgcgagagcgatctggtcaagctggacttcctgctgaacggcgaccccgtggacgcactgtccatgatcgtgttccgggacaacgcctacgccaagggacgccgcatctgcgaaaagctgcgggacaacatcccgcgtaacctgttcgagatcccggtgcaggcagccatcggcggcaagatcattgcccgcgagacggtcaaggctatgcgcaaggacgtgctggccaagtgttacggcggcgatatctcccgtaaaaagaagctgctggaaaagcagaaggaaggcaaaaagaagatgcgtcagctgggcagcgtttccctgccgagcgaagcttttaccgccgtgctcaagctggacagcgacgacgattgatccgcaaatatgcaaaaagggatgctgcgctgcggcatcccttttttatgagaaactcccaaatgtgaaatccgctcatggcagagatgcactctttgctttttactctaaatatgttataatttattcatatatcagtttttgtatccgctcaattccattcccggcagaaaggatgtggcctttatcaaagcaaagcacggaaaaggcgcagcgcaaaacggcagacacagcggcggcggcgcacaggcgccggcttcccggtggaagcaggtgctgctgaccctgctgatctttattgctctgctcgctctgatcggcggggcgctgtggcagaatatctgctataaccgtacccactataccgcagagttttatcagatccattcccgcaagctgacccagagctgccgggtcgtttttctcaccgatttacatctgcgggagtacgggcaggataactgtgatctggtgcaggatatccacagccttgccccggatctgatcctgctgggcggcgaccttgtgacctacggcgaaggttccagctatgataatatgctctccctgtgcagtcagctcagcgagatcgcgccggtatgcggggtgctgggcaaccatgaggacgagctgtattttctggacggcgatcaggctttggtggaaaagttcaccgccgccggggtgaccatcctgcgcaatcaggaagcgcgctataccgtccgcgacaatgtcatcagcattctgggtgtggagggcagcccggaggacttttataattacggagcaagcacctttatggacagcgtggagccgcagacagactacgatctgcgcatctgtctggcacacgttcccacctactttcctgagcatctggaaaattattcttttgaactgggtctggccgggcacacccacggcggcatcgtccgtctgccaaagatcggcccgctttatagcgccgaggagggctttctgcccgactatgccggtggcagctatggacttgccaacaacgccaccctcattgtaagccggggactgggcgattccagctgggtgccccgcatcaataacgtgccggagctttcggtcattgacatcgactaagcagtctgcaccgcgcgtgcaggccgctgcaaaagggtagaatgccatggatgacatcaaagaaaagatcaaacaggcgctgcgccatatctggatcaataaataccgtctgtttttctgcctgctgaccttgtgctgtctgttcgggctggttcactatttcaaaagtgcggacagcgccaccgccagcatctccttcaattactccgaggcggcgcttggcatgaaccccaacaagacccgcttcaacgcctacgagatcgtttcggacgaggtgatggaacgcgccatccggcgggtgggcttgcaggacagcctgactgcctcccagctggcccagtgtctttacctcagcccggaaggcaccggcagcgccaatggcagcgagtatatcagcaccaactactatctttccatcaatacccgcaagctggagcttggcagccgcaaggctacggatcttttgcagagcgtgtgcgaatcctaccgggagatctttcagagcaactactgcgacaaccagagcctgctgaaggaaaagctggacgtgaccgctgcgtgtgagccttatttgcggctgaacgagctggaggtgcgcgctgaggggctgaaccgctacctgaacgctcgtctgcaggagaacaaaagctttacggacgaggcaaaccccgactctgccaccaacaactttaccacgctgggtaaaaagatcaacaatctggtagcttacgatctacccaatgccatggcctttgtcattgagggcggcgttgcccgcgacccgtccatgctgaccagcattctggaatataagaacaaaatcgacgatcttgccatgcgcactcagcaggcttattatgacgccgataaaaagggcatttccatctacgaaaagtccatgacctccatcatgatgatccccaccgtggatgaggacagcgaatactatatgtcccgcaccaagaccgccatggacgcgctggcgcgctcggcagacgcttctctgtccgatgccaccgattaccagtccgagatcgtgagcacgaactatgtgatccagaagatccgggagctggatgccgggcagccgcgcttggccgaggcacaggccatggtgaacaagctggaagctgccatcaacgagatctcggaggagctgtttgtactggataaagcgtatatcaagtacaaatcccagaactatatcacctttagctatggcgcagtctccttcctgcagcgcctgagtctgaaaaagacgctgatggagtccgttgccgtcatgctgggcggcgcatggctgctccagcagcgcaaacgcagaaaggcaggaaaacgcaaatgaaaaagtttgagatcctgcgctatctgaagcgtttcagcatcctgatctttctggtgtcgctggcaggtgccgccgccatctatctgtatgcggatggcaagcaacagtacaccgcgtcggtcatcatccgctataccaacgacggtatctcggacggctacaccccggacggcagcgagctggatgtcaacgagatctattcctccacggtcatttcgcaagccatggatgcgctgggcgcttccgggcggctgagcaccatccgttccaacatttcggtgaccccggtgatttcagaggatcagcagactatcaatgaggcactgctggataagggcgaagaggtgacctatttccccgacacctacaaggtgagccttgtggtagacggatcgctgggcgcgggctatgcccgcaatatgctggatgctatcatccagagctactgcacctattatacggaaaaatatgtggagcagaagctttcgctcaacccttcgtccggtctgctggacaacggctacgactactacgagtgcattcgcattctggaaaacgataccaatgagatgcaggcctatctgcagaacaagcaggaaagttacccggacttccgttcttcccgcaccggctacacctatgcagacctgtgcgatatctataccgattttaaaaaatacaccattccggaactgtacgcctatgtgctcaacggtccgcaggtgcgggacggcacagtgctgcaggagtatctggccaactgcattgagaccgcaaagcagaccgaacagatcaccaccgagcagcgggacagtctgtggggactgacggatcagtatgtgtacaagaacgccgacctgctgaaaaactactttaccgaccggggcgaggtggtgtccgcagaatacatcctgaacaacatcgagctggagggcgcaggcgaaaaggcgcagaccacctatgatggtctggtgctgaagctggtgtcgctggaacagcaggtggttgccagccagatcgaccggcagttccaggaggagatcctgcaaagcttccgcaatatggattttggcggcacggacgagcagcacgccaagatggaaagcctgatcaatgattacgagacagagctgaaaaaatactacgagatcatcaataccagcagcaaggaactgaacctgtacatcagcgcggattatctgaagatgatcagctcggtgcaggtggctgccgctatcaacgtcaagctgtatctgatgctggcgctggtgctgttcttcgtcatcggctgctgcggtgccgttctgctgggccgtatctccgatattgtggattacctgctgtatgtggacaaaaagaccgggctgcccaaccgcgaaaagctcaatgtttatatcagcagtatggcagaccgcatcctgccggaagattatacctgctttgctttgcagctggataatctgtccgatatgagccgccgcttcggctaccatgtaggcgatggcatcctgaaggatttttccggtctgctgcagctgatgggcgacaccgatggcacggtgggctacaacggcgcgggcaagttccttgccttctttggtgagtgcagcagccggaaggcagaggtcatgatccgcatcctgcaaagtcaggtggacgagtacaataagctgaacccggagtaccccatcctgttcaccgccgcatgggcgacctcttcggaggatgatatctataatgtgcgggatctggtgcgcacagcgcagaaaaagatgtccctgatcgcagaggagggcggctctgcccttgccgggatcgaaagaggtggagtatgatccgcaaccgacgcgcttaccagttgatccaatgccgcacccacagccgtctgctggcgggtgctgccgccgtgtgcgccgccgcctgcggccacgcagaccttgcgttgtaccatctgctgcaccggggcggtgcaccgctgccggacagcacacaggccgaccgtgctgcgctgacagcattgtgtccgaagcccgcagcggagggggaatgcccgccgctgccgccgcaggacccggcggtgacgctttcggtcatcgtgccggtgtataacggcgaagccaccattgctgcttgtctggacagcattttgcagcaggataccgactgcaccgtgcagctgatcgtggtggacagcgattccaccgatggtacagctgctgtgctggaacgctaccgggcacagcccggggtggtgctgtgcaattgcatcgcaccccgcagcgctgctgccgcccgcaacgaagggctgcgccatgccgtggggcgctggctgatgttcgtggacagcgatgatctgttattgcccggtgcaatccgtaccctgctggaggccgcacagcgccttgatgccgatgtggtgcagggcggctggcagtacctgtacacggatggcagctacggtccggtgcagtgctacccggcggcggtctacatcggtaacgctgcgccggagcgatttgagctgcccggaatgccatggggtaaaatctaccggcgggagctgtttgcacaggtgcgctttccggcttactatacctgctttgaggataccatcatccattttctggtgttccgtcaggcaaaagcagtggtctctgtgccggaggtcgtctacctgtggcgcaaaaaccccaagggacttaccgccaccagccagcaccgccctgcagccgtgcagagctactggatcatggagcagctgctggcgcaggatgccgcgctgggcttgccccacgatgccctgtaccgctgcagcctgacgctgcagctttcggctttttgctatgccaccatatctggattgccgcaggaaacgcagctggccgttttccggctgtgctgcgcactgtatgccaaggcgctgccgcaggagagcgcactgccccgccgtgctcgctggggcacccgtgcgctgcggcagcaggactttgggctgtggtgccgctacggcagaagatttcagttgttataatgtgaggagtaccccatgatacgagtgctgcattcggtcagcaatatggaccgcggcgggatcgagaccatgctgatgaactactaccggcatatcgaccgcagcaaggttcagtttgattttatcgtcaacaagaaaaagcccggcgactacgatgacgaaatccgccgtctgggcgggcacatctaccaaagcccgggacttgacccgctgcattacccggcgtatctgcgctttgtgcagcagactgtgaccgcagatccccgcatccgcatcctgcacgcccacaacgaggcgatggggctgtacgccctgaagggcgccgagaaggcggggctgcaagtgcgcattgcccatgcccataatatttggatcgtccgggactacaagtggccgctgaagatgttctgcaagcggctgctgcccggtgccgccacccacctgtgggcctgcggacgggatgcgggcatctactactttggaaaagcagactgggagcgccggggacagatcattcccaacgccatcgagccggagactttccggttcgactccgccgtccgcgccgaaatgcgggcgcgctacgggctggaagaccgggtggtgctgggccatgtaggacgctttgacgtccgcaagaaccacgagcgtctgttggagatctttgccgcctttttgcagctggagccccgggcgatgctggtgcttatcggcaccggcaggctggagcaggctgtccgcgcacaggcacagacactgggcatcacagaccatatcctgtttgccgggctgcaaagtaatgtggcagactggtaccagctgatggatctcttcgtcatgccttcccgcttcgagggtctgccggtggtgggcatcgaggcgcaggctgccgggctggggtgcgtattttcggacgcagtgccggaggaagtactgctttcgccccacgccatccagatcccgctttctgccagcaatgcagactgggcggcaggcttgcagcggatgctccaacagccctgtgaccgctctgccggtgcagcgctgatccggcaggcgggctacgatatcaacatcgccgccgcccgcttacagcagcagtatttgcagctgggcggagatgcgtaagtcacctgcgggaacacccgctacaaaaggagaaccctttttcatgcgcacattggatcagatcctgaccaaaaaggattacagccggaaaactccggcctctttgttttataaggacagcccactgtggcaaaagctgctgaccatcggttgcgtggtctttctgtccgttgccgggctgggagagtggaaagtccttaacggtatgctgggcggtctgcccaaggccatcacactgggagtgatcgggctggcaatgctgtacgccttgtttttcccggacgaaaagcgctttcgggagatatggaagcccaccttactgtatatgtccctgatggcggcgctgtttttctggtcgatagtcatctgggtcgaaagctttgcggcggtctcctccatgatccgcagctgctcaaagcttctgttccagagcattgccatcctcaccgctgtggcactggtctatctgttccgggaaaaggccatcgagctgtttaccatcagcatctgtattaccaacggtgtcattatgctgctgtacattcccgaattcggcgttggtgccagcatccagtccctcatcacctgtctggtcactttcggtgatgcggtcggctacgcccgcgagctggagatccacgacctgacctttgtgttcgggcagatggttttgtactacgccgtttttgcgcctcgcaccaccccgcaggaaaagcgcaagcgctggctgtatctgctggcctgctgctggttctttctagtcggcatgaagcgcagcgccattccggcagtgctcctgttcatcctgattggtctgcttctccgcaagcgcaaggtgcccagctggctctacccgacagtgggcgtgtgctgcatcctgttttttctggcattcctctacggtgtgcgcaatggcatcgtttcaaggcttttaaacagtgtcggcgtggatatgatgggacgggactacctgtggagcatggcgaacccctactatgaattttccatcacctatctcggccacggctttgaatatgtggataccatcattggtcagtggtacaatgcgggactcatcaaccacgcctatcccttccataacgacatcctgaaggtctttgtagaaatggggtttccgggttttctgctctggtccggcattcaatatattctgaccccgctgttctggcagcactatgcagaccaagagacggcgcttttatatatgtgtgaactgggctatatgacggtgacttacctgaccgacaatactgccttttatttctggagtacgatggcgctgcgactagtcgcattttcctacgccatggagcgtaaaaagcccccgaagcccaaggtgtgggtgccggatagccgacaggagatgcgggaccgcatccgtattctgatgcaggagggttaatagagatgacacaaaccgccaagcgtctggaccacattgacatcgccaaggccattggtctgctgctggtgatctacggccacacctttcggatatccatgcgcgccgtatatccatggtgtgcattttcttataccttcgtctaccggttccatgtcccgctgctgttcctgctctccggtatgggctgcaccctgaccacgcaaaagaaccgcagcctttccgccgggcagttcgtgcgcaaaaaggcgcacagcctgctgctgccatggggtatatattcagcttttttgtactctttgttttatctggcaaatctggtgccgccggtgcgggcgctgctgtccggcggtgcataccagttaaaacagcctgcggaatatctctggttggtgctgcgcaatgagaacccctacggttttcatctgtggtatctgccaaccttgttctggtttgtcctcacggcatggctgctggacaaagctctctccccggcagcagcccgggcggcaaagctggcactggtggtggcgctgcccgtgtgctatcagctgcttttcaccgactggttttgggcagtaaaaagttattttcagcagggtgcgtttttctttctgggctgcgtgctcccgcgtgaaaaggccgaacagcacgcaaagccgctgatgctttttggcgccttgtgcggcctgtgggtggtgtggggactgctgtcgcccactatggtctggcctgacggcctgcttgcagaggctgtgtgcacatgggtggactattttgcggtcagcgggttctgtgtgggcatctgggcggcgtgtgtgctgttgcaaaagcccctgcggcggctggttccgctggggcagaacaccatgctgttctatctgtatcaccagcccttttgctgcgcagtgccggggcttgtgctgtatgaaaagctgggtgtctctgcgggcgggacggttcttgcctgctttgcagccagtctggtaatgccgtatctgttctaccagcttgccggtcgtttgcatctgcggccgctgctgcagcggcttggcctgccgggataatcatttcaaggagttggaatcatgccctgtatttcgtttatagtgcctatttataatatggagcgcctgctgccccgggcgctgcgctcactgcgggcgcagaccctgaccgacttcgaggccatcctcatcaacgatggctccaaggacggcagcgccgcgctgtgcgcacaggctgctgccgaggacgcgcggtttcgctttatcgaccagcccaacggcggtgtagccgctgcccgcaatgcgggtctggatgctgcccggggagagtatattttctttctggacccggacgactgggtggagccggacgccgcagaggtgctgtaccataccgtccgggacgcggatgcagactgtgtggagtttgggatgttttacgacatctgcgacgaaaacggaaagctgctgcactctgaaaccgaccactataccttttccggcgtgtaccggggcgagcccttcaaggagcatttcgacaagatggcgtcctcgtatctggctgcaaacaaaatgtaccgcagagcgtttctggaacagcaccatctgcgctttccctgccatcagctgggagaggatggaatgttcttcgtagccttctatcgccagaaccccggctgtctggtggtgctggaaaagccgctgtaccactacacgatcgcccggcggggcagtctgaccaaccgctaccacccggaacggctggaggataacttttatctcagtgacgccgtgtgggacaccgttgccgcgtggggcttgctggacagccctatgcaccgcgcaaaggccaactactgcaccgtccgcgacctgatgatggggatcaagaaccttggctgcagcccgctttccctcgccgagcagactgcttggctgcgcagtgcgctgcaaaatcctcgggtgcgcacagcggtgtgcagcaccccgctgcacgccatgcagagccggaacgaccgggtaaagctgctgctgctcaagctgcggctatgccgcgcagtgctgctgctctgtggcgcaaaccagaagagctgaaaggggaaaaatacggatgaaatataagctgctgcgtgcgctgtgctacctgaaagagctgctggccatgctgctgtgcaagctgctgggtgcagtgtgccgtgccttcagcccggcgtaccggggcatctggctggtgggcgagcgcggcaccgatgcccgcgacaacggctactggttttatcgttatctgcgcacacagcacccggagcttcgcgcctattatgtcatcaccgccgacagcccggatgctgcaaagattaccgctctgggtggtgcggtgcagcggtgcagcttccggcattatctgctgtactactgcgccgactatctggtgggtacccatgtgcagccctgtgcgccggacctgatagtgcactaccaccttgccgcgaagggcatccgcgcccggggcaaacaggtgtttttgcagcatggtgtcatcaaagacgagatgcaatggctccaccgggaaaatctgtatctggacctctttgtctgcggcgcaaaaccggaatacgagtatatccgggatacctacggctttgcgccggaagtaccgcgttatcttgggctggcgcgctgggataaccttttgcaggtcgggcaagctccctgcaaaaaaatgatcctgttcatgcctacatggcgcggtgcgcactatcccgatggagaagcgttccgggatacacagttctatcagagctgtcaggcactgctgaacagtccgcgcctgcacaaaatgctggaacagtacggctatacgctagttttttacccgcatattgaaatgcagaagcatctgacacagttccacacggattctgcgcgggtgtgtctggccgacagtacgacccatgacgtgcagcagcttttactggactgcgcactgctgatcacagattattccagcgtcttttttgatgtagcctatctggaaaaaccggaactgtactatcagttcgacgaagcggagttccggcagtatcactataagcagggctattttgattaccgcagggacggctttggcccggtgtgcaccaccgaggatgcacttttgcaggcgctggaaacggctttgcagaacgggatgcatatgccgccggaatacaagacccggactgcggcttttttccctctgcgcgatacccaaaactgcgcccgcacctacgaagccatctgcgggctgtgactggcgtaaaagaaccgtttgcgcaaaaatccccccgctgccaagcaggcagcggggggatttgttaccgatttaaatgaaaatcagcgcttagttctgcttcatgcgagcgaagcagtcagagcagtagaccggacggtcctcacggggctggaagggaaccttgcaggtcttgccgcaagctgcgcagacagcatcgaacatctgacgctcgccgctgttgctgcgtgcgccgccgttcttgcgggcgtcacggcagggcttgcagcgctggggctggttctcgaagccgcgagaagcgtagaactcctgctcgccggcagtccaaacaaattccttaccgcagtccttgcagaccagagtcttgtcttcaaacatagtagtatctcctctttagttagttcttgcccacggaaggattgtaaccatacctttggttttgggaccatcgcgctgatcagtaagcttaccaggggcttgaatagataaacgccctcggattgaggactttcctattgtaccgttatttttgagatttgtcaaccaaaaaacaaccgttcgcccttttatttgtacacatggcacaaaccgacagcatatatttgggtaaaatcaccgccggaaggagagaaaaggggctgccgcacagaatgtgcagcagcccctgcaaagccctttgggaaaagcttacttctcttcgatgacttccttggtgtcgcgggcaatcatcagctcctcgtcggtagcaatgaccagcgtgcgcacctttgcgccccaagcggtgatctcgcacacatcgccaacagggtgcttgttcttctcggtgtcgatgcggatgcccagccaatccatgtggtggcagatctttgcacgggcaatggcatcgtgctcgccgatgccgccggtaaagacgatggcatccacgccgcccatggctgcaatgtagctgccgatggtctttttgatctgatagttcagcatatcggaagccagctgtgcgcgcttgttgccggcctcggcagcctcttccacgtcacgcttgtcgctggaaacaccggagatgcccagcaggccggacttcttgttcaggatctcgtccagctcgtggccggtgatgttcagggtgtacttcaggtagttgaccacagaggggtccagatcgccgcagcgggtgcccatcatcaggccggccagcggggtcatgcccatggaggtatccaccaccttgccctgatcgactgcggcaatggaagaaccgttgcccagatggcaggtgatcagcttcaggcgctcaatgggctcctccagatactcggctgccttgtgggcaacatacttgtggctggtgccgtggaagccatagcggcgcacgccgtacttctcgtagtactcgtaggggatggcgtacatataagccttcggcggcatggtgctgtggaaagcggtgtcgaacacggctaccatgggaacgttgccgaacaccttgcgggcggcttcgatacccagaataccggcggggttgtgcaggggagccagcgggctcagctcgcgcagggtgttgatgacctcatcggtgatcaggcagctgctcttgaacttctcgccgccgtgcacgacgcggtgaccgatggcgtcgatctcgctcacgtcattgatgcacttgccggcgccggtggtcatcttcttcacgacctcggcaaaagcctcggtgtgggtggggaagatcgccggggtggtagccttggtgccgttggcctcgtgagtgatcatgctgctctccatgccaatgcgctcgcacaggcctttgcacagcaccttctcgccgtccatatcgatcagctgatacttcagggaagaagaaccgcagttaataaccagaactttcatctgtgttgcctcctgaaaatttttgtaccgtccgcagcctgaaaaacctgcggacagaattttacagattcctatgtttattatataatagggatggcggcttttcaaggcgcaacccgggcaaagcggtaaaacttgtgtacaaggtttttgtacatcctgcccacaaatcccggagacggcaggatttttctgtatatccgatataaatttaacaatctttcggcgaaaaggagcagttccatgaagtttgcaggcatcattgcggagtacgaccccttccacaacggccacgcatggcagctggcgcaggcgcgggcactgggagcgcagcgggtggctgttgccatgagctgcgggcttacccagcggggtgcgctgccgcttttgccggagacggtgcgggtgcaggcggcgctggcctgcggggcagaccttgtgtttgccctgcccgcgccctgcgcctgcgccggtgccgaggcttttgcccgggcgggggtgcgcattctggccgctgccgggtgcgacgcactggtctttggggcagagaccccggacaccgccctgctgcaaaaagccgcccgggtgctgtgcggcgaggactaccgtaccacgctcaggcagcagcttgccgccggggcgcgcaactttgccgccgcccggcaggcggcggtgcaggcgctgtgcccggggtcagacgttgccgccctgctggacaagcccaacaataatcttgccgtagagtattgtaaggctattatagaacaaaatgtagaaatgcagcccatcgctctgccgcggcagggcgcagaccacgggcaggcactgaccgaaagtgctcatgcagcctttgccagcgccagcgccctgcgggcgctctgggcggaggacggcgcggcggcactggctccttatgtgccggaaaaggcactaaaattgtatatacaagcgaaatatgacggaaagtatacagattttgcagtcatggggcactgcgagctggcgctgctgcgggcagcctgcgcagggcaagctccctttgcagcagtgcgcggagtatccgaggggttggagcaccggctggaaaacgccgtgcgggagaccgcaagcctgcccgctttgctggacgccctgactaccgtgcgctacccccgggcgcgaatgcggcggctggcgatggatgcggcgctgggctacaccgcccagaccccggcgctgccgccctacctgcacctgctgggcgcgcgcaaggaagcgctgcccctgcccggggagacggcgctgccgctgtcccactcgctggcgcggcttgcgcgggaaaacgagacctgcgcccaaatggctgccgcccagagcagggccagcgaccttggtgcgctgtgccgggctaaaccggagccgatgggcgggatatatcgtcaaaaaattatctttttgacgaattgacaaaaaataacgtgaaaaattttatattgtgccctcttgtatccggcgcggttcgggtgtatgattaaagcaatgcaatgttggatacaacaagcttgtaaaaaacgactgtccccgcaggggaaacacaaggaggaacccatggcacttcatgttctggacgaagccaaccgctgcctcggctgcaaaaagccgatgtgtcaggagggctgccccatccacaccaatatcccggaggtcatccgtctgctcaaggcaaaccagatggacgatgcaggccggatgctgtttgaaaacaatcccctgaccaccgtgtgcagtctggtgtgcaaccacgaaaagcagtgcgagggccactgcatccgcaaccggatgcccagccacgacccggtgcacttttccatcatcgaggactatatctctaccacctacgccaacaagatgaccgcaggccctgccccgaaaaacggcatgaaggccgctgtggtgggctccggcccggcaggcctgaccatcgcggtgctgctggcacgctggggctatgatgtgactatctttgacgcccgggataagatcggcggcgtgatgcgctacggcatccccaactaccgcctgccggacagcgtgctggacgatttccagtaccgtcatctggagctgaagggcatcaaggtgcgccccaacaccaccatcggcaagaccatcaccatcgatgatctgttccgcgacggctacaagagcgtgttcatcggtgccggtctgtggaaggccaacgccatgcacatcaagggcgagagccttggcaacgtggcctttggcatcgactatctggcaaactccaaggctttccgtctgggcgatgacgtggctgtcattggcgtgggcaactccgccatggactgcgcccgcaccgctatccgcaacggtgcccgccatgttacctgctacgcccgccgggacgaaagctgcatcagcgcttccgagtacgaggtcagctacgccaagctggagggcgtgggcttccgcttctgcaaggcaccggtggagatccgggaaaacggcctgatctgccgcgacaccgtcaagggcgaggacggcaagttcacgcaggtggagggcagcgaaactttgtacccccacaccggcgtcatcgtttcggtcagtcagggctctgagagcaacctcgtcaagaccacgaccggcatcgagaccaaccagaagggtctgctgagcgtcagcgaggacggccgcaccacccgcgagggcgtgtttgccggcggcgacgccgtcatgggcgcacgcaccgtggtggaggctgtggccgttgccaagaaggtggctgtcgccatggatgagtatatgaagagcctgcccgccgacaccgctgccgacccctatgccggcatcccggtgttccagacccctacctctgacgtgctgggcaagcagcagctgtaatatcttcctataaaaaagggacttggaaacgccgcaggcgtttccaagtcccttttatcttataacattacccgcaaggtgaattgtctgtcctttgcggcaaaactggtcaggccgccgtaccgctccgagatggcgcagatgctgcgcaccccaagcccgtggccgggctggtcggtgaccgggatgccatcccggagctgcacgtccggcagacagctgttggtgatctgcaaaaacagcttgtggcctttttcgtgcccggaggtctcgataaaggcttcgtgcccggcttcgcggcagcgcacggcggcgtgcagggcgttttccagtgcgttggaaagcagcacgcacagatcgctctccgagacggccggcttttgcgagatgcctgcctgcactgtgaactgtaccccggccttggcggcgcggtctgcaaaggcagaaaagatgagattcgccgcttcgttctcgcagtagacggtcaccttgccggcctcgatctcgctgcacacgctgcggatgtagcccagcgcctgctcggtgcggccattctcgatgcagcctgccagaaactgcatatggtggcgcaggtcgtggcggtaggtgctggcgcgctgctgggaaaggcgcagtgcttcgatctcgcgcatggcctgcgtgacctgcaagttcaggctggtctgcagctgttccatctggatgcgctgccgctccacccgggaggcgcgcaaaatagagcacaaaaaggctgcgcagcacacaaagaacatgaactccaccgccgccgggtttgcaccggacaaaaggctggtgtagacacgggtggtgtaatcaaagagataacccaccagcggcacgatgccaaactggcactgcacggaagccgggtagcgggaaagctgccgcatggagggggcaaggaaccggatgaacagcaacagcagcggcagggtgaacagcagctcagccaccggctgcaccagcggatgctgcgggaagaacagcgccacggccagcgccgcccagcgccgcacctgacagcacaggtaggccgtgagcaccgccaccagcggccagaccttctgtccgctgaacagcaccagcacgacatacagcggcaggtgggtgatgagggggtaaaggtactgggcagccgtgggactggtgccaaagtagaagatgccctgcagtgccagcagcccggcggtgcagcccgccagcgcccagcgctttttgcccgtccagcggatggggcagaacgccgcactgagcaggataccgaaaatgcctactgctgcaccgtccagcacttccggcagaatgcccggggcggtcacaggacgaccttctttcccgcaaaggcgtattccagatactgatcccgcacggcggtaaagcgcccgtggggcagcggcacctcggcaaggctttccatggtgatgctcttggcggtgatgttctggatgtactccatgtttaccagataggagcggtgcgggcgcagaaagcccgggtaatctgccagctgccgtgccagctcgtccatgctgccgctgctctcgatgacggtgccgtccagcagatggaataccagcgtgcgcccctgcacctcgcagtattccagactgtccagtgtaatgcgggtcacgccgcttttgcagcgcaggatcaggctgtgctgggtgcgcttgcggcactcggccagcacagcatcggtaaggcggaaaaagctgtccttccagatgggcttgagctggtagtagtatgcgcctaccacataggactgtacggcaaattccgaagaggaagtgacaaagatgatctgcaccgccgtgtcgtactggcgaatctcccgcgcggcattgatgccgttgatgccgggcataagcacatccaaaaacaacacatcaaagcgcaccccggcttcgatatctgccagaagctccatgggttttgtatagggaaacagctccagctgcacaccccgcagggcacggtactgctccagaaaatcctgcatctgatgcagcagggcggcatcgtcatcacagaaagcgatccgggtcatagcaaagaaatcctttccgaacaaaaatctaccctttaacgataccacatccgcgccgtttcgtcacgtctttttcgcaaatttaccttttgttataggtggggtttcacaaatcctttcccgtgaaaatgggacaccggagcgtctgcagacgctccggtgtcccgaaattataaataatctttccgattgttttttagtacgagctcagcccaaggcttacgtccagcgcctgatccacccgcttctggtcggcggcggtgatctgcccggcgcgctcccgcaggcggtgcttatccagcgtgcggatctgttccagcagcaccacgctgtccttggcaaggccggtgtccgccgcccggatgttgatgtgggtgggcaggcgggtcttgtccagccgggatgtaatggctgccgcgatcacagtggggctgtgccggttgccgatctcgttctgtacgatcagcaccgggcgcacaccgccctgctccgagcccaccaccggcgaaagatcggcgtagaaaacttctcctctgtgtacctccatggaatctccctcctgtttgtctggaggatgtgccccgctatgtgatgcgtccggcgcatcctgtctgctctcagtatgcgcagaccgggtgcggcttatgcagtgcgggggcgatattccattgtatgcacaaagggcggtcagctttcctcttccagcgtgcagaaggccagcgccatgccgccctcgtggctcagggagagccgggcgcgcagccggtgctgcgccacccatgcggcggtctgcccgctgaagcggtaggccggggcaccgttttcctgccggacggcttcgatctcacatagagaaaagggttcccgcagtccggtgcctgccgccttgagaaaggcttccttggcggcaaaatctgcggcggcgctggcaaggcggtgggcgttcagcggcgcagcagagccttccaaaagccccagcgccgcctgctcagccgggccgtacacccggcgcacaaaggctgctgcgtgggcagaggaaaggcttttttccagatgggaaaggctgcacaggtcgcagccgatgccgtaaagcatacaaaggctcctttcgcgggcagaatgccgcccggacatcgttcatcttgccggaacattgctggaaattttgtacaggatgtgcaaatccggcgtaattatcttgaagtttcggcgcatttcgtgtacaatgagactagtttcaaccgaagggggtgtattgcgtgggagacgcaaccgcgattttctccatccacgataaaaaggactatgagatccacgagatcgtacagcaggtgtacgatgctttgaaggaaaaaggctataacccggtcaatcagctggtgggctacattttgtccgaagaccctacctacattacgacctataagaatgcccgtgccatgatccgcaaggtggatcgtgacgatctactgcaggctatgctgcgcagctacctcaacgtgtaatattgtccttttcagccccgctgtcttgcaagacggcgggctttttgtgtgtgggatgattttaatcgttttccaccagcggcagggtgaagatctggttcaccaccacctcgtactcccacggctcccgcagctttttcagctgcttttccagcttttccgccccggcaaagcagtggatgaggtagaaccagtgccccttcatccggctgatggcgcagcccgcgctgccgaacaattcagtgtagccgtggtacaggtcggtcaggtagccccgcagctcctccttggcggcgggtgcaccgccccgcgccctgcggaagagcgccgggtctgcaatgagcccgcgccccaccatgatgccggacagggcgggaaactcttcttccagcgcgtggagctgggcggcggtggtcacatcgccgttgtagcacaccg

SEQ ID NO: 850 - DNA, 52152 bp, unidentified
  source 1..52152: mol_type = unassigned DNA
cgatctcctcgcgcagacggatgacgtcatcggtcatggtgccgtcgccgcagttggcaagatcctcctgcttgaactggatcagggcatcgatgccgtacagggcaacgcggcggtagtcgcccacgatgcggccgcggccgtaggtatccggcagaccggtgatgatgtgggtgtggcgtgccttcttcatctccggggtgtaggcatcgaacacggcctgattgtgggtgcgggtgtagtcggtaaagatcttgtgcagctcggcagagggctggtagccgtaggtggtgcaggcctgctctgccatcttgatgccgccgtagggcataaaggcgcgcttgaggggcttgtcggtctgtaagccaacgatctgctccagatccttcaggttttcgtcaatatagccggggccgtaggaggtcaggctgctgaccacctcggtctccatatccagcacgccgcccttggcgcgctcggccttctgcagctgctgcaaagcaccccaaagcttatcggtagcctcggtagggcctgccagaaagctttcgtcaccgttatagggggtgtagtttttctggatgaagtcacgcacgttgacctcttccttccagatgcggccttcaaagccttcccactgttcaaactggatcattggaacctccttgctccattacgcagttagcgttttctaactaatgagcctttgaaaaaccgctcggtctgggcggttttctgggggcgaaacggtcttgcgctgccggctgcggcagcccttactacaaggtgtagacaaaaataaaaacctgcccacaaaatcttgcgttattataatagcaagaacccctttaaaaagcaatagaaaacaagtgggttttcttccagcggaaaggctgttctttgggcagaatgtagaaaaaccgccgaaaccccggcggtgcacacaatttgcgaaaaaatttgcaaattaagggttgacaagactaaccgtctgtggtatcctgttctcgcagcggtggttagctaattctaaccacgttgcaccagaaaaaaaggagcgtctgcaagcgctccgctccattcctccattcctttctcttttctacgggaagcggcagcacggtttgctctgcagcttccggcgcggcaccggctgtgtttggtaccacagccgacgcaaagaaaacaaaaacgggacactcagcttgaccacctgagtgccccgatttttgttttgtgaggaaactccctcagtctttgctgcgcaaagccagctccctctgggagggagcctctggcgcaacggaaaactttccggtctaacaggaaactgtgccgctatgccaaaggccccatctccgagggggctggctgcgaccagcgggagcagactgggggagtttcgtttttactgccccatccccgccagctgttcatacagctgcgctgcgccgccgccggggtattttacgctgacataggcgctgttcaggatgcacacgccgtcggagtacaccgtcagcagaaacttctggttttcggcatcgtcataaaagctgacggtgaccgactgcaccgggaaggtatcgtgggtgtaggcagaatagttctggttcagctttttgcggcaggagacggtggaaagcaattctgccgtttgttggaactcttcgctgtccatggagaggaggtgatagtccatgtcgtttgtgctgccaaaatgcgccacttcctcggtgcggagcgtgccctgcgagctggcgcgcaccagcgccttcaggtcgatgggacggtacagcaccgcaaaagctgccagtgcaaacaggataaaaaatacagcggtgcggggaatgtggaagcttttcatctgctcacccctcctttggcggctccatttgcgccagatgccgctgagcgatgaaaaagcccacggcgctggcagcaaataccacataatagctggcgatgcggtagagcatcagcacgctcatcacctcgccctgttccagaaagctgccgaacaccagcagaaaggccgtttcgatcgagcccatcccggctacgttgggcagagcgttggagacgaagagcatcaggctggtgagcagctgcacctgccagaagcccagcggcgaaagccccatgaaccggatgcacaggtagggcaggcagaacagcccgaacagcttgagcgcctgcagggcaaaaattttcaggcagcggggcttatctgccagcagtcggcggctctcggtgcccagcacctccagctgttccagccagtcggcgcggcgctgctgccacttttcggtcttgggcagaaagcccagcagccagcgggcgaggttctgcaccagcggcgagacgcacagcagcaccagcaccacgataattaccgctaccacagcgtatgccatgggcaggtagcgcatgacaccggtggtgttggctgcaagccagcggcgctgcagcagcagcatcacggtggcgtacaggagcaccgtgcttttgtggaaaacgtattccagcgtcatcaggcctgcgccggggcccagcggcaacccggctctgtgcaggtagtacagctgcaccggtaccgcaccggcacccagcgtgaccacgttgccaaaggtgccgcaccagcctacatccagcccctgccgcagggtgaactgcggcagacggctgcgcacgatgacccacgccacgcacccttccagcagagggtagctgatgccgaccgccagcaccgccagcacctgccacaccgacagctgtgccagcgccgcagtgatctcggcccagtgatccttaaaagtgaacacgatgatgcaggtaagtgccagcagcaccagcagagagatcacggtctttttgcgggagggctgctgcgcggcggcttggctcatggaaacaaaactcctttcataaccggaaattctggaatcagtatagcacatctcccgccgccctttgtgaacggaagcggaactttgttgggcaatttgggggatttgataaaaaggaaagacccggctgcggcatgaaaaaaggatcgctgtacccataaggtgcagcgatcctttttgttttttttatgtacttctcagtccagatcggcggcttccagcacggtgacaccttcgttttcaaaggtcttgcggagaatatcggccagacccgggtggggtgccttgttgtggatgcacaggatgatctttccgttcaggctggcggcttccacgcccacggatgcgccatccggcggcacccagacaccaaaatccgtggtgtactgtgccagctccggggtggcgggcatcagcggattgcccagatagctgagccagaaatccgaaatagtgccaccaatgtactcgcccatctggaacacccgctgcttgatgcgcaggggggctttttgctggttcaccttgtacacccaacccatctgctcggtcatgcggcggcgcttggactgcggctgcagatcccgccggatgtctgcatctacatccgctacaaaatctgcaagacgggtctgggtttgcagctgcacctcatgctggaaagaacacacgcagttgtacagcgcattcggcacacctgccacatcgcgggtatcagacgagtaggaatactggatcttctccttgcccagatactcccgcatggccatgcacagcagacccatcagggcgcttaccggctttgcgttgtttgccagtgctttttccacaaggctctgcttgctcaggcacacccgggtgcggcgcagcgtaccctcgtaggtctgcaccacgtcccgctggatggcgtcgctcccgccctccacgggcgggtgctctgccagcatggcatccatatcatagggcgggtcgcacacgatctgctgcaccgcaaaggcagtaccgtaacgcaggttgcagtactgttccagaatgctggtgaacaggggcgataccccgtggccgtccatcaggaagtgatgccagtcaaagtagatggtatcctcttcgcagctgacgcagaacaggtagccgttcgtctgttccgggatattgcgcatggtgctgcctaggtacacaaggcagggctcagtgttgggctccagccacatctcccgcttttcctgcaccagacgctgggtataataaggcgcacttgccaaggccgttgtcagtgcccgctgcaaaagggcgagatccaccgcatcccgcagcgagaactggtaccggcactggactttttcccgacggaaaaaatacataacaccctgaaagttatattccgtcgagcgctgttgtgtttccattggttttaccccacgtttgctgccagataatccaccagatcacccatggtgacaaagttgcgcagctccttttccgggatgcgcagaccaaaggtctcctcaagatctgccacaatggtcaggatctccatagaggacagatccagatcgtccatcaggacgctgctttcggtcacatcctccggtgatacctctgcgacatcctccagaatagccgtgatctgagaaatgatttctgcacgttccatcgtattatgcttcctttctgttgcgttttacttgcgtaccagcttgcccgtagcgttgcggggcagcggtgtttcgctgaactccaccacgccgatgcgcttgtacagggggacagtacggttcatctgggtaacaaagtcccgcacggtctgctggtgctccttttcacagtataccacaacacctatctttttgcccagttcttttacgatacattcctgtacgacgggacatttttctaccatgccctccagctcctcggggctgatgttctcgccgctgtccagaatgatcaggttcttcttgcggccgatgatgtagtagtagccgtcctcgtccacccgggcaaggtcgccggtatgcacccagccgtccttgtcgatgacctctgcagtgccctccgggtccttatagtagcccatcatcacgcagtcgccgcgcatacacagctctccgtccggctcgatcttgtagtccatgtactcgctgccctgacccacggcgccaatgtgcttttcgtcctgtgcaaagttgatgatgccggcggcgcaggtctcggtagcaccgtagcactggatgacgaacatcccgttgtgcaccatatccagcagcacctgcgggtcaaacatggcagaggaaccgatgggcacccacagatcgcccagacggtcacggtgtccgcgcatcacatccttgtgcagggagttcatgatcatcggcaccacagacatgatctggctgggcatcttctggatatcgcggtagaagtcgcggatatcgctgcccagattcagcggccagcccatgacggtggtggagaacaggtcgatgaaagcacccagatggaacatgggcagcaccatgtagtggccgggcaggggctttgtcagatcgatcttgtctgccagctgtgcggagatggcccacagcacctgacctgcactgaacaggttgcgctcgctcatcataacgcccttgctcaggccggtggtgccggaggtgaacatcagcaccatcaggtcgtcgtgaccgatggggtgcagctccgccgccggctcatagcggcggaactcgtccatgggatgcagcagactgccgtaggcggcctccagctgctccttgctgccgtagtcctcgccgtcggtcaggatggcggcgggctccaccagctccagctcgtgggacatctctgcccagctcttgcgctggttcatcggcaccagcacgcagcctgccatgatcgcgccgaaggtgtttaccacatactcgtagctgttcttgctcagcaggcagacctttttgcccttcgcgtccgggatggtgctctgcagataggtgaccgtccggcggacatcctgtgccagctccttaaaaaggacggttgtcaccatgtcggtctcctcggtgtagtaacggaaggccacgcgctcgggaaattccttttccatgccctgcgtaatggcatcgtacatcgtgctcacgaatttttccattgtagattccatcctgttttgttctgtttgttttatactcagcgcagcaatttgcccgtagcgttgcggggcaacggctctgcactgaactccaccacgccgatgcgcttatacagcggcagggtacggttcatctcggtaatatgatcctgcacagtctgctgcttgtcctgcgggcagtacaccacagcgccgatctttttgcccatttccttcacgatgcattcctgcacggcggggcatttttccacaagatcctccagctcctcagggctgatgttctcgccactgtccagaatgatcaggttcttcttgcggccagtcaggtacatatagctgtcctcttccagccgggcgatgtcgccggtgtggaaccagccgtccttgtcgatgacctcagccgtggcctcggggtccttatagtagcccagcatgatgggggtgccgcgcatacacagctcgccatcgtccagcttatactcgcagctgttgtccacatggcccacgctggtcaggtgcttttcctcctgggaggagttccaggcaccatcgccgcaggtctcggtcaggccgtacatctgggcaataaagaagcccttgtccatcaggtccttgagcatcttggggtcgaacatggctgcgccgcaggtcaggacgcacaggccattcaggcggtcgcggcggcccctcatcacatccttatacaggctcttcagcagcaccggcaccacagccatcacctcgctgtgcatcgcgccgatatcgcggtagaaatacttgaggtcgttgcacaggttgatgcagtggccggtaatgctccaggataccaggctggtcatggccgagatgtggaacatgggcagcgcggacagcgagcagaacttatcggtgtcccagccggtcgccttgcgcacatcatcaaacggatccaggaaggcgggcatggccgcaaacaggttcttctggctcagcataacgcccttgctgcggccggtggtgccggaggtaaacatgataaaggccatcgcggcaagatcttccacttcctttacatcctgtgcgggggcaaaggcggtaaaggcatccatcggctccagctttgcactgtaggcatccgccagggcaggctcccactgcagatactcaccgtcctgcagcacacagaccggctccaccagatccagctcgtactggatctcgtcccagttcttgcccatattcagcggcactgccacaccgcccgccagcacggtgccgtacatacagatgatgtagtggtaactgttgcgggccaggatcgcgacccgctgccccttgacatcccctgccttactgcgcaggaagctgacgaacctgcgcagatcctgggcatactggcggtagtacacctctgttacgccctgttttgcctcgtcataataccggatcgccacgtggtccgcatagatcgtttccatattacaaagtgactgatacagcgatgtgaccataattttaccctcccgaagcattttgtcctgcccagtgtccggctccgtccttcggggcgcagcccgggcgctcaactgtgcccagtatacaatatcttccagcgcaatgcaatacttctgcaacatttaatttcttatcttgacaagtttttgttgcgtatcttttggcgcagtctggccaaattctacctttcgttgcaatccgccggttcctgtgctacaatttttagcgcaaaataccagttccggtatggcgcggactgcaaaacaaaattgacagtctccccaaaaagcattatactagccatatatcatggcaatgctgcataaaaactgatcatttgcgccgtatccggctttttctcgaggggggtatctgcccggcgcagggaaggaatctttcatggaaacaaccaagccccgcactgtcagctccatcgggatgtttgatatgctcaagggcgcagggatgctgtccatcgtgctggggcataccgtagagctttatccgctccagctgtcgaacggcctgtcactgaccgcctttttttgctttatctaccgcgaaacgctgatggcagccttttttattgccagcggctacggcttccgcaagcgctctatccacaaatgcatccaccagcagctcaaaagtctgctcaagcccttttgctatactgcggtgttcaccacggtgctgcattttatcattcattataagacctttcactacctgcccggctcgctgaccgagagcatcaaggtggcgggcggctttctgctgggtctgccccatacggccacctactttgggcaggagttcttttcctgcgggcccatgtggtatctgctggcgctgctggtgggctggatcctgctggacgtcatcctgaacatcttcccggagcggtacgtttcgtgggcagtgggcggtgccgccctgctgggctggggcaccagccttgcgtgggagctgcctttctgcctgatccagggcgcggtgatcacgccgtatttgtacatcggctaccttgccaagcggcagcactggctggatcagcccttgtcccgccggatgtcctgcatcctgtgggcagctgttctgctgatcccggtggctgcctttgccaccggcagcaccgactgcgtttccatggcagagtggaccttaggccccatcagcatcctgctggacggccttgccggcctgctgttcgtccggctgtttctgcggctgaaccggcaccggaacgcgctggtgagcttttttgaggccgtcggacgccgctctttgtatatcttctgcatacataccgtggagcttaccgccattccgtggtatctgcttgcggcaaaatacgccgaccgcccgtttgtgggcatcgggctggaatatgccttttctttgggctccatctggctggtctgtgccctgctgcagcggcggcgggagctgatcatccggctgttccccgcccggcggcacaccccgcaggtgcactacactgcgcggcactgatctttcggaagctgcttgcaatgcttatgcaaacggcttttcagcacattgcggctgcggcggcgcagctgagcttataggataaggaagaggaggatcccgttatgaaccatgaactccccgcgacccctgctgccctgcaggcgcatattgcagagctggagcagcagctcaggctctcggacgagggtgtttcccagctggcacagcggtgtctggagctggagcagcagctgctggtctgccagaccgagcttgccaagcacagcacggagacggataactttaccctcaccctgccgcagctgttctacgacaccggcagcggcttttcgccccgggaatgcctgatcgcagccgaggacgcccacaacgagctgacccatgaggtgtcggtcacctttgttctgccggaggacgcccgcgctgtccggctggatcccggcgagctggcctgctgcatcaccgaccttgccatttcggacgagcgcatcagctttcagtcggtcaacggccttatgctgcaggaggactgcctgctgtttttggatgtggacccgaacctttcgctgcattgcaccaccggctttagcgccggcatgaagtttgcggtaaactaccactactacccgctggggcgttttctgcacgagcagcccggcaaatctctgctgcgggcactgaacgagctgaagctgaagaatgctgccgccgcgcaggaggctgatgagatgctgcaggccagccgcgccgaatgtatgcggctgaaccagcagctgctgactttgcagggcatccagcacgaatatcaggtctcgctggaaacgatacgcgccagcagcagctggcggctgaccgctccgctgcgcagactgctgaccctgctgcgcggccactgagcccgcccgatattctgcccggaggagttggatcgatgtacaccagttacagtaccctgcagcgcaagcaattgtccaagcaggcctataccgatacccagagcacctatcttctggtctatgcgccggggcgtcacaaggcgctggaaacggcgctgcaaaaccagctgcaccgcaagttccgtctggtgactgcgctggagggcgagctgacccccgatgtggcaggggtgctgctggtgagcgaggatgtggaatgcatccctaccgccctgacctattttgccgctgccctgcgggagggtgcagaccttgcagtctgcgatgcctcctttggctttgacggctctaccgccctgtacctgagcacccggcacctgcccggcagcagctgcgccatggtgtcccgggcactgctggacaaggtgcgcgccgccgcccggggcagggacagcgttaccgagctgctgcgcctgtcccacgccatggcgcagcacagctgctgcatcccgcaggcgctgctgcacttccgccgggagctgtgcgccgaggacgtattctccgccaagggacgccgcgcgctgatcctgagccacgagctgaccatgaccggcgcgcccatcgtgctggtaagcgccgtgccggtgctgcgcagccttggctttgaggtagtagtgctgggccctgcggacgagggcccgctgcagctgtttctggacgccggtgccgccgtggtcacccgcccggactgcgttacctccagtgccctgtgggggctggccaccagcgcagaccttgtgctggccaacacggtggtggaagcgccggtggtgaacaccctgaacggctcttttgtgccggtgctgtggtggctgcacgatgcctttgcgggctaccccttcatctctcacagcatccccaaggcgctgggcaaaaatatccatgtctgcgccgtaggctcccacgccaccgccgccatgcactcggtaaggccggattttgaaatcgagcagctgatctacggtctgccggactacgccgccgagcagttcccccgctatgacatcagctttgccgggggacgcaccctctttgtaacggtcggctcgctggagccccgcaagggcccggatatcttctgcaatgccatccggctgctgccctctgcggtgcgggaaaaagccgctttcctctttgtgggcaaagccgccgacaaggggatgtacaacgccgtggacagtctggtgcgggattacccacagacggtgttctaccgcaagcggctggagcgcccggaggtgaaatccctgatggagcagtgcaattgcgtggtgtgcgcttcccgcgatgatcccatgcctacctttgtcaccgagggtctgatcttcggcaagccctccatcgtatcggagcacaccggtacggcgggacttgtgaccgagggcgtggacggctttttgtacaaggacgacgacccgcagcagctggccgacaagctggcttgggcgatcgagcacccggagatgctggctgccatgcacgatgactgccgccggctgtatgagcagcagttctccaacgagtcctatgtagccaccctgacaaggcttgtaaaagagctgacggacggcgaatgagatagcaaaaacaaaagaccggagctgtaaagccctttcagggcttgatacagctccggtctttttgctgggtcttgcgcagcccctttgcgttaaggtgtatctgaaaacaaagaaaatgacgaatatttcgcaaacacaagcgggatttaaggcaaatagccgcaggaatcctttgtggatttcaaggctgtttaacgcaaaatccagctgtgcttgtagaaatagactaaattttcgacttttcagatacaccctaagcagcgggggaggtgcaggctcagttctgcttgccggtttcggctttcatggcgttgtagccgatgagcacggtccagacgtaggcgcaggtcttggggatcatcagcatcccgatcagggggttgacgtctgcccacagcaccacggggatatagaagccgaagctcagcacgatggtcagccacatccagcggaaagccttatcgttgttctgtttggcgctgcggtagaacagcacgatgatcagcagacccagcagggcaaagggcacattgcgcaggatgccccatgccagcggggtgtggttggtgagccactggttctgcggcatcatgcacagcacgatgcgcacagcggacagggcgtacacagcggcggtcacgttcttctgcccttcgatctggtagcgcttgcgccagacgtagtacagcagcacatagaacacggtcatggtcacagaggtgatccacttgcccagacccagcggcacggcgtagttttccagaccagtggtgcacagtgccagtgcgcggggcaccagatggaaagagtcgcccgcgcccagcacaacggccatcaggccgaacaggcggaactgggtgccagccttgctgccgcggatcatgcggatgcccaccgtaagcacggtgaccagatagaagatgtcgaaaacggtctcaatgattgctctcatacgtttgtctcctttgtttgttttagatcgtaggttttgtttttgatttttatagcgaaccggcgcggcacagccgtaccggagacatcgtggggaaaagggcttgcagtagtatggtctgcggagcgctgaaaccaaaatgaactatgttcacattcgggcttaaaaacatcccacaaagattgtgggatgttttttgcttaataaatggttctgcgcacgatctccagcaccgcagaagggtcgaagctctgctgcaccaccgcagacagcatcagggagaacaggatgcctgcaaactgctccggggtgaactgctcggtaaaggcgtcaggacggatcttggcatcgtggcgcagcacgctgcacaaagcgtccagaatgttctgccatgtctgccgcatctgctgcttgccgtcggcagtgtcctgctgcacaaagcccagtgcatggtgggtgaagaagccgggatattgctggcagccgtattccatctgccggtacatccactggatgcaggacagggtgtcctgaaacacggcttcatcctccgggtggcggaagatgtcgttccagatgctttccactgccgcgcttaccagctcggtcttggagccgaagtagttgtagatgcagcccacagagaccccgcaggctgcggcgaccgcacggatgttgaccgctgcccagccgttctgctggatcagctcccggctggttttcaggatgtccgctttggacgttgccattggattcgtaaactcacctcccaacatgaacgccgttcacgatgcatagtatacagcggcggctgacggctgtcaaggggaaaataaaattatctgcgccgttatcccgcagccacatagggaaaaaacagccggaatgtcaacgatatgattcaagtttgcatctcctaaaatgtgctaaattcatgtcaaaatggtaacagttcttatttcatcgttgatttttgacgaaaaaagcttgcttttttcgtcaacgtgcgtataatggaaggacatcagacaaccgatgcagttggtatgctgccgggggcctgacaccaacaaaagaagaaaaaggagatttccctatgaagctcaagactgttgcaattgccgctgccgctctggcactggctgtcggcatgaccgcctgcggcggctctgcctctaccgctgcatcctccaccgcatcctctgctgctgcctcttccgtggctgcttcctccgaagctgcttcctccgaggctgaggctgcttctgccgagtacaccgtgtacaacaccaccggcagcaaggtgaccgagctgtacctgtacgatgcaggctctgaggacaagggcgagaacctggcaggcgaaggtctggctgacggcgagagcatcgtcatcacccgcgatgtcgaggctgacaagcaggctgacgttgtttacgttctggagttcaccaccgaggacggcaatacccagagctttgacaccctgcactatgaggtggctcccatctctctgaagagcgtggacgccgctgccggtgctaccgccatcgctttcgaagctccccagaagtaagagcaaacccttacatccgcaaacagaaaaaaggctgctgcaccgtgcgtgcagcagcctttttgtataaaatcatatcacatacggaacccacggaagccccagccgccgcagcagcagttgcacagcagattcagcaagatcatgctccagcaccagcgcaaaagcccgccgggctgggcgtaggtggtctgggtgcggtaggtctggccggggttctgcatccggcgcaggtgcatctggtactcggtgttgttcgggtccagctgcacggcgcggcgggcatcctgcaaagcgtccacgcttttgccaagcccctgattggccagcgaggagagatagtaccaccgcgcgttgcggccggtcataccgtccagcacccggcgtgcttcggcgtagcggccgctggccacaaagttgcgggcggcctgcatttccggggtgtcggtgccggaagcgctgggcccggcctgctggtagccgccaaagccaaaaccaaagccaaaggggtcgaagccctcaaacccgtcaaagccgtcaaagccggtgtagccgtagttctgctggccgtaaccctgctgcccatagctctgccggttatagctttgctgctggtagccgccgtaggggttgccgcccatctgggggccggtatcgcccttggtaatggcatcgtaggcggcctgcacctccttgaagtgctcctcggccgtggggtcgttggggttcaaatccgggtgccagcgcttgcacttggcgcggtatgcttttttgatctcatcgtcgcttgcgccgcgctgaacgcccagcacctcatagggatctctcatgctcggtatacttcctcactcattatactgacggtacagcgccgctgcaccatatccgttttattttaccggaatatcggcacaaaatcaagacacatcgggctttccggtgcgttttgcgtttttgcagttgtatttcagccacacgccggaatacaggatgttgcgcagcagatctgcgtcctccacgcagggcagacgctcaaagttctgcgcgcagcgtgccagcagcagctcaaagatgtccagcatctcttcctcgtagtccggatgggtgctcagctcccgcagggggttgtacgcaccccggcgcttgtcgcggggcaggtcgtcgtaggcgtccagcaggtagatgaacttgcccagatggaagccgatgctgcgcagctccggtgcccagcggtcctgccggtagtcgaacagctccgccatcagggtgccgaagcagccggacactgcatcaaggtcggtgctgccggcggcttcgtactcggcaagcttggcgagacacgagcggatcgcattgcactggcgcggccagcgcagggcggcttcggcggtgctgttgtccagcagggcgctgtaccccagcgccagcagattgcggtcgtcctgccatttgtcctgcgcgttgtagtaatgcagcgccacgctcaggtcggcgcagtagtcggtagggtcggcgctgcgccaaagtacaccgtgtaccgggtggatgggacagcggtttataccgctgtctgcgggggtctcgccctcgtacagactgcacagcagaatgttcaaaaaggtcaggtcatagctcaggctgaaccgtccccgcagcccgtgcaaagcgtcgatgcggcggcacagcccgcaataggccgagcggtagcggctctgcgcttcggggctgagactggcccgatccgggatcacatatccgaacatggcggctcagctttttttgatgaactgggtgccgcagcgcgggcaggagatctggatgcgtccgcgtccccggggcacccgcagcttctggcggcactgagggcagcggtagtagtggtacagcttgcggttggcccactgctccttcaggctgcggaacttgttattgaaccgatccttcaggctgtaaaagcggtagttttcctcggtgcgcttggagatgttgcggctcaggctgcggtagtagcacaaaatcagcagtgccgcgcccagccatgtgaacagggaaatgcgggtgagcagcgataccagcagcatcacgatggagctcatgctcagaaactggttcaggccatcggtgccgtagcggccgatcatgaattgacggaatttttctctcataggttttcgcatcctcttctctggggctttacacacggaaacgcagggcagcagcgccgccctgcggaatactttgtacctctagaatatcagccaaccatgataaaattttgaacagactgcaaatctatcatgaaaggacgaaaattaaacgttttgctcctcccggctgcgcacggtgagcaccgcttcggtgtccagtgcgccctccatgcggcagtgcagcacggcgcgtccggcctcgccggtggtggcaaggtaggtgcccgccatgccgccccgcaggggcactacgctgggacctaaaattttcaacggcccttccacggacaggcagacggcctcgccgcagtagggcagcaggttgccgttctggtcgatggcgcgcaggctgaccgcggcgcagtcccatgtggggccgtcggtcagcagggggttgtgcacggtgcattccagccggacgctctgcaccggctcccgcaccacggtgcgcacggcgcggccatgccacaccgcttcgaaccggtacaccggcgcggagctgcccagcacaccgatgtacttgtagtacatccgcagcagctcgttccagctcagccgcagcgagagcatccgcgccttggacaggggtgaaagcgccatggcgtcccgccgcagctcgttgaggatggcggcagcctgcacggcggtggcgtgatccatgccctcgtatttttccagcagcgagccgacaaaatcgttgatctcgatgggcgggtggggcagggcggcaaagcgtccccggcggtcgggggtaaactcggccacaaagtcgttgccgcggtacagccgcacgctctcggcgttggtgaacacccagcaggcggcggctgcgccgccgggcaggtcgcccagcgtcatggcagaggagacctccagcacgatgtcggagggggcacggggcgttttctggctggcgtagacggcggcggagagcttcgggttgcggaacagatccatcacgccgtggtagcagatgcggtcgccgctgccaaactcccggtgggtgttgtagtcggtcatgcaccagccaaagctgcccgcaacgcccggctgggcgatgctgtcgttcagcacggcggcgtggtgcagcgcctgcaccagacggtgaggttcgtcatcaaagggcttggcggggaagttctgaccgccgaactcgctgataaggtagcccttgcgggtgtcgggggtcacggcggcgcggttctcgcagcccgcgccgcgcccggcgtaggaataatcgttgtaggcgtacacgtcctccagcagctggcttttgcgggtgctgcggctgcccgccgttgggcgggtggggtccagccggtggatggcttcgttggtgcgcttataaaaggcttcgttgtcggggctgccgctgatgcgggcaccccacaaaaagatgctgggatggctgcggtactggcacaccatctcccggcagttctgcagcgcctgcgcctgccacacttcgtcaccgatgtgctgccagccgggcatttcggggaacaccagcagacccagctcgtcgcaggcgtccagaaacgccgggctggggggcgcatagcaggtgcgcacggcgttgcagcccagctcctttttcagcagctgggcgtccagccgctggatgctgtccggcatggcgtagccctgataagggtagctctggtgccggtcaaggccgcgcagctccacccgctgaccgttcaggtacagcccgcccgccacgaactgcacggtgcggaagccgaaccgcaccgttttttcgtctagcacccggtcgggcagaccgccggtgccggggcggatgagccgcacggtcagggtgtacagggtagggtgctctaagctccatgggtgcacgttgttcagcgtgccggtgatgggcagggaaagctcgccgctgtacaccgcccggctcccggcggggctgcggatctcggcctgcagggtgcagccgaccgtctcgcccacggtggcggtgtagatgcggaaatcgccctccgcctttgcctcgatgaacacgtcccgcagataggcgggctccttgatatccagactgacggcgcggtagatgccgccgtaagtcagcgcatccagctgcccgccgaagggcgggatgttcagatcctcccggctgtcgcagcgcacagccaccacgtttttctgccccagttgcagcgcgccggtcaggtctaccgtaaaggcggtgtagccgcagccgtggtggaacatccgccgcccgttgcagaacacagtagcatcgtgcgccaccgccccgaaggtaagcagcacggtgcggcccagccactctttgggcgcaaaaaactcccgccggtagccgcacaggcgctggtagtcgttttcattgcagtagttataaggcaggggcttgaccgtgtggggcagccgcaccggggtaagggaaagctccgggcactccgggcgcaccagcgccgggtcgaatgtgggggtgaacagccagccctcgttccaatcgtagtgttccatagcaggatctccgtctgagtgatatgcttatagaggtatggtatcacaaagttatgaacgaaaaaagcattcgtgctccttttgtgccggaacagcagaaattttgcagtgcacgaaagctgccggtggcaggttgaccaagaaatgcttggaaaaattgtacaaaatcgcccatagaaatggagccccggaacgccagcggcgttccggggctctgaaatcattttcacgagaggggctgtatgtaaaaaaatggattgggaaactctgtggagtttcccaatccataaatttaaaataattcttccgctgaagatgcgcagagcaacgcggagcgcataacaaatcttttatctcagcggataaagttggtcatggggcggggcgggttctgcgggtggtcgatgcctgcagccttaccggcttcgatgcagcgcagcagccatgccatgttgcggcccagctcctgcatcacggcgcagccttcggcgtcctgcaatacctgctcggggttggagccatgcaccatcgcccagtaggagccgttgaccagcggcatatggaagaactgggggtatttgaccagctggtcaagagtggaggtggtaccggcgcggcgggcagagcagcagatggcggcgggcttgtaggccagatacttgccgcccgcgtaggccagacggtccataaagctggccatgttgcccgcagcggaggcgtagtgcaccgggctgccgaacacgaaggcgtcggcggtcttggccttctcaatggcttcattgactacgccgccgaacacgcacccgttgccgctgcggcagccgccgcagccgatgcagccgcccacgggctgaccgccgacgtgcaggatctcggtttcaatgccctgtgccttcagctccccggcaataagggaaagggcggtgtaggtgcagcccttctcgtgggggctgccgttgatgagcagaactttcatgctgtatactctcctttgctgaaatgcgccgtaaaatgcgcaatattgctgctatgattgtagcacaaagccgcccgcagcgcaatgcgggctcttgacaatgctatgcagttgggagataataaaggatacgaaagagttcaaactggctgccgcgggggcggcagctacggcaaggaggtaacatcatgcgcgtgatcgcaggagaagcccggggccgcaggctggaagcactgcccggcaccgatgtgacccgccccaccctctcgcaggtgaaggaggcgatgttcagcatcgtacagttcgacctgcccggggcacgggtactggatctgtatgccggcagcggccagctgggcatcgaggcgctgagccggggtgcggcccggtgcgtctttctggacgagagccgggaggcggtaagcatcgtgatgcgcaactgcaaggcctgcggcgtgtttgaccgcagccgggtgaatatcggcgaggctgcgcggtttttatcggcctgccgggagcagttcgatctggtgctgctggacccgcccttccgcggcggcacgctggaaaagatcctgcccgccgtggaaaagtgcgtcgctccgggcggcatcgtgctgtgcgagagcgaaacaggcatcgtgctgcccgcgcaggcgggcagtctgaccctgcagaaacagtataaatacggcaaggtgctgctgtggaagtacacaaagcccatgcagcccgccgctgagcaggagggagaagccttatgaacgtgaacgagcttttggataccattgaggatgcactggaagagagcgcaaatgtgcccctttccggcggcaagcgcatcgtggatgtggagcagatccgggattatctggacgaggtgcgggccgcgctgcccggcgaactgcggcaggcgcagcagatcgtgaacgaccgggcgcagatcgtggacagcgccaacgcacaggcgcaggccattgtgaaaaaggccgaggagcgcgcccgcattctggtcagcgatgccgagatcgtcaaggccgcccagcagcgcgcggctgagatcaccgttgctgcccagaccgaggcacgcaccctgcgccagaccgtgaccgactactgcgagaatatgctgcgcaccaccgaggacaccatggtggaaaacgccgcacaggtcaaaaacatccgcaacagcctgcgccagaacgccaagaaaaacggctgataacggccaactttccacacaaattccacacattgcggaaaacaaagtccctgcgagcaaaaatgacggctcacagggactttttttgtggacttttgcggcaaaaagccgcccgaaaacccttgcattcacaggcttgatttgctacaataaagatgtatcagtggggcaaagtgggtaaaagtagggcatacaccctgaaaacgcccctgaaagggggagcagcgcgtgttttttggccgttatgattacaccatcgatgccaaggggcggctgaacttccccgcaaaattccgcgacgccatgggcgagagctttgtggtgctggaatgggtggacaactgcctgttcgcactgcccatggaggaagtccagcggctggcggacaagctggaaagcgatgagctgatgaacagctgggctgtctccggcgatctgttcagcaccgcctgcgaggtggtgccggacaagcagggacgcattctgctgcccgcagagctgcgcgcttacgccgggctggaaaaggacgtgaccatcatcggcaaccgcagccacgccgagatctgggccaccgaggtctggaacgcccgccgcgccgccgtgaccaacgaccagcgcgccgagcagctgcgcaagctgcacctctgatgcaaaaaattaaaccgagaaaggaggccgtgccaatggcctttgaagaacagcagccctttgacccggcctcgtttgagcatatccccgttttgctgaacgagtgcctgacagggcttgccatcgacccggcgggcacctatctggacggcaccgccggcggcgcgggacattcccgccagatcgctttgcggctggatgccgccaagggcggcagactcatctcgctggatcaggatccggacgcggtgcagaccgcgcgggcgcgtcttgccgggctgcctgccaccgtggtgcagatcaattttcgctatgcggggcaggcgctggagcagctgggcattgaaaagatcaacggtgcactgctggatcttggcgtttccagccaccagctggacgatgccgcccggggcttttcctaccgggcagacgcaccgctggatatgcgcatgagccagcagggtgagaccgccgcagaccttgtgaacaccgaaagccgcgaggaactggcccgtatcctgcgggactacggcgaggaaccctacgcatggcagatcgcaggaaagatcgtggaggcgcgggaaactgctcctatcctgaccaccctgcagctggcagataccgtagcaagcgcgatgcccccggcagagcgccgcaaaaacaagaacccctcccgccgcacctttcaggcactgcgcattgcagtgaaccatgaactggatgcgctggaagagggcttggataccattttcgatcaccttgcaccgggcggccggttgtgcgtgatcaccttccactctctggaggaccggctggtcaagaacaagttccgccgctggtccacagcctgtacctgcccgccggagtttccggtgtgtgtatgcggcggcaaggcaaaggcaaagcttatcacccgcaaacccattgaagctgatacgcaggagctggaggagaaccggcgcagccgttctgcccacctgcgtgtactggaaaaatgctgagatgccggaagcaccggcatcatgaggaggagaggaaccatgggtcagccagcatacgatcgtaacgcggcgcgccgccgcagggcgccgcagccgcagcgcaaagcaaacctgcgggtagcaaagggcggtaagcggcggttgaacccgctgcaggccgccgtacataacgccatgaatctggtggcggcagcactgctggtgggttttgccatcagtctgctgtggagcgaggcacagctggtggagctgaacgaccagatccaggacgcaaaagcgcagctggtcagcgagcagagccagtatacctactacaacagcaccctgaacagcaagaccaacattgccagcgtggaggagaccgcagggcggctgggtctgatgaaggtagaccccagccagatcacctacatccgcctgggcgagagcggcgcactggtgcgccgggagtccaccgtgcggcaatggaccgactttttgtacaccggcgcggtgaacattctgggcaccgtgagataaacggaaaaagcgtgcggcggcgcacgcttttttcggtttatggacaccgcagtctgaacaaataacagcgcagggcgtgcggaatgcagtgcacgccccgcaggagagaaccaatgcaagaacctttccgtaacaaaaaaagcaggggctaccgcctgcgtccggccaccggacgggaccggctggacagccgggtgcggtggctttgcggccgtctgggcatccttgcggtggtggtggcagctgccatcgtcatccgcagcctgtataatatccagatcgtccacggggcagagtaccgccagtacgccgcccagcagcagctgctggataccaccattaaggctacccgcggtgagatctacgatgcttccggcatcacccttgcttccaccagcgtggtgtggactatctgggcagaccccagttacagcagcatcctttataccagcaagaccaatgatgacgacaccgtgaccaaaacgctggaccccgccatgtgtgccgaggtgagccgggagctgacgttgcgtctgctctccggggacggcgaaagcatggacagcgtggacacctcctcggcagagtaccagcagcagtaccagaccgtctacgatgcactttcccggctggattctgcctacgtcacccttgccaccaaggtgaacaacgcggtgaagctttccattgaaaagtacgtcaccagcttcaacaagacgcacaaaaaggccaccgacacctcccgcaaggggcgcatttcggtgtcctcggaaaagagtttccagcgcaactacccctacggtgcctttgccgcagcggtgctgggctttacggatgcggatggcgtcggcacctacggactggaaaaatcctaccagtccaccttggccggtgtggatggccgcaccatcacccagcgcaacgcggtgggcaacgccattgcagacgccaacgctaccacctttgccgccaaggacggctccaatctggtgctgtcgctggatgtgaacgtgcaggagatcgcggagcggtacctgaacgaagctattgcagccaatacggtggaaaaccgcggctgcgccattgtgatgaacgttaagaccggtgccatccttgccatggcctccaaaccggactttgaccccaacgacccgctgaactacaccgccaacgaggcttatctcaacgagctggtgcacgcagagccagagctttacggcgtctataaaaaggacgccgacggcaactacatcaccgatgaacagggcaacaaaattctggacgaggaagcggactattccggctactaccgggatatcctgtggaaaaacaaggccatcaccgaactgtactacccgggctctgtgttcaaggtcatcacctctgccatgggcatcgactccggcgtggcgaccatgaacaccacctttacctgctctggcgcttacggtgttgccaaggagacctaccactgcgcagggcgcaaggcgcacggcctgctcaatatggccgaggcactgcgcaagagctgcaacatctactacatccagctggggcagcgcgtcggctcgcagcagttctataactacttcgatgccttcggttttaccgcccgcaccggggtggacctgcccagcgagaccaattttatgcagtactaccgcgccgaccagctgggcgaggtgcagctggcttcctcctccttcggtcaggccatggccatcaccccgctgcagatgtgcaccgccattgcagccactgtcaacggcgggtatttggtcaccccccatgtggtggataagatcaccgatgccaacggcaacgtcattcaggagatcggcgcaaacgtgcgccgtcaggtcatcagtcagagcgccagcgaggtcatccgggagatgatggagtacgaggtgggcaacggcaccggcggcggcaaaaacgcctatgtgtccggctaccgcatcggcggcaagtccggtacttccgagcagctgaatatgcaccgccgtgccgatggcgactataaaaaggtggcttctttcgtggcggtgctgcccgccaacgacccggaaattctggtctacgtcatgctggacgaccccaacaacgcccggacggactattcctccatccttgcagcccctgtggcaggcaatatcatcagtgaggtggctccctatctgggcatcgccaccgacggcgaggaccgcagcggcaccatcgttaccgtgccgaaccttgtgggcaccgagtggagcaacgcgcaggtaagcctgaatattcagggcctgaagcatcagctgcaggagagtcagagcagccagtctgctgccccggtcacctaccagtacccccacgcgggcgcaaaggtgccctacggcaccaccatctacctgtataccgatacctacgagggcagccgcaccgaggtgccggatgtgacaggcaagagcccggactttgcccgccagatgctgagcgccgccgggctgaactgcgtggtggaaggcagcggcacggtgcaggcgcaaagcgccgagcccggctccagcgtgcagcgcggcaccatcatcaccctgacctgtgggtaaaatagctttttcggcatcttcgaccaaggctttcagcataaagcactgccgcaaggcagtgacggatgagggtgcagcattcaatagaacgagaggggatagaacaatggaaaagatccatgcaagcaagcttctggcagggctggtgcctgccggaaaactgaccagtgacccggaggtggcactggtcaccaccgacagccgcgaggtaaagcccggctgcatttttgtggccttccccggcgagcggttcgacggccatgatttcgccgcccgtgcgctggagcagggcgcggagtatgtggtggtcaaccatcccgtgcccggtgtgccggaagaaaaggccatcctttgcccggacagctaccacgccatgatggtgatgggcgcaaactaccgcagtcagtaccaccccaaaatggtgggtgtgaccggtagtgtgggcaagaccaccaccaagcagatgacctacgccgccctgagcggctttggcgagactatcaagaccgagggcaaccagaacaatgagctgggaatgccccgcaccctgatgcggctggaaagcagcaccgagtacgcggtcatcgagatgggcatgagccacgccggcgagatcgaccgtctggcgcgggcagcacggccggatgtgggcatcattacctgcatcggcgtgtcccatatcggcaatctgggcagtcaggagaacatctgcaaggcaaaactggaaatctgcaacggtctgccggagggtgcgccgctggtgctgaactacgatgaccccttcctgcgcaaggcagtgctccccgcccatgtgtgcccggtgtggttcagtctgagcgatgaaaacgcagacgtctgcgccctgtccatccggcaggagactgacggcatgagttttgtgctggaagatcaggagcacggcacctttgtggtgaacatccccgccatgggacgccataatgtggcaaacgctctggctgcctactgcgccgccacccgtctggggtgtgacgccaagagggtcatccggggcctttccaactttgagcagaccggacgccgccagaaggtggtggacagcgagggcgtgaccgtcatcgaggactgctacaacgcaaacccggacagcatgaaggctgcactggccatgtttaaagatttcccctgcaagcgccgctttgccctgctgggcgatatgctggagctgggcgagctgagccgcgaagcacacgaggagctgggacgccttgccgccgagagcgggctgtactgcctgatcacctacggcgagcaggccaagcgcaccgctgtggtggctgcggccaagggggtagagaccctgcacgcggacagctaccgcgaggctgccgatgctctgctggatcgggtgcagcccggcgatgccattctggtaaaggccagccacggcatggcactggaaaaagtgctggatatcttctacgaagagcataaagaagcggaagtataactatttggcgaaatggagtgtctgatctatggagcgtttcgccttggcagcggcggtggtgctgggctttgcccttacggcagctttgtgcagcctgtttgtgccgctgcggcgggtgttggaacgccgcgaacaacaacagcagccggtacagtctgagcagccccggcctgcacccctgcgcgccccgctgtggggcgggctgtgtgcggcggcgggcacggtggctgcggtgggtgtgggctggcttgccgcctgcgtgggtcagccggagctgctgggcagcgagggccggttgatgacacggctgctcacggcgctggccggaagccttgcctttggggcagtgggtcttgcagaagatgttgcccggatgcgcagcccggcggcgctggggctgcggcgggacgtgcggcttttgctggaagcactggctgcggcctttgtccttttgctgctgcgggcagcgggctgtctgccccgggggctgggcgtgcccggggcggggtatgtgctgctgggcagcgccgtgccctttttgtgggcggtgctcatggtggcactggccgagtgtgcccgcatcgccgagcgggacgagggcgcggtgtgcggtgcggcctttgtggccatgctggcgttgatgatggtagaagccggtctgggcgtttccgggctggcggtgctgcccgccgcgcttgccggggcactggtggcactgctgctgtgggcatttcccccggcaaggctgggtgcgggctgctgcggcagcctgctggcagcgggtgccatcggctgcatcccgctcagtctggacatgaccagcctgaccgtgccgctggcgctgcccttctgggcggcgggcggtcttttggcagcgcagctgctgtgtgcaaagcgcaccggcaagcccttgcgctgctgggtaaaaaagcataaaatgagcccggagacggtgtttctgtgcagctttgcgctgagcgctgtcggctatgtgctggcgctggcgctgctgcgctggtgctgaccgggcacagagagggaagggagcgcagatggcgactatccgcaaaaaacacagagcgccggtgtcggtgttccagcgagacccgggcccgtggtcccggctgctgattgactggctggctacgctggctgttattatgatctttgggctggtgatgctgttcagcgccagctacaccaccggttacctgcgcatgggcgacagcttccactacatcaaacagcaggcgctgtgtatgatgctcgggctgggctgtatgttccttatgagctatgtggaccaccgttttctgcgcaagatggtggtgccgggctacatcatcgtgctggccatgctggccgtcaccctgaccatggcacccctgaacggctgccgccgctggatccgcttcggcgggcttacgctgcaatcctcggaggtagcaaagtttgagatgatcctgttcagttcccatcttgcggccaaagcgccgcaggtggagcggctggacccggagcgccgcatcctgcttaccccccgggagtggctgcgggtgcgggtgtggaagcagctggtggtgccggtgctgccccttgtgccggtggtcatcctgctggcgctggagccgcatatgtccggcatcgtgctgacggtggcggtggtgggcaccatcctgctgctgtccggcagcggcggtgtgctgacatgggcgggtgccatcacggcaggtgccctgctggaaacgctgctctcccatgtggactccatcccttacctgcaaaagcgtctggacggctggacgcaggatctaagcaagatgaccgaccagaccgtgcagagcctttacgccatcggctccggcgggctgaagggactggggctgggcaacagtgtggaaaagcagctctggctaccggaaagcaccaacgacttcatcttcagcgtggtgtgcgaggagctgggcttcatcggcgcggtgctcatcatcgtgctgttcgtgctgttcatcgtgcaggggctgctcatcgcctataaggcggagaacctgtactgcaccatggtgggcatcggcatcatggcacagatcgcgtggcaggtgttctgcaatatcgccgtggttaccaacaccctgcccaacaccggcatcagcctgcccttcttctcctccggcggcacaagcctgattttgctgctggcagagatgggcgtaatggtgaacataggccgcaacggcgagcgggtggcgcagcagcgggagcagatgcgtgcccagcgggaaaccgcccgcgccgagcgcgaagcagagcttgcccgcaagaccattgatctggcttctgcccgcgcagcccgcacagaacagtaaaaccgcaagcccgcccggccgcaggccgggcgtttataaggaggaatcaccatgcgtgttctcatcgcagccggcggcactgccggacatatcaatcccgcactggccattgccggtgctttgaaaaaggctgaccctaccgccgagatccactttgcaggccgtaaggagggcatggagtatcgtctggtcacacaggcgggctaccccttccaccacatcgagatcaccggcttccagcgcaagctcagcctgcacaacatcaagcgcaatatcattaccctgtggaatctggcgctctccggccccaaggccaaggccatgatgaaagaggtaaagccggatctcgtcatcggctgcggcggctatgtgtccgggccggtggtgcgctgcgccgccaaaatgggcatccacaccgccctgcacgagcagaacgccttccccggtgtgaccaacaagctgctggccccggatgtggatatcgtgtttgccgccgtgcccgccgctgtggaaaagctgggcgcaccggacaagacccttgtggtgggcaaccccgtgcggccggaggtgtttgtacaggccgcgaaccgcgaagccatccgcgcacagctgggcgcgggcgaccgcaccgtcatcctgtccttcggcggcagtctgggtgcacgccgggtcaacgaggtggtggcagacctctgcgcttgggagcagcacgagcacaagccggtgctgcacctgcacgccaccggacagtacggcgtacagctgtttgagcagctgcaaaagcagaaggattttacccccggcgacagccttgtggtaaaggaatacatcaacaatatgccggaactgctggctgcggcagatctcgtcatcagccgcgccggtgcgctgacgctggcagagctggaagccgtgggacgcgccgctgtactgatccccagccccaatgtggcggagaaccaccagtactacaacgccatggagctgcaaaaggcaggggcggctgtggtcattgaggaaaaagatctgaccggcgaaaagctggtgcagacggtggccgaaatgctggcacagcccggcaagctggccgaaatgggcaaaaacgcccgcagcctgtcggtggatgacagtctggaccgcatcactgcggcgctgctcaagctggtaaagaccccgtgatgcagacccggaataaacaagaaggaaggtgcgaatgatgcagcagaaccgtgaccgcaacggcagaccccggaacaccagaccctatgacctgaaccgggatgtggcgcgcacctctgcgccttcgcaggatcatacgccccggagcaccggcagcagccgctacggctacaacggcgagccgctcagccgcccgccctcccgcagtgccaacggcagtgtgcgctcctcccgggcggataacagcatccaattcccaacccagccccagtcccagacccgccgtccggcgcaagggcaggggagcaataccacccagtaccctgccggcagccgcccggcgggcagcagaccaaaaaacgcgaagtccggcggcaaacagcgccgcccggcaaacaatgcccgcagcgggcagaacagccggaaaaaccagaaccacccgaaccggcagcaaccggcaggcagccagaaccagcgtctgcgcccggcgcagactgccccgcagcaaagccctgcccgccgggaaaagcgcaaaaagcgcaaggtgacccgcgccaccctgcgccgccgccggatactgcgccgcctgaccgcctttgccatgctgctgtgcgtcattggcgcgggcatctacctgaccatgaccatgctgttccgcatcagctccattcaggtgcagaccccggacggcaagcaggtgaccgagatcgcgggctattccgcagacagcattttgcagcggatgggcgtgcagctggaagagaacattttcagctttgagcccggcgaaaaggctgctgtgctggagcagaatttcccactgctgggctccatcaaggtgatccgggactaccccaacaccgtggtggtgcaggtgaccgaagccgtgcccgcctacgcggtgcaaaacggcagcaagtggcttgtgatctcggacaaatggaagatcctgtccgaggaaagcgcccagcccgaggggctttgcaccctgtacggcggcaagctgcaggataccgccccgggacaggcgttctgccttgtggaggatgcggacgcagcaagcgtctccgggtcggaagcagccgggagcgaaagcacggcggacacaggggatgcccgcatggaagctctgagcaccttggtgagcaagctggaagaatacggcctgtcgcaggatgtgacacggctggaagtggcagacaccgaacagatcgcatttttgtatcaggaccgcatcagcgtgctgctgggtacgctgaacgatctggattataagctggaccgcgcccgctatgtgctgaccaacgccgacggtaagggctgcggccccaccgacaccgggcggctggacttcagccataccagcgccagcagcacccgcaagatctattttgcacagggcgagcctactctgccctccggctatgtggtgccgcccaaggttgaggaacccgccccggcagaggacgccgccgacagcaccgacagtgcagaaagcacggaaagcgcggatgctgccgacaccaccgaaccggcagctgacgcggacaccgagcagctgcccctgacccaccctgaccgcatgacggccaacgaagaagaaaaccccatgtaaagaagctttttggaggagactgtatgaagctggaacaactgatggaaggcgtgccctttacccttgtgcagggcagtctggatactgagatcgcagatatcatctacgacagccgcaaggctgccccggggcttttgttcgtgtgcatcgtgggcacccagcgggacagccacgcgtttgctgccgactgtgccgccaagggggtcagcgcgctggtcatccagcacgacatcgacctttccgccatgcccggggtgaccgtggtcaaggtggagaacagccgctatgccatggcactgatgagcgccaacctcttcggcaaccctgcccgtcagatgaccatgatcggcgtcaccggtaccaagggcaagaccaccaccacccacatgatcaaaagcgtgctggaggccgcaggccgcaaggtaggcatgatcggcaccaacggcatctactatatgggacgccacaaggacaccgccaacaccaccccggaaagctacgagctgcaaaagaccttccgggagtttctggatgccggctgcgacaccgcgctgatggaagtgtccagtcagggtctgatgatggatcgcgtggcgggcgtgcactacgatgtgggcgtgttcaccaacctttcgccggatcatatcggccccggcgagcacaagacctttgaggagtaccgcagctggaagggacagctgttcaagcgctgcgatgtgggcgtggtgaacatcgacgacgagaacaccgccgctctgctggagggtcatacctgcaaattggtcacctatggccgcgatgaaaaggccgactaccgcgagaccggatacgagctgctgcgcacccacgattttctgggcgttgccttccacgttaccggcaaggacgagatggacgtcaaggtgaatatgcccggcgagttcagcgtgtacaacgcgctggctgcgctggccgtgggcaaggtgctgggtctgccggatgccgccatccacgatggtctgggcaagtgcgtggtgaagggacgcgtggagcttgtgcccatcagcaaaaagttcaccatcctgttggactacgcccacaacgaggtgtccaccgagagcctgctcaccaccctgcgtgcctacaagccccaccgtctggtggtggtgttcggctgcggcggcaaccgctccaagctgcgccgttacggcatgggcgagatctgcgccaagatggccgatttctccatcctcaccgaggacaacaaccgctttgaaaaggtggaggacatcatcgcggatatccgcgagggcatgaacaagggcaacccggacgcaaagttcgtggagatccccgaccgtctggacgctttgcactacgcagtggatcacgcacaggagggcgatctgatcgccgtcatcggcaaggggcacgagacctaccgcgaccgcgagggcgtcaagacccccttccttgagcgggagctgctggaagaatacgcccagcagatcgggctggaataagaaaataatattattattgcgggaaaagccgctgcacaaagcactgtgcagcggcttttttgcgtcctgtgcagggggctatataaaaaggaagcaaactgtgacaaaagtgtaaaagataaaaatatttaactaaatccattgacttatccgacgaattggctataatggtcgtgttcgatacctcataacttttaggtaaataattaaaaacaaccatagaacataaaggagaacactaccatgactttcgaggaaatgaagaagatcgttgtcgataccctgagctgcgatgaggacaaggtgaccatggaggccagcctgaccgaggatctggaggccgacagcctggacgctgtggagctgaacatggcactggaagaggcctgcggcgtgtccatccccgatgaggaactggcaaccctcaagaccgtgggcgatatcttcaactacatcaatgcccatgtctgaggctgaccgaggcgaaacgcgatgaacagtatcaaagacctgctgccgggcagtatgcgggagcgcaccttccagctgaaagcccggcgggatgcgggtgccgtgtggaacgacccgcagttcgtggaatgcaaaaagtgcggacgccgcgccacccgccagatctggaacaaggcgcagtacgtctgccccaactgcggggtgcacctgcccatcggcgggtactaccgcctgaacctgattttggacaagggcagcttccgggaattggatgccgaccttgcaccgcaggatgtgctgcagtttcccggctacccagaaaagctggaagcacagaccggcaagaccggcctgaaggaagccgtcatcaccgccacggggcgcatcgagggcaccccggtggtggctgcggtgctggacagccggttctttatgggcagcatgagcaccactgtgggcgaaaagatcacccgcgccgtggagcacgccaccgcaaagcacctgccgctgatcatcttttcggccagcggcggtgcccggatgcaggagggcattttcagcctgatgcagatggcaaagacctctgccgccatcgagcggttctctgcccggggcgggctgtacatcagcgtgctgacccaccccaccaccggcggcgtgaccgccagctttgccagccttggcgacatcatgctggcagagcccggggcgctgatcggttttgcgggcccccgggtcattgaacagaccatcggcgaaaagctgcccgcaggcttccagcgcagcgagttccagtacgagcacggctttgtggacaaggtagtgccccgtaccgaaatgcgcgaaacactggcgcagctgctgcgtctgcacgcctgaggagggagcgccttatgatcaaggacatcttacaacagctcgcaccgctggatgaaaagatcgccgccttgcgcggcgacccggcggacgagaatatgaccgatatcaccaaccacgctgccgagctggcagagctttccgcacaggaggacgctttgctgtccggctgcggggcactgaccgcagaggacagggtctttctggcccgtcacccggagcgcccccacatcgatgagatcgtggatgcactgttcaccgacttttttgagcagtgcggcgaccgccagtgcaaggaagatgccgccattctgggcggtgtggcactgttccacggccagccggtcacggtcatcggccaccgcaagggcagcacgctggaagaaaacctgcgctgcaactttggtatgcccgggccggagggctaccgcaaggccctgcgcctgatgaagcaggccgaaaaatttgaccgtcccatcatcacctttatcgacaccccgggtgcgtaccccggcaaggatgccgaggagcgcggacagggcgaagccattgcccgcaacctgatggagatgagcggcctgaccgtgccggtgatcgcagtggtcaccggcgagggctcctccggcggcgcgctggcgctgggtgtggcaaaccgcatcctcatgctggaaaacgccgtctactcggtgctgagccccgagggctttgccagcatcctgtggaaggattcctcccgcagcggcgaagcctgcgagatcatgaagctgaccgcgcaggatctgtacaaggacggcatcgtggaagagatcatcccggagccggtgggcggcgcacagcgtgcccacggggtactgttcggcaatctggacgaggcactgcggcgtcagctgcgcagccttgaccgcatgaacggccgtcagctggccgagcagcgctaccagaaattccgtcagatcggagaaatgaggaaagcatgaagggtttgcgtctgatcgccaccggcggggctttgcccggccgcacggtcaccaacgaagagctgagccgcaccgtggataccagcgacgagtggatcaccacccgcaccggcatccgcacccggcactactgcaccgagggcgaaaacgccgccacactggccattgccgccgcaaagcaggcgctgcagcgcagcggtcttgccccggcagacattgcctgctgcgtctgcgccaccctttccgcaccggatgccaccccaagcgtggcctgtcaggtgcaggcggcgctggcactgccggaaaaccgccccgcactggatgtgaacgccgcctgttccggctttttgtacggcacggcggtggcgcgcggcctgctggctacgctgggcgggcagtacgcgctggtcatcggcacagaggcgctctcccgcctgatggaccccgccgaccgctccacctgtgtgctgttcggcgatggagccggtgcagcggtgtttgaactgaccgacacctcggtgccctttgccatcacgctgggtgcccggggcgatgccgccatccatgccggcggccccagccgcgcaggctcggcacccatcagcatggacggcagggcggtgttccgctttgcggtggatgccctgcccaagtgcctgcacaccgtgctggacgagaccggccttacgctggacgggctggactgggtggtctgccatcaggccaacagccgcatcatcgaccactgcgtcaaggcgctgcacgccgacggtgcaaagttctacaaaaacatggatcgccacggcaacaccagtgctgccagcatcccggtggcgctgaacgagctggctgaaagcggccagctgcaccccggccagacccttgcctgcatcggcttcggcggcggcctgacatggggcggcatgatcgtggaatataaaggataaagaccatgaaacttttaaacgagatcttggggacgaaataccccatcattcagggcggcatggcaaacattgccaccggcgagtttgccgccgcctgctccaacgccggtgcactgggcatcatcggtgcaggcggcatgaatgccgataccctgcgccagaacatccgccgctgccgggatctgaccgacaagccctttggcgtaaacatcatgctcatgcacccgcaggcagatgagtttgcccagatcgtggtggaggaaaaggtcgccgtggtcaccaccggcgcaggcaacccgggaaagtacgttcccatgtggaaagctgccggcgtcaaggtgatcccggtggtggctgctgccgtgctggcacggcatctggagccgctgggcattgacgccgtcatcgctgagggcaccgagagcggtggccatgtgggcgagatgaccaccatggcactggtgccgcaggtggtggacgcggtcagcgtgccggtcatcgccgcaggcggcattgccgatggccgtcagctggcggctgcgctggcactgggcgcttgcggggtgcaggtgggcacctgcctgctggcaagcgaggagtgccccattcaccccaactacaaggccgcgctgctcaaagccggggacagtgacaccatcgtcaccggacgcaccgtgggtgcgccggtgcgtgtgctgaaaaaccgcatgagccgggagtatgtccgtcaggaaaaggcgggcgcggataagatggaactggaaaaatacacgctgggcagcctgcgccgcgccgtctttgagggcgacacggtaagcggcagcctgatggccggtcaggtggccggaatgctgcacgaggtgcgccccgtggcggacatccttgccgacctgtggcagggcgggaggcagcgcatcgccgcgctgaacaccgaatgctgacccttggcggcaagcccctgcaagtacccattttgcagggcggcatgggcgtgggcgtctcgctgggtgggctggccggtgcggtagcggcctgcggcggcatggggtgcatctccaccgccgatgcaggttaccgggagccggattttgcccgtgacccggcggcagccaaccaccgcgccctgaccgcagagatccaaaaagccaaggccattgccgggggcatgggtctggtggccatcaacgccatggtagccacccgggactatgccgacgccatccgcaccgccgtggcggcgggggtggatgccgtggtctccggtgcgggtctgccgctggagctgccgggcatcgtgggcaccaaagaggtggccattgcgcccatcgtatccagcgcccgggcggcaaagctcatcctgcgccgctgggcaaagggctttgaccgcaccgccgattttgtggtcatcgagggctgcaaggcgggcggacatctcggctttgccgaggaggacctgctggccgaccgctgccagaccttggacgaaattctgcccggggtgctggccgaggtaaagccctacgagaagcaatacggccacgccatcccggtattcgtggcgggcggcgtgtacactggtgccgacatggcacactttacaaagcttggcgctgcgggcgtgcagcttgccacccgctttatccccacctacgagtgcgacgcctcccagacctataaggacgtgctgctggcggctaagccggaggatgtgcgcatcatccacagcccggtgggaatgcccggccgcgccctgaacaccccgctggtgcaggcgctggccgagggcaaacgcttcccgcccaagcactgcgcccggtgtcttaagacctgcgaccccgctgccgtgccctactgcatcacccacgccctcatcgaggcggtgaagggcaacgtggaggaagggctcttcttctgcggcgaaaacgtgggcaggctggaccggatgcgcaccgtgcgcgagctgatggacgaacttgtgaccgaatggaggcagaacttatgaagcttgccgtactttacgccggtcagggtgcgcagcaccccggcatgggcaaggaattttacgaagcatctcccgccttccgggcggcctttgacagcgcagcgctggattttgacctgcaccgcgtctgctttgaggacccggacggcgttttgaaccagaccgaatatacccagccctgcatggtggcctttgcctgcggcgtgaccgctgtgctggccgaaaagggtgtaaagcccgcctatctggcggggctttcgctgggcgaatactccgcgctgcaggcagccggggtgttcaccgcaaagcaggccatcgagctgaccgccttccggggcaaggccatggccgaggccgcaaaaggccttgattgcggcatgaccgccgtgctggggctggacagagaaaagctgtctgcctgctgcgaacaggcggcagaggcgggctgtgtgcagatctgcaactacaactgcccggggcagctggtcatcggcggtgaaaaagccgctgtggagcaggctgccgcgctggcaaaggaagccggtgcccgccgctgtatcccgctgaaggtcagcggccccttccacacaaagctgatggctcccgcaggggatgcgctggcacagcgctttgcgggtgaaaacttcggcaccatggagacgccggtgctgttcaactgtctggggcatgaaaaggccgagaccgacagcatcccgcagctgctggtaaagcaggtgcagagcagcgtttacatggaagataccctgcgccgtctgggcgagttgggcgtggaccacattctggaagtcggccccggcagcgccctgagcggttttgtgaaaaagaccctgcccggggtggtctgcaccgcagtggagaccccggaacagctggatgcggtgctgaccgcatggaaggaagcagaatgagcgaagaaaagctgacccgcgccgccattgttaccggcggcagccggggcattggccgcgcagtgtgcgtggcactggcaaagcagggctgcaatgtggtggtgaactactgccacggcgcagagcctgcagaacagacggcagcgctctgccgcgccgagggcgtgcaggcggtgaccgtacaggcggatgtatccaccgctgagggctgcaaagcgctgttcgatgctgccgccgaggcctttggccgggtggatgtgctggtgaacaacgcgggcatcacccgggacaacctgattttgcgcctgaccgagcaggattttgacgcggtgctggacaccaacctgaaaagcgcctttctctgctgcaaggaagctgcccgccgcatggtgcgccagcgctatggccgcatcgtgaacctttccagcgtggtggcgctgcgcggcaacgccgggcagaccaactacgccgccagcaaggcggggctcatcggcctgaccaagagccttgcccgggagctggctgcgcggaacgtgaccgtgaacgcggtagcgcccggctttatcgacaccgacatgactgccgtgctgccggagactgtgcgcaccggcatgacgcagggcatccccgcaggccgcgcaggccagccggaggatgtggcgcaggcagtggcgttttttgccgcagaacaaagcagctatctcaccgggcaggtgctctgtgtggacggcggcatggcaatgtaaaggagaacccttatggaaaaacgcagagttgtgatcaccggccttggcacggtgaacccgctgggcaacaatgtggctgacagctgggcggcagcccgtgccggtaaatgcggcatcggccctatcactcagttcgataccaccgacttcaagtgcaaactggccggtgaggtaaaggattttgaccccgagaccgtggtggacaaaaaggaagtccgcaagatggcgcgcttcaccctgctggcactgggcgctgccgccgaagccattgcagacagcggcatcgatacggaagccgagggcaaaaacatcggcgtcatcctgtccagcggcatcggcggtctgcccaccattgaggagcagcacgcccgcggtgaggaaaagggcatggagaaggtaagcccctactttgtgcccatggccattgccaacatggcagcggcgcaggtggctatccgcttcggcctgaagggtatgtgcacctgcccggtcacggcctgcgccggcggcaccaacgccgtgggcgacgccttccaccgcatccgggacggctacgagccggtgatggtctgcggcggcgcggaaagctgcatcagccccttgggcatcggcggctttaccagcatgaaggcgctttccaccgccaccgacccggacgctgccagcctgccctttgacgcccgccgcggcggctttgtcatgggcgagggcagcggtgtgctggtgctggaggagctggaacacgcaaaggcgcgcggcgcacacatctacgccgaggtggtgggctacggtgccaactgcgatgcctaccactttaccgccccggctcccggcggcgcaggtgccatcgactgcatgaagctgaccttggcagatgcagatatcgcaccggagcaggtggaccacatcaacgctcacggcaccggcacccacatgaacgatgcctgcgagactgctgccattcacgccgtgttcggcgcacacgcaaaggagatgaccgtggtcagcaccaagagcatgaccggtcatctgctgggcggtgcgggcggcattgaggccgtgtttaccgcgctggcgctgcgggatcagttcgccccgcccaccatccactacgcccagcccgacccggagtgtgatctggactatgtgcccaacaccgggcggcagcaggagatgcagtacgcactgagcaacagcttgggctttggcggtcacaacgcctgcatcgccctgcgcagatgggagggctgacccgtggcagaaccccgtaccgtgcgtgaaaacgccaacaccctgagcagtgtgcagattgcagaaattctgccccaccgctacccctttgccctcgtggaccgtgttctggactacgagccggggcagtgggccatcggccgcaagtgcgtcacccgcaacgaggaatttttcaacggccacttcccggcacagccggtcatgcccggcgtgctgctgctggaagcgctggcacagaccggcgctgtggcagcgctgagtctgccggaaaacaagggcaagctggcgctgttcggcggcatcaagagtgcccgcttccgcaggcaggtcgtccccggggatgtgctcactctgcactgtgaactggtgcagcagcacggcgctgtgggcgtaggcaaggcttcggcatgggtggacggcaagtgcgccgtcaccgcagagctgacctttgtgctgaccgacgcagcagaataaaaacagaaaacgctcccgttcatcccctgtggcgatgaacgggagcgtttgatttacaaagcgcttacagcttcttgccggtcagcagctcataggcttccagatacttggcaatggtcttgtcaatgacatcctgcggcaggtcgtagttgctgtcgggattggccttcagccagtcgcggacaaactgcttgtcgaaggagggctggctgtgacccggctcgtagccctccagcggccagaagcgggaggagtccggggtcagcatctcgtcgcccagcaccacgttgccgtcctcgtccagaccaaactcgaacttggtgtcggcaatgatgatgccgcgggaaagtgcgtactcggcgcacttcttgtacagagcgatggtgtagtcgcgcagcttggtagcgtactccagaccgtggccggggaactgcttttccagcacgtcgatgctctgctcgtaggagatgttctcgtcgtggtcaccgatctctgccttggtggagggggtgtagatgggctcgggcagcttatcggactccttgagaccctcgggcagctggatgccgcacaccttgccggtcttttggtagctggcccagccgctgccggtgatgtagccgcgcacgatgcactcgatgggcagcatggtcagcttgcggcacatcatgctgttgccggtgaactggggctgacggaagaactccggcatatcctgcacatccacgctcagcatatggttgggcagcagatcgcgggtataatcgaaccagaacttgctcatctgggtgagcacggtaccctttttggtgaccttgtttttcaggatgacgtcaaacgcagaaatgcggtcggtggcaaccatgatcaggctgtcgccattgtcgtagatctcgcggaccttgccttctttgatgggtttgaactcagtcataatcaaacactccatttttccatgttctcggcagcgcagcagcgcggcgcagttcttaccctactattctaccatactgccgcgcggtttaaaaggaacagaataaaagaaaaacgggcaagttttgtgtttttatcgtgaaaagtgcgcaaaaaacagcaggaaatttcggcgttttgacgataaaagtcgtactttatccccaaatgcacgcacctttgcaaaatgcagtcatggacaagcgccgccgattgcggtatcataagagtataagagaacgtgtgcccctgcaagggggcacgacagcagatgaggaggtaaagagtatgggcaaatttcccaagggctttttgtggggcggcgctaccgccgccaaccagtgcgagggtgcatggcaggcagacggcaagggtcttgccacggtggatgtgacccccttcggcccggatcgtttcccggtggcaacgggctatatggagatgctggattgtgacgatgcgcatttctaccccagccacgaagccattgacctatatcaccattataaagaggatatcgccctgtttgcagagatgggcttcaagtgcttccggctgtctattgcatggacgcgcatcctgcccaacggcgatgacgcccagcccaacgaggcggggctggccttctacgacagcatttttgacgagtgccataagtacggcatcgagccgctggtcaccatctgccactttgacacccccattgcgctgatcaaaaaatacggcggctggaaagaccgccgcatggtggacgcctacgtccactactgcgaggtgctgttcgaccgtttcaagggcaaggtgaagtactggctcaccttcaacgagatcaatatgctgctgcacctctcctttaccggcgcagggctggtgttctatcccggcgagaacgtggagcaggtcaagtatcaggctgcccatcacgagctggtagccagcgcaaaggcggtaaagctggcgcacgaaaaaatgccggacgccatggtgggctgtatgctggcagcgggacagttctacccccgcacctgcgccccggaggatgtgcgggcggcgcaggaagccgatcgggacaactacttctttaccgatgtgcaggtgcgcggcgcttaccccgtgtgggctaaaaagcggatggagcgtgccggggtgcagctgcgcacccagccggaggacgaccgcacgctgcgggagggcacggtggattttgtgtccttcagctactattccagccgctgcatcacggtggataaagaactgatggcggcagaaaatgcggaaggcaacgccgtgtcggcatcggtgaagaacccctacctgaaagccagcgagtggggctgggccatcgacccggtgggtctgcgggtgacgttgaacaccatctacgaccggtacgaaaagcccatgttcatcgtggagaatggtctgggtgcggtggataccgtagaaccggacggctccatccacgacagctaccgcatcgattacttgcgggcgcacatcgaggagatggaaaaggccgtcaacgaggacggtctgcccctgatgggctacaccacatggggtcccatcgaccttgtaagcgcttccaccggcgagatgaaaaagcggtacggctttatctatgtggacaaggacaacgccggcaacggcacccttgcccgcagccggaaggacagtttttactggtacaaaaaggtcattgcttcggacggcgaggacttggcttgagccaacgccccggcactgtttgcggaacagcagcgccggggcatccatgtgtgaggacgaaccgataacggagaaaatttatgacaccacaaatcattgcacaccgcggtgcttcctatcttgcaccggaaaataccctgaccgcctttaaaaaagccatggagctgggcgcggacggtgtggagatggacgtacagcagaccagcgatgccgggcttgtgatccaccatgactatatgatcgatctgcacacggatatttccggtaagatctacgatatgaccatgggcgatctaaagacgctggatttcggcagctggaaggacgtactgttcaaggacgagaagatcgctaccctgcaggaggccatggagctgtgcaggcagatgccggggtgcaccgtgcatctggagctgaaatccaccatggacaacgacccggactttgtgccccgggtgctggaggtactgcagcagaccgagatggtggagcaggtgatccttgtctccttcaaccacgcgctgctgcggcaggcaaagcagctgctgccggaactgcgggtaggcgcgctggtatacggcgagctggaaagcctgctgctgccgccgcccattatctggaaggatctggggctgaccaacggcatggacgaaatggaagctatggataccgccctgccggagagcgcagcagatgaggaaaactgcagctggatgacccgctggatgagcgacaaggtaagtatgctgcgggcaagctttcccggcgagagcctgaacgagatctacaagaacttgatggcgcagcgggatctgcccgcctatatccgcagtctggactttgtgccggagtgggtcagctgcgagtaccacactgcctacaaaaacgccggtttcattgacgaactgcacgagatgggcatcaaggtgtctctgtggacggtggatatggaagataccgtccgcagtctgctgcgcaccagcgccgatgcctacatcaccaaccgtcccgaccgtgtgcgggaatggatggaaaaggagcaggcagcaacggctgccggcaaataatgtcaagcaaaaaacaccgtcgtgcctgcgggcacgacggtgttttttgtgtaatgcgccgttattgctgctgcaccagctcgatgaacacgttcatctgcggggtcacccatttatcccggtggtagaacagctgccggtgcatcatgacggtgcagtccggcacgttcagccgcgccagacgcccctcggccagtgcgctgcgcacgatatactccggcaaaaaggaaagccccatgccctgctccaccatctggcacagcagcgcggcgctgcccagctccagataggggtggatggcaagaccgtgcgccgccatgcactggtccagcgcgtcccggtagctcatgccccgctcggtaagcaggaattcctgccggggcagaagatccagcgggatgatgctttcctgcgccagcggatgctgcggcggcgcaatgaagcacaccggctccggtacgtctgccgccagcaccagcgcaggctgcaaaaggggctggtccagcgtgtagacaaggtctacctgattggtgctcagcaattgcagcatctcgtccgtggaagcggtatgcagcaccagttccacctgcgggcagcgggcgtggtagcgctgcaatagtcccggcaaaaaggtgctgcatacggaatccgccagcgcaatgcgcaggctgccccgcacctgctgggcgggctgcaaggcggcctgcgcctgctgggcagtttccagcagggtgcgggcgtagcgtaaaaaggtctggccggcatcggtcagacgcaccgtcttgcccacgcggtcaaacagcggggtgcccagttcggcttccagctgtgcaatttgggaggacaccgccgactgcgagtagcccagctgccgcgcagtgcgggaaaagctgtgcagctcggcgatgtgcagaaaggtgttgacagtccgcagttccatgaacagctccttttataacagggtgatgtcccgcacggtgagctgagcaccgtccacggtaaaatgcacctccagcccggcaaactccatgccgtacacccgctgcgggtcgtgctggtaggaggggcgggggtcactggcaagcacgccctgcagcgcggcgcggtcggcttccggtacggtctgccacagcgcttcagggcaggacacttccagatggtgggcgcgggtctgcccggtaaagccctcggcggcgtccgggtggcagtcggcgtaggggatatagggcttgatatcgtagatgggggtgccgtccatcaggtcggcaccgcgcacgatgagcaccggccccacgtccgggcgctgctcaatggcctccagctttacgctggaaagtcctaacggattcggccggaagggtgaccgggtggcgaatacgcccacccgggtgttgccgccaaggcgcggcgggcgcacggtaggggaccagctttcccgtactgcgccggaaaactgccataccagccagatgtggctgaaatcctctaacccgcgcagggcatcggggttgcggtattccggggtaaagatgatctcgccccgcagctcttctaccagcccgctctggcgcgggatgccgaacttggtgggaaaggcggtatggatatgggcaatgaccttcagggtcatggcttcgggtgcctgctgcatgatgaactccttgctcaatagatcttttcaatgggacagtcggcggggatgccgtaccggctgcggaaggcctgcaattcctgcgggctgcggatcagctgcacctcagtaaaatggccggtgtgcagatcctgaaacccggccacctgctccccggtgcagatgctgcaccgcagcaccggtttctgggcggtggggtcgtaggagggggacattttctttttgccgaacacaggctgctcctttctctccttatcttataagccgcggcaaagtcccacggctttgccttcgatgtgcagctccgaaagctgctctccggcgtagaacatgggcgggcatacggcggcgttgtccgccagcagcatcacggcatcgccctgccggtggaagtgcttgagagtggcttcctcgcccacccgcacggcggcgatctcgccctgctccacctcgggctggcagcggatgcagacgatgtccccgttgcatattgtgggtgccatgctgtctccgtggcaggtcagagcaaaatccgcgtgccatgcggcaggcaccccgatatagcactcaatattctgctcggcggtgatgggcgtgccgcaggcgatggagccgatcagcggcacctgcaccatggcaggcagcggctcaaatcccgggggacaggcgcagggtgcacccagccccagcagggcggcgggggtggtctccagcgcctgcgccagttcctctaccttggactggggcaggtcgttgatgcctttttccagcttggtgatagaggaacgggagcggtagcccatgcgccgggcaagctcctcctgcgaaagacccagctgctcccggcgcagacggacacgggtagatagatcggacatggcagttctcctaaaaacaatgcgttgtaatgtgcgatagaatgttctaggttgagtatagcagaaaatttcctgaaaatcaacaattcccgcgcgttttgggaattttaggttgacaacaaatcaacaacggagtataatacaaccaatgattgttgcaaatgcggtgaactacaaaaaaggagcgaagccatggcaaacacaaacctgatctacacctacatccaagacagcggctacaagctgcagtatgtggccagtgtgctgcacatcagcagcaacaccctgcggcacaagctgctgggcgagacccagttcaagctggacgaagccgagcggctttccaccatgctggggctgacgatggccgagcgggacgcctgttttttcgatgccgagaaccggttctcgcgcagtgcagcgctggaactgcccaaaagggggaagcgccagtgacgcaggaacaacgaaatctgacccggaacgctctgcgcaggtacggcgagcgtcactgggcgcgcacgccggaaaaccgccgctggcaaagcgccattgatgagggcatcgactactatcaagcgcacgaccccatgcgggcagacctgctgcggatgcgcttttttgagcggcgaccggaggacgagatcttagagcagctgcacatcggccgcaccacctaccagaaggcgctgcaggatcttttgagcactatcgccgtctacgccgcccagcgcggcgcgttctgaacggaaataacagtgaaaagtgccccggaaacgctcacgggcgtttctggggcacaaacgtataataaaaaaaggaaaccttcccataaaacagggctgctgcaccgtgtttcgtgcagcagccctgttttggttatttctttttagcgtccggatcctcgcaatggctgtggcaggaggcgcagttgccgctgcagccctcgcccttccagccgccctgtctggagatccagaccacagccagcgcaaacagcacagccaatattaccagcgtgatgatcccgcgaagagtcagcatattcatccctcgatttctcttatgcagctttctgcccccaagtatacacgatttgcaggcaaagagcaacaacctgccgcacatttttttgtgcagggcgcagcagcagctgctgcccggcggtaatgttgcacgcccggagcacggcatggcatttttgcagccagaaaaaaggtttcgaaaaaagtaaaagtttttcaaattagggcttgcatttcggcaaaggccgtgctataataatcacgttccagttcggaacgcacaacacaagcgaatatggaggattagctcagctggttagagcacctgcatcacacgcagggggtctggggttcgagtccctaattctccaccaaacagttcgtactcgaacccgagagggttcgggtgcgttttttgtttatcggagggtttgcctgcgcaacagagcggcaaacaggcaaaggcagggcatcgcgcacgacacatattataaacaaagcaggggctgctgcacagggaagaaaccttgtgcagcagccccttatattatatgtagaaaggatcagtctttcttctctgcggtgcgggcaaagaagttggcaaggacagcgccggaaatgttatgccacaccgagaacacagcgccggggatggttgccagcggatactgtgcaaagtgggcagcggccagagaggtggcaagaccggagttctgcatacccacctcgatggagattgcgcggcacttggtggaatccagcttcagcagcttgcccacgccaaaaccggtgaggtagcccagcaggttgtgcaggatgaccacggcaaggatcagcaggccgctggtcatgatcttagcggagttggcagacacaacggcgcagatgatcagcacgatggcggtggtggagatcagcggcagcacccggacggcgttctgggtgaaggcgtggaagaagtggttgaccacaaagcccagtgcgatgggaaccagcaccaccttgacgatggacaggaacatatttacagggttcacatccacgcgctggccggcatacagcagggtgagcagcggggtgaggaagggtgccagcacggtggaaacggcagtcatgccgacggacagcgcaacgtcgcccttggaaaggtaggtcatcacgttagaggaagtgccgccggggcaggtgcccaccagaatgacgccgatggccagctcggtgggcaggtggaacagctgggtcagcgcccatgccagaaagggcatcagggtgaactgtgcaatgcagccgatgatcacgtccttcgggcggctgaacaccaccttgaagtcctccggcttcagggtaagacccatgccgaacatgacgatgcccagcagggtgttgacccatgcggtctttaccacgctgaagggaccggggaacagcagcgccagcgccgccaccacaatgacgatgacggccatgtacttgcccacaaaatcgcttactttttccaatgttttcatgatgatactcctttttcctgaacacttatttttgcggatgtaaaggcaatgaaacatccgggaaatggctttcccgcaaacaaaaacgcctttgtcccttacggttcgtaagagacaaaggcgtataaactcctctgcggtaccactcttattgccggtgcaaagcccggcccctcagtgcgcatccaacaatgcgcggctcgtgataacggaagcctgccgttcccgcttactggggcgtatacaccgcccattcagcaggaaagctcggagaggatcttcccacggacgccctgcactgccttgcaccagccggcagctctctgcagcattctttctgggtactctttctcgtcatagccgaatatttcactgccacggagtatactccccctaaagacggaagtcaagggatgcggcctgtctgctttttcacctgattcacatcaaaggtgaacgcagctcatgctgtgctgccttgccatgggctgcgccgcgcagcgcggtgtagattgccaactttttacaaataaagtaaaaactgccggttgctatataaaagtaaacgatccaagattacatttacagacacaatcgcagaagtagaagcaaatgcggataccggggatatccagaaggtgaaagttacaaagaacattattccgaacaagaagaagctacaaatcaccgttagctc

SEQ ID NO: 851 - DNA, 9667 bp, unidentified
  source 1..9667: mol_type = unassigned DNA
atgtgtggaattattggatttacaggtaaattaaaagcccaggatgtcttattgacaggacttgcaagccttgagtaccgtggatatgacagtgcgggaattgcgtactttaaagataccggaaaaatttcacttcggaaaactgtcggaaaagtaaaagatcttcgtgcaatctgcgatgatgataacaattctacgtgtggaatcggccacacccgctgggcaacccatggtggcgttaccaatgccaatgcacaccctcataaggtcggacaggttgcattgatccacaatggtatcatcgagaactatcatgatctcgccaccaaatacgatctgacggatgaactgatttccgagacggataccgaagttgccgccgcattgatcaataaactctacgaaggagatccaaaagaagctctgcgcaaagcagtagccgaaattgaaggttcctttgccttctgcgttctgttcaaggatcatcctggtgaaatttatgcggtaagaaatgtcagccctatggttgcaacatactgtgatgacggtgcttttattgcatccgatctgactgcttttatcgcatacaacaagcgttatttcatcgtgccggaatatcatattttaactatgactgcggacggcattacgttagaagatttagacggtcattccgtagaaccggaatatatggaagtaaactgggatgttaccgcagcccagaaagatggttatccgcatttcatgatcaaagaaattcatgaacagccggctgccatcacaagaaccattaccccacgtatcaaagatatgcttccggatttttcggaagatgccattgcggattccttctttgaaaatgtaagcgacattacaatcgttgcctgtggtactgcaatgtacgcgggaatggtaggaaaaaccatgatccagaaccgcctgcatattccggttaccgtggcaatcgcatcggagttccgctatgaagaaccggtaatcaatgaaaaatccatggtgatcgttgtatcccagtctggagaaaccattgatactttggaagctcttcgccttgcaaataaatatacaaagaaaacactgtctattgtaaatgtaaaaggctccagcattgcacgtgaaagcagctatgtattatatacacatgccggtccggaaatcgctgttgcaagtacaaaagcatacaccgttcaggttgcttctttttacctgcttgcatgcaaacttgccatgacacagcaaaagatttctgtcgaagaggcacgtacatttgttggaacactgcaggaaattccaaattacatcgaggaagttcttgcacaggctcctgatattgaacagctgaccaaacgcatgatcaatgccaacaacgcgttctttatcggtcgtggactcgattataccctttgcatggaaggtgctttgaaattaaaggaaatttcttatattcatgccgaagcctatgctgccggtgaattaaaacacggaaccattgccctggtctgtgaaggggttcctgtcattgccgctgctacccagaaacatgtatacagcaaagttatttccaatatccgggaagtaaaagcccgtggtgcttatgtcattcttttgtccaaagacaaagaaatcacagatccttctatctgtgatgtacacatcaatcttccggatgtatccgacgaatttacgatttttgaatctgttgtaattttccagctgattgcatattacacatccgttggaaaaggcttaaatccggatcagccacgtaacctggcaaaatctgtaacggtagaataaaaaaaactgtcgcgcgaaaattcgtgcgacagtttttttgacatagagcctttctaaaatttttgaaggcaaaaaaagaaccccagaagctctctaaaagcctctgaggttgcccctgccaaggattctctcacccatgtaccggaatccttgtatcgtcggcgcgacaggatttgaacctgcgacctctgcgtcccgaacgcagcgctctaccaagctgagccacgcgccgtttcaactgcccaattatagtaacacattctccggtgtttgtctagtgaatttttttaatttatggtacaatataaaaaaagaacggagaagaacaatgaaacatactgctttgattacaggtgcatcccgtggaatcggtgcagccctggcatgtcgatttgccgctgaaggctatcatctggctctttgctgccataactcttatgaaacgctgcaggcacttgccacaaaacttgaaacaacctactccatacaggtgctttgcttccgtggtgatgtaggagactatacttttatctgtgacatggtgcaaaaaacactggataccttcggccagattgatgtgttaatcaacaatgccggcatctcttatatcggtctgctcaccgacatggatattaccgactggaaccggatagttgcgacaaacctcacatccgtcttttccacctgcagacaggtcatcccttccatggttcatgccaaatccggacatatcatcaatatttcttctgtatggggaaatgtcggagcttcctgcgaagttgcctattctgcatgcaaaggcgggatcaattcccttacacgcgctttgggcaaagaacttgcccctagcaatatccaggtaaatgccatcgcctgtggggtaatcgatacggatatgaaccgttgtttctccgaggaagaacgctctgcactcatcgaagaaattcctgcaggccggatgggatccccggaagaagttgcttcactggcatattctcttgccacagcaagcagttacctgaatggacagattctcaccttagacggcggatggatttaatttcttatctttttggaaatctttttccatttatttaagaattaaaacgcaatacgcgttttctctgttttttatatcaactttctataaaatcatttgtatgaaaacgaatgataaaaataaatacaaagattttggtgaccgtctgagtctgattatgtataaacaaaatatttccaatatccagctggcaaatgcaatgtttgtttcgccgtccacgatcagcggataccgtactggtcgtcgttctccgaccgttgcggatcttgcagccatcgtgcagattctgaatgtttctgcagattacctcatcggaaccagtgaaattacaaccagacccgataccaccgaaaaaaagagttgagcacgccctgtttccagagcggtgctcaactcttttttataaatcatgttctgccagtaaaattaccgtagaacgttccggaacacgcacacgtgtctgatctccctgtgtctgggcttcaaaatctgccccatcctggtattcacagaaagtatttactacaagtttccaatgataagactccggcaacgaaggcaggcgcatctccaaaggctcccaatacgcattcattccgtaaaagatcatatcatcatccgtatcatcggcatttcttcccgcatacatgattccaattaaatgtgtattatagtccgtataattccggttcggctctccgttatggatacttacggaaggtaacccgcagactgccggctttgtatcccttcgcagaatcggatgctttgcacggaaatggatcataaaacgggcaaaatcatgaatctcctgaaattcttccagtctgttccagtccagccaggaaataatattatcctggcagtatgcgttgttatttccatactgcgtattacaaaattcatcccctgcaaaaaacatagccggtccacggctgcataacaacgcggcaaatgcattcttcacaagcctgcgccgcaggctcataaccgccggatcatccgtctcaccttccaccccgcagttccagctcatgccgttgttatccccgtccgtattgttccatccgtttttctcattatgcttttcattatatgaatacagatcatacaacgtgaacccatcatgacaggtcagaaaattgacggatgcactatatccgcggcttgccggatcatacatgtcggaggatccggtgatacgtgtaattgcacgccctgctacgccactgtcgccctttaaaaagcttctcatatcatcacggtatcttccgttccattcggcccagcggttccaggacgggaaacttccaacctgatacaagccacccgcatcccaggcttctgcgatcaacttcatatcccccagaatagagtcaaatgcaagggcttccagaatcggcggattctccatcggtgcaccattctgatctcttcccagaatcgatgccagatcaaaccggaatccatccacccggtactctactgcccagtgccgcagacagtccgtaataaacctccgtaccaccggatggttgcagtttaagacattgccacagccgctgaaattgtaataatatccatccggtgtaagcatataataaatattgttatcaatccccttaaagcaaaaacatggaccgttttcatttccctctgccgtatggttgaataccacatcaagaatgacttcaattccattttctttcagttcgcggatcagacgctttaattcatcaccctcatgattatgctcctgatgaaatgcataacttgtattcggggcaaaaaaggaaaccgtattatagccccagtaattgtacaactgcacgccatccaccacacgggcactttccatttcatcaaattcaaaaatcggcatgagttctaccgcattgattcccagatctttcagatacggaattttctgtcgcaaaccttcaaatgttcccccaccttttacaccggaggacgcatctttggtaaatcccctgacatgcatctcatagatcaccagatcttcaaatttgtaattcagattccgataccgcccccagtcaaaatcactttgcaccacacgggctttatagacaaaatcctttccgccttccggtttttctccccagtttctctgaccggtaacagctttcgcatatggatcaagaagcgtatgttttctgttaaacagtaaccctctcgcctgatcggcaggaccgtccatctgataggcatactcaaaatcctctgcttttaagccaaaaacaaggatagaatacgtatttccaattttataactttccggaatgcggattcttgcatacggttcctgtgccgccggccggaataacagcaggacacaactcgtggcaccatgggagcttaccgtaaaacttaccccttcctctgtctgatatgcaccattcatctgataaaatcccggacgtacatcaaatccaccgatattatcgagtggatgaatgacttccccgagactttccatttcttcgtctatcggccagcttttctgttttgacggataattccaaaaacttgcattcatgtgctgattcctcttatcattattatttacttgccacataaaattatagtatccccctactcttccctgatgattaccctgccatttgcgtcaaatccgattttactgtacttttccgaatactcattcatatgatcaataatcgtctgttttctgtcgccttttgctatggcaggctgaaaattatttctttctgatgtggaagaaatgctgcatggtatcatatcggctgatatatctgtctgcagtaccccatccacaaaggtaaaggtctgttcatagatcgccgtatctttgtcttttggattcctgttccccccaaagcagaaatttccaagactgtagcagatcatttttccgttgtataattccattccctgcaatacatgaggatgtgtaccgaccagcagatctgctccccagtcaatcacctggtgtgccagcttctgctgataatcattcggataatgatccccctctatcccccagtggcaacaggcaattaccagatccgctccttcttcccgaagttttgcaatcccatcccggatataattggcatgtttttcatcagcggacagctggcttgcggagacaattccgattttgataccatccttcgtggtataggtatccacatgatcattgaatccgaagataatccctgctttatttaacacttccctggtatcatcaagtccctgctgcccataatcaaacgtatgattatttcccagacttgccccctccacagaactgtctgtcataataccaacatactccggttttccttttaagttccacgttttttccacacgctcggtcgcatttgacaacacacattccagattgatcagtgtaaaatcatcctgctcaaaaatacttctgatatttttaaaaaaataatcctgcccgtatttatcatagtattcatgaaaggaacctgcatacccatgcgtctgtgttgccccaagcgtacagtcacctgtcgccgtaatttttaccgtctgtatcaccggttcctgctgcgtttcagttgcagtcccggtttccgtttcttccagcgtacccggttcttccgtcatctgtgtctccgtgattttttccgtagaagagggcaaagccgatgacgttgctgcaggagaagaacatcccgtcagcaaaaatcctgccattaggattggcaatatccattttttcatacgttttcagactcctctttcacaagaatatccaccgtgtgaccgcttgcacccataagatccatccgttcacaggttgccagatgatactgcagaaacgcatcaaactcttcttccgtcagcgcatttaaaaacggacgcatataatttgctgcaccgtctgccgctatgatctgccggcgcctgacctctacctgccggtccaatgcttcaatatcttccagacgaaccatggaatacagaggattggcttttgaagtacagtgataatcctctgtgagcattccctcctgaagcgcctccagaatatgtttttccttaaacgcatacgtgataacggaaaattcattcataatatacgccacgagaatcctgcctccgggtctggtcaccctcaccgcctcccgcagcgcagcaagcttgtccttttcctcatgcaggtgatacatcggcccaaacaacagggttacgtcaaaggaatcatcggaaaattttttcagattcattgcatttccctgatatgcatgcactcctgcacccttctgtttcaggcgtcccagattatgctttaccagttccacggccgtcacatcgaacccttcctgtgccagcggtacgctgtatcgtccggttcccgccccgatatcaaggatatggatttcctcttttgcacgttctttcacaatttcatccagacactgatggatataatgcatgcttgtcacaaattccaccctgccgtgtcggctgtccagacgcttctcttcattaaatttattataataggcttctaagtctgtcatattttaatactaacacattttctttaaaatttcactcacaatcgctgatgcgacatccgctttgctcattatttccagttccctgcagtcatctgccgtaatcagcgtcaccacattggtatctgtaccaaatccggctccggctaccttcaggttattcgccacaatcatatctgcattcttttttgcaagttttgcacgggaattctccagcatatgttccgtctccatggaaaatccacacagaaactgtcccggttttttgtgcgcgcccagatacgaaaggatatcttccgtgcgttccatcgtaagagtggcatccccgtcttttttcttgactttttcatcgaccgggtgatccggacgataatccgccacagctgccgctttgataataatatcctgttgctctgctgtctcctttacggctgctgccatatccgcggcagatacaaccggaacgacctttacaaacggcggcggagtgattgccaccggtcccgtgatcagcgtcacttccgcgccacggcgcatacagttttccgcaattgcatagcccatttttccggtagagtgattcgtaatataacgcaccggatcaatcttctcctgtgtcggtcctgctgtgaccatcactttctttccgaccatgtccttttcgcaggcaagatctttcataatataagaaaacagtgtttccggttccggcattttcccggctccggtatccccgcaggcaagataaccactcgccggatcaatgatatgaaacccataatgctccagctttttgatgttatcctgtacgatcggattttcaaacatattggtattcatggcaggggaaacatacttcgggcattttgccgcaagaatcgttgttgtcagcatatcatctgcgattccgtttgccatcttgccgatcacattagcagaagccggtgctaccataaaaatatctgcacgctttgccagtgccacatgctcgacattgaactggaaattccggtcaaacgtatcgaccagacacttgttgcttgtgagcgtctcaaacgtgataggattaataaaattggttgcattttccgtcatgatcacatgcacatccgcatgctgcttgacgagcgcacttgccagataggcgattttataggcagcgatacttccggtcacaccgagtaccacacattttccttttaacattgtctcttactcctttgcagaaaaatcatatcttctgctattttatcacactttttccctaaaacaattgaatttttgtcatctgttccagtatggaatctttgacagaatcgttcagatatgctggatttaattttctttttgcatatgcaaggtaagaaccatttgtctcttcaatcaaaactgccgtaaaaaaccgctcccagctaaaatatgttttgctttccacatattcccacggcttttccagcacctgatctgcccatttgctttttactacttttgcctttaatatcagccattcaaatgactccggcaaataaagcaccacttgatcttttccaccaatcaactgcatcactctgtcaatttcagaaccaaatgccgcgccgtctgcaattacaagtatgcgttcatttttatgcatatttaaataatggaaaacatttgactttccattcattgtctcacatttcaattgctgttgcctacatacagaattaaaaaactgataaccggaattactgtcttccgttattacaacctctggtttgatatccttctctaaagtctgtgctccatatattctgtaaaactcatgataacacggttttaatgttccgtattttcctgaagtacgaattccatagatttcctccacgctatacggcaaagaaggcaaggattccctggaaacaatgacataataattatctgttttctgaatagtatctgcgaattctactgtcttgataaattcgtttccctcatcaataaatacaatactatcctgcattgctgataactgttctttccacagtgagccttcgagcacataacattttttgtcacacgtcagttccacaggggtcccggatggattgtttacgtattcccgaatcatatctaccaatgtggtttttccagttgcgctgtctccccggatgaccgtcagatttcttcgaatttcaaaatcatattttaagcgctttgttgatacaataattctatgttttcccttcat

SEQ ID NO: 852 - DNA, 25021 bp, unidentified
  source 1..25021: mol_type = unassigned DNA
ttatgccatatccggctgatcccataaaggcagttccacgccgataccttcttttaatgcattgcggtatacggtaccgccccaggcaatgtcctcaacaggcataccgcctaccgaatatacaatgatctcatcatcgctctcccgtcccggatgctttttattaatgatatcagcaatatctacaatatcttcccgctgaatccgtccttcgtgcagataatccgtaaacttggaacctatgatctgtaccatctcataactcggatacggaaattcctctgcccaggcttcatacagtttatagttatccaccactttcttgcagcggttgatcagaaaatcatcatcaaaccgtgcagccgagggcagacagatgagtgcaccttttttgacccagtcttctgcgatatatgggaaatcgatttcttttaccggtgcggtggaagtaacacagatgatgtcactgtcttttacggcctcttccatcgaatcacatacgatgacctgctgaatctgcggacattccttctttacgaactcttcaaatgcatgcagggaacgctgtcctcttcctttcacttttaccgtagtaatcttcgggcagacgcttaaaaaagccagcagacaggttcttcccataacacccggtccgataatggtaaccgtttcggaatcttttcttgccagatattttgccccgactcccggaattgctccggtacggtaacagctgacaagatttgcagacatcagtgccagtggcgccccggtatctttatcgttcaacatcatcatcagaatggaacgcggcagaccggaagctttattctcacagttacttccataccacttcattccggccatctggtattttcctccaagatatgccggcatcgccataaaccggcggtcgtctgcatttttcggcattccctcaaactgcggatcatccgggaaaatgacctgtgcaccgtgggaattatggttgactccggccatcacataatcgcctttgttcaatgtaaccagcagatcttccattgcctccacacactgatccatgttctttactccggccttgatcatatccggttcactcaaatataaaaatttaatcctggtatccatatgcatttcctccttatgttttcagaggtatggaatatcaaagcaaataaacaaaaaagacgccatagtatcacctactatagcgcctttgctacttattcgtgcttataatataccatactatctttttgattgctactcctgtattcttttttatacaacaatcctgctatcttagatcactgcctgaaaccggtcataccgcagttcatgcagatccagtgtggtttcttttcccatggccagttcggataacagttttccgacaatcggtgaaattccaaatccgtgtccggtaaaagcacaggctaacagcagtcccggcacttctttaaccggtccgagtaccggtactccgtccgcacacagatcttcatatccggcccaggtacggacaatctttgcatcggcaagttttggaatgtatttcataattccccggcagatgcacggagcagtgatacttgaagtaatcatatgtccattgtcacggttttctgcctcaaatccggaagcacctccgaatacaaaagatccatgattcgtctgatgtccatagaaatccgcatctgcggtaccaagcatctgtggaaacatctttggctctgcctccgtaaccagtgcctcgatcagctctttgcgcatcgggatgtcaatgccgacactcgctgcaatcgaacggctttcgtatccggatgccagtacaatggtttctccttcatacacatttttttctgttactacacgtctggcttttcctttgatcttctggatctcgagcacatcctcacctgtgataaactctgcgccaagctctctggctctcttgtaaaaaccgagggttgcaacgagcggattggcatgtccgtcggtcggacaccagctggcaaccgtaatctcatcgcttaagtatgggttgatctcacgcacttcttttccatcgatcatccgcacatccagtcccagtgcaacggcacggtccgtcagtccctgtaagatttctttgtgctttgctgtctttccgagacgaaggtttccttctttatggtattccacatccacaccgagttcttcggacagtgtcggccacatgtgttccacggcatacatggcaagcggaagttctctcggatcacgtccggactgtcttacaccgcctccgtttcttgaggatccaccgtttccgatatgatcgcttttttcgagtacgatcacggaaactccttcttttgccagataataagctgttgcgcatccgatgattccaccaccgataattactacttccgcattattcttcatcttcctcgccctcctttgcctctgccgcaaacacgcgcatctcgatcggacgcatcggtgcccgggatgttgccggttccagttctgccggggatacgttcagttctcttgccacgattcctttgaccagctttgcacaggtctgtccctgacagagtcccatgccggttcttaaataccggcgtatctccgtaagtgtgaacattccatcgtgcaccgctttgcgaatttcccctttggttacttcctcgcaccggcagatgatcatatcgtcatccggtcccggtacgaaaggtccgatatctcttgatctatcattaatctcatgcataattttttcctcctctgtgaatcaggcttctgccttacgataaaatctggccttcattgccatatctgccggcaccttaatcgtcagcagattcgtatggtcaaatgccttcgatgtcctgacggataccacttccgcctcacagattttttcaccgctcctgctcattccgtatcccttttctcccttttccggaagtggaaggaattcatatggaagcgtcacggttgcaaatcccggctcatacgtttcatcgactaagaagattgcctgtccggagcaggatgccacgcacataccgcatccgatacaatccacatccggatctaccaccggaagggaggtaatattttctccaatcctgatgcaatgcttcgggcatgcatcctgacatgggttacacggaatattctgtgtacattccatcaccggatgaaccccgactttgtgtgtcacgcccgggaagcgttcgatttcatcatctgcaacatatccttttttcagaagattcatggaaatatcgattccttcttctgtcttctcgataagttttccacgattctttggagcaaacatgccctggcgcagtccgtcaagtgcatcttcctgttcttttacctttgtctttaattcttcctcatccatatatcccaggtaatgggcagctgcgattcctgcgatacgtccctcgatcatggcagagctggcttcctcgatccccgatacatcgcctgctacgaaaatgcccttgatcgaagtttcgccatattcatcacagatcggaacctgtccgccacgctttggattgtcttccatctcgcagcccgccattttcaacagctgcgacataggagaaagtccgactgccaggcagatcgtatccacatcgaaatgcttttcggttcccggaatgaactggaagtggtcatccacttctgcaatcgtaacaccgatcacatactcctcgccctctgcttttacgatggtatgggaaagataaaacggaacaccggttcgtgcaacctttgctgcatgaactccgtacccaccgacacggggtgctgcatcaaccagtgcaaccacatcacagccgcactgcatcagctggaaggatacgaccagaccgacatttccggaaccaagcatcagaattttgtttcccggttttaccccgtgcagattcatcattgtctgtgcggctcctgcgccgatgactcccggaagattccagccctcaaaggtaaccatattttcagcggctcctgtagcaatgattatggaatcccctttgtagtgatgaacctcatctttgatccttaccacaatttctttatccagatacatgccgataacggttgcattcagcacaacttccacaccggcatccgctgcttcctgcaacagctgctgcccgatcacaaaacctctgacttttgccttatgttcctttgatccaaagaatttatggatctgcttaaacagctgtccgcccggcttctcattttcatcaaataccacaactttcagtccccgcttcgctgcctcaactgctgcagacaatccggatggaccggctcctacgataatcagatcataacgcttcatattactcactcccctctactgttcttcaaacggtttatccgatacgccgtactgtgtctggactttcatgccctctgcaagtggtgtcatgcaggtgcggacatttggttttccatccacgaccatcacgcagtcggtgcatcttccgatcgcacagaagattcctctcggtttgtgttcctttttggtataacggtgaaccatcacgcctgcggcttttaatgctgcggcaattggctctccttcgtatccctgtaattctttaccgtcataggtgaatgtaaccagtttccctttctgctgttctccaaggattggatgttctgaaattctgctgctcatataactccttcctttctatgtgtaatcatgtatggtttccgtgaaaatcaaaaagacacctatgatttctcatagacgcctttgtctactgcggtgccccgtaaggggtatcgccttcgtacatcgcttccgcgtgagcggaactctcatgcgatgtgctccttattgcggtgccccgtatggggtatcgcctgcggtacatctccgatgtatcgccctccattatgttttttccaagaaccaattacttttcttaacttgtccttatcataccctctctcccaacacatgtattgtaaaaaacgatacaacaaaaaagaagctgtgcattcatgcaacagcttccttctttgttttcatctccgacaaattatccttcaatcactttttggattgctgcaaacagctcatcgtacgtctcgtatgcaggaatatccggatattcagccttgatggcatcggtacttttaaataagaaaccagccttgctggcctggatcatgccaagatcattgtggctgtctccgcttgcgatggtatcataaccgatggactgtaatgccttgacagttgtgtacttggacttctcacagcgcatcttaaagcctgtgatttctccgttatcggcaacttcaagcgagttgcagaaaattgtcgggtatccgagttttttcataagcgggcctgcaaactgggaaaacgtatcactgatgataatcacctgtgtcatggcacgcagtttatccaaaaattcctttgctccaggaattggatcgatctttgcgattgtctcctggatctcttttaatccaagaccgtgctcctttaaaattccgatacggtatttcataagcttatcataatccggctcatccctagttgttctctttaattccggaataccggtctcttctgcaaatgcgatccagatttccggtaccagtacaccttctaagtccaagcaaacaatttccattttttcttcctccatgtgaaaataaatatactactattccgatttatttccattgtaatgaattcggcagtctctgtctagtaccaaacgtcttttctgtatttgtcaaatttaatgtaaaaacatcttaattcgtaccactaaaggtgtttttaacgtttaattctatacataaattgtactagttttcaaatataatgccctccgcaaaaattttatccaaatatctccatgtaaatgcctctattatgttttataaaattttcttttagtaataaaaatttttacaatattaaattaaaacgctaatttttttttaattttattatttactttttcataaaacatttatataatattaaatagaaactttaatattattaaatccttgttataaaaacaaggtagaaagaggtttatatgataaaactcgaaaaatatcttgtgcagtaatgtcatttgttatgctttttgcaatgtctacatctgtatttgctgctgaaaaaacaacggaagatttctccactccccaaaaatctattgtatgtcaaaccaacttagacgaaatggatttaagcaaatctttcaccttaactgaaagttatactgacaataatggaactccgattacaattacttcaacttttaaaccagctctgcaaactcgcggaagtagcacaacaaccgctagtgctggatcttggacatcaaaagcctcttatggcatagttggaatgagttatgaatttgatttgtcaaaatctggatctcaatggaaaatttctcatggcagaaatttttcatactttggtgctctttgcaaattttctaatccacaattaaaaatttctagagcagtatcaaccaattcttcccctgcagagattgattcctcagtcgttgcaactgtaagtattcctggtggcggcaccgcaggttcctctgtatgtttgttgaatactaaggtcagtaaaagtggtgtagttactacaacttggaattaaattattcatctttcctgtaaagtgcatctatttcagaataatatatttctgactgtagacaaagttctccgaggaactcgcgtttctcggagaactttattactatattttaatcgaatattgtatttcacctgtttcaaaaaatcatacggtcaactaacacccatgtacacctttattgttacaaacctggatatgaaaccttatcaaactattcagttttattacaatcgtagcaaaatggaaaactttattaaggaaagcaaaagtagaatcgattttgctactgtcagcaataattctaaaatagtaaattctaaccacatgagatttcatatatttgtctacaacttattcaattggtttaggcgactggtactatctactaatatgcgaaatcagcaagtagatactatctgtttaaagcagataaagattgctacaaaggccagtccatacagcaagatatatatcacattcaaaccgtgcagtatctgtccttataaaaagaattctacagataactaactggaagaatccaccaatttcctgtaccattgaattaacaactattgaaataccttaatagttcaaaatgactcaatcaaatttcactgggaaagttcactcattttttgtagatgatccaatttatttcaagaaaattcgtttgatgttttgcagaattgagtatttctatatgtttataaataatccagaattaattgatatttctaatccgatatatactttttgagaagttataaatcaaatcgatctgtcataatatttaaaaaaaatgcaaaatagttctcccaagatgtgataaacaaaaactccttaaataacgagagaatacggacattttcttggtctatctaattgactaatccaagcctatgtctgtactctatagggctcaaatatcctaatgattttttatcctttttaattataccaatgaagataattacttaaaataccaataaattctgagatgtttaccccagaccaatcggtgctatagaacatctcatttttaattcttccaactatgccctcgcagacagaattagcaggtgaacaacttttctttgacattgatcatatgaaaccatttttctccatcctatcaatccaacctgactagcggtagtatacacttctgtctgaatttatgattggtttttcttctatagatagtacaatttagctacatcgtcaagcatagaattgacaagtaatgcatctgaagaagtgcttatattccaagtaacaaataaaccatcaaaacaatctacaatacgaggtgataaataaacttttcctgccggaattgcaaactcggttatatctgtcaacctctttttattagatttaggcgcagaaaaatttctgttaattagattatctactgctggagatacttcaccttaataagaattatatttacgagttcgtttgagctttactacaagttgttcttccttcataattctacaaataactttttctgaggcaattatattttcacgcctaagtaaggtattaattcgtctataaccatatcaccctctattctctgtatataattcaatgactctaacacgtaaaagtgtatatttatcttctttttgtttttgataataataatcatttttgataattgtaatttttgtaataatagcagtgagtatctatttttcaagacatcgattatcactgtcttctctccgttggtgagagtactctgatcgatgtctgggtctttttttaacatttatcgttgctttaagaatgtctatttctaattgcatatctcacatttgaaccttctactaatattcccggagtaatatttttgcgattcataagacctaatgtaccttcttttaaataactcttttgccattgataaatactagttctactatacccaatgtcttctgaaacatattttatattttctccgagctcatagtaacgatgaattgcattcaattttacttctaatggaggattgcgaggatgatcaggaggattatcaattacagggtattctttccttgttttgggcgggatatttttctccgcaatccatgtgtacagatttctacgtgttggataacctagaatcctaatagtttcaattacagactctgtttcatgatatatccgtagtgcaatatccttttgttattttgaatacataaaaaagctcctttcggagccctatagtagtccagaatgttgcccgcatcctcacctcccttaaagtaatgctctttgcattcattaaaaatggaatatattcgttgcaaaaatcaatatattctgtagctataacattcgttacatataccatttcactgaaatgagtacatcctcttttattcctttcagaaatttaaatataaaaatcaaccagttatcgtccgtgcttattaactgtatcaatttttcataaagaaatgtctatttcattccaagccaaaagaagaaaacaaagaaacgacattttgccggaactgacttttctattcaaagacttatgtttcaaaatttattatatctctattagaatgcaattaatgttcagtacatcaactcttttcataagtcttctaatttcattttttgtatttctttttgcaacaaacttttttcctttttttgtcgcaagtaatactttataaatcttttaacaacaaaaattatcaacattacaaatatgatctgaaaaattatagccattataatatacaaaacggtcataagcataatatttttccccctattttttaccaaatagcttaaataatgcaatcataactactgcaatgactattaccgcaacgataataaatcccattaaaaatttcattctctctctcctttcccacttatgttttttctatattcttcaattaatatctttgcaacatcatagtcaattttttcatctattaccattctttttattaatgatacgtaaggttcattttctaaatcttcattcactttaattttttgaattaacttatctaaccgtaatctcactgtaggataagttacaccatactgtcttgccatttctttaagagacccagatgccagtataaatttttttataaactccacatcctcattttctagctttgaaaaccacaatggcataacatcattaggcatttattttcaaacctcaattcattttaatctttaataatattaagtataatctacaacaatattaaagtcaagagttcctttctgaaatctattctatatattttcattattatttatatataatcttttaaaaacaacaatcatctacacattatcatagaaagatgaatattactaatggttctgtatattctgttgtgccataaatcgccggtaaaagaacaccccgaccagcgtggtgatgacttccgtcaccggaaatgtaaaccagaaatcattcagtcccagacgggaaaataaatacccgagcggcacaaacagcacaacggtccttacaacggtcagaagtgaacttttaaccgctgcaccaactgcctgaaagaacaccggaaaaatcagtgaagtgaccatcgggataaaactgattccgacaaaatgaaatccgactgtgccgattgcaatcacctgcggatcactcgtaaatacacggagcatctgtccgggaatcagattaaaaaccagcgttccgataaacatcagccccattcctcccacaagtgaagtggacagtgttttcttacagcgatccatccgtcccgatgcataattataactgatcaccggcacaatacaggtctgcagtgcccccagcggaataaagaaaaatgactgccacttgtaataaagtcccagtgccgtaactgcctgatcggaaaaggttgcaagaatcagattcaatccgagaatataaaaggtatatgccgactgcataaggatattcggaattccaagtttataaataaaacagatatcccgcggatacatcgaaagcggtggagacttgcgaaacccttttttcattacaataagagccgctacaatctgtcccacaacagttgcgatggcagctccggcaatcccaagtttcggaagcccgaacagtccaaaaataaataacgggtccagcgcgatattaaccagtgcccccacgatctgtgcgatcatcggtgtcttcatgtccccatttgcctgtaaaatctttgtccagatactttcagtaaacaatccgatgctgaatacgcagacgatccggccgtatacaatcacatcctttatgacttccgcggaatccgtagacatccttgcatatgccggcataaaaaagaaacagactgccgcaaaaagcacccacaatgccagcgtaagcggtgttccgattcctccatattcatttgcttttttctcatcatgcacaccaagataatgtgccattgccgtattgattcccacaccggttcccactgcaatggcgatcataagaagctgcagcggatagataatggagagtgccgtcagcccactctccgaatattttccgacaaataaactgtctacaatgttataaagtgcctggatcagctgggcgagcatgaccggaggtgcaattttcagcagaattctgctgattttttccgttccgaaataattgctgtttgtggtttccataaaataatcccctgtgaaacttcgtattccacaggggattttacgcccgaaaatcatacaagtcaatgtgtttttatgtggatttatcccgccaaatatcatactattggcaccgggcagaattgctctcctggagtttgccatacaactttctactcactacctctttgtttcaaactttgtaatttcccaaatcaccacaaattgcataaacattatgataccagatacgcccattccacatataatgcctatttttccataatcgtatatggcattcacactataactataaaataccccaataaatatagctattatcaaagaaacaaaataatagcatatatttttttcaaacaatatcttccaaagttcttggtctgttatgcccaccctatacaacttgtaaatgatatgtttttcttctttcagttcagattttattttgtaaaatatacatatattggcggccaccaaaaacaatatatcaacaaaaagcaatagaaaagttaaaacctcagatgactgctttgcaacactataagtttcgattttcgatgatagcatgtacgcggattgatcttccataggtaactcattcattctactcattttttcctgtaattcttgcattgcgttgcccgaatctttccattggctaaaattaaacataaccgcagtttcatagatacagtcatttgaatgattcctgattttcataaaatcctgttcatttacaatcaaagttatatcagccagactacggcatgaattcattaatattttatttgactttccttgcaatttcaaatgcattttttcatgattaccaagtccaatagttatctgcttatttgcttgaaaatcatgttcatatccatcatttatatcaaactggaataattgtataaagtaacctggttccacttcatatgtacatccatattttttattaacatcatctgcagatatgatattacaaaagctatttctcaacagccccaaccgtttttcttccgtaattgtaatgtcatatttatctaacgtttgcataatttctttctggcccatattgttgatatcattatactgcacatagaatagatcatacggcgaatacgtaagtgcatttctcgtaaaattttggtatgttactccacaatgtgctgtaaaaaatatcgcagaaataaacagaattgctgcaataaaacttaccattctccatgattttatgtactgtaatacgaatgacaaactaattttccacttaacacttcgaattttcataaagatgcagtcaaaattagccaacattattcctatgccggtaataataattgctgtgctgataaaccatatatatgttttttcgaaattataagcatataacataactataacagcaactattataagcaatattccaaatagcaagaatatattagatcccttttttcctttttcttccttatatcttgcattgaataactcaagaatttctgcgtgtaaaaacctaactatgttcaaaagcaaaataataataactaccaaagcatatacttttcctactgacacataagctccaagatgcagcgtccatttcatagaacgcaaaccaatcaccttgtgaagataaaagaaaaaaaatactgaaagaacacttccagttacaattccagcacaaaagctaacgatgcttattatcagacattctagcaacatgttacaaatcacttcatattgcgtcactccaagagttattaatactgcatactcctgctttctgctcttcaaaaaagcctcataaacatatggcacaaaaagtatcataaatagtgccgttaagacagttggtgcaaaaatattacttgaaatcatcggatcaattttatcagcagacataaaagattcattttcccctatagataaaaatgcttgaaaaaatgctatgataaaaatattacatactaaatataaaatatagtttttacgattataccatatcattttcaacagaatacgaatcttttccatctgtttattcacctcctatccgctttaaaagctcataaatatctttcaaaaaagtgctattactcttgttattcttttctatttccaaaaattgtataccatctttgagcagaattaccttatcacagaaagatgcagcataagaatcatgcgtcaccataaccagtgtaatcttaaattttctatttatatcaactaaatactccattacattttccgttgattttgaatccaaatttcctgtaggctcatcagctaaaataatctgaggagtattgatcaatgccctcgctattgccacacgctgtttctgccctcctgaaatatctgttacactcttccccataatgtctgcgatagataaaacttcagctatttgtttcaatttctcttcactgtcttctattctattctccaaaataagcggcaataaaatattgtccttcacatttaaactttccaaaagattaaaatcctgaaaaatcagtccaatattatttcttctaaataccgccattttagaccttcgcattttagttatttcttcatgatcaatcataatgctgccactatcggctttatcaatcccgcatattaagtttatcagtgttgttttcccacaacccgaggctcccataagagcaaccatttctccgctaccaattgaaatatttaatcctttaagaacttgcagcgagttttctttattaatcatataactctttttaagatttctaatttctaaaatattttgacattcttccatatttttaccatttctaactaaatactctaatcaatctgctgctcacttcatctatagtattcatcttatatattttgtttttaaatataatctttgtattaagttccacttgctgttcataggttttcggctgttttataatttgataatcatgccctgctttactatgattttcccgtacaccatcgcttatatccactattatttctcccaaaataaaaatgtctccccatgggacacatcacttacgtgagaggtgtggggagtcctgttgatattataatatgctatttctataaaaatcgcaaccatcttttaatttattttttctgtctaaatacaatcgttactcttcacttctgttgtgccataaaccgccggtaaaagaacaccccgaccagcgtggtgatgacttccgtcaccggaaatgtaaaccagaaatcattcagtcccagacgggaaaataaatacccgagcggcacaaacagcacaacggtccttacaacggtcagaagtgaacttttaaccgctgcaccaactgcctgaaagaacaccggaaaaatcagtgaagtgaccatcgggataaaactgattccgacaaaatgaaatccgactgtgccgattgcaatcacctgcggatcactcgtaaatacacggagcatctgtccaggaatcagattaaaaaccagcgttccgatgaacatcatccccattcctcccacaagtgaagtggacagtgttttcttacagcgatctatccgttccgaaataattgctgtttgtggtttccataaaataatcccctgtgaaaattcgtatttccacaggggattgtacgcccgaaaatcatacaagtcaatgtgttttttccatccatttacaccaacctgggatgctttttcttttctaaaatttataaatgataagcatacacccgtgcttcatatgcctgcagcatttcttccttctgtttggaataatttccgatcaaaagcttggcatctgccggaatctgctccgttacttctgccggaatagaaacttctttttccgtaaaattacaaagcaccatcagccgctgcgtcccgagcattctggtatagataaataatgcctcatcctccggtgctaacagtttgtaatcaccataaacgataatctcgttttcatgacgaaggcgaatcagttttttgtagtacgaaaagacagaatccggatcgctgatctcctgttttgcattgacctttggataattactgtttaccttaatccacggtgttcctgtggtaaaaccagcatttgcactgtcatcccactgcatcggcgtgcgcgcattgtcgcggctgatccgctttaaatatcccatcatttcttcatgagatactccacaggtttccgtcagctctttgtatgcattcaggctttcaatatcccggtaatcctctaactgatcaaaataagcattacacatgccaagttcttccccctgataaacatatggcgttccctgcatcatatgcagacaggttcccagcattttggccgaaatttcccgatactgttcactgtcatttccaaaccaggaaaccgagcgcggctgatcatgattggataaaaacaaactgttccaggctttgccttccagtccggtctgccatctggataaaatcttcttccataccggaagcggcatcttatggctgtcccatttaccgtaatggttgtctgcctccggtccgcctccggtatgttcgaactggaaaaccatgttcagttcgctgccatctgcattggcatatttttttgcctcttccagcgtcactccggcagcctcccctaccgtgatcagatcataatgggaaagcactttccggttcatttcttttaaatactcatgcacatgcggaccgttcgcacaaccgctgtctgcgtatccggtttctcccggaattccatccggcagtccttccggtttggaaatcaggctgatcacgtccatacggaatccatcaatgcctttttcacaccaccagttcatcatctcaaatacctgatcccgcacttttggattgtcccagttgagatccggctgttttttcgaaaacagatgcaggaaatacatatctgtctgtgggtcatatttccatgccgaaccactgaaacaggatccccagttattcggctcttttccgtcttttccttttctccagatataaaaatcgcggtatggattatccacactctttctgctttccacaaaccatgcatgctcatcggatgtatgattgacaaccagatccatcatgatcttaattcccagctcatgtgcccgtgcaagcatcctgtcataatcttccatggttccgaattcttccatgattgcctgataatcgctgatatcatatccattgtcatcgttcggtgactgataaaccggggacagccagatcacatcaattccaagttctttgaggtactctaatttttctgtaataccattgagatccccgatgccgtctccatttgaatccatgaaactccgcggataaatctgatatacaaccgcttctttccaccatgccttattcaatactgtatcctccttgcctctctcatatttgaatacctgcattatacggcatttttgcgaaattttctttcacattactgcgcaaaaataaaacaattctgccctcatttctacgcttagattatttttgtttcctccagctgttcggtaaacgcttcgttcatccggataatcggtttacgaagtacaagtccgacaaaaagtgcaatcaccaggaagatgccaagttttgccagatctatccagtaatcgttcccataacagcctccaaccgattcccgcagggctgccatactgtgcgtaaacggcagaagcggatacacagcccggaaaaatttcggagcacattcaatcgggaaagttccaccggttcccgcaacctgcataacaagtaaaaccacactgcctgcttttccgatatctccaaatgaaaccgtcagcgtataactgatcgtgacatagactatgcttgaaaaccagcacccaaataaaaacagaaacgtatgcgcacactgaatcccaagataatacagatctcccagtgcaatcagcgtactctgcaacagaccaaggatcagaaatatgatccagcgtccaagataaatttcatgaattttgacatttttcagtcccatcttttttatgctttcctcggaaacggtcacttttaacattgcaaccagcacgattccgccgatccagatagaaagtgtcgaataaaacggtgccatggaagaaccataattatcaatcggataaattttcttcgtattcagttccactggtgccgacaggaaggcactgaccccggacttattatcatagatcatatgttccagatccgcataatccccgttgtcttttgcttttgtgagcttatccgtaatcttttttattttatttgcagatttgcgtaaaagtttaccggaatcatccagacaggtctgtatttctgacagatccgatcctgcggtgtccgttaacgtgtaaacaccctttgtacttgcattgatctgtttcgtcagaccggtaatgtcttttgatgtttcaccgatcgaatctgcaaggttctgcagagttccttttacatccttttcatattctttgctgatctgctgcaggcgtttctgattttcttttacaagggcatccaaagctttcttgtcagagatcaggctggttgtggacttcctcatggaagccgcagtatcggtcagatcatcccgcagttcttcctgtttttcaatagaacggttgatcttttcaatcataggtcctattgaggaatcggtttccggatgtttttccgaaagcttgatcagatgatcccggagtgtcgtaaatgacttgatgtttttatccaccgtctttgctgcttttacaagggtatctgctgtatcctcactgccatttattccatcttccaccgtctgatcccaaagcaggctcatttcagaatataccttttggcctgctttcagtgctttgcccacgctctcggtcgcactgcttattgtcgttttcatatcggtaaacgtctttttggaattttccagaacctgttttccatccgcagactctgttttcagttcttttaaaaaatcagaagacgcagtcagcagggactgggaagaagacgtaatccctgaaaaagtttccagcgtggacgcaatcatatccatgtcatccgatgcatccccaagattgtggatcagattatccaccagccggtctgctccgtttgcctcagccatattagagaccgactgaaacaccgtcattgccgtgtcggatattgtctgtataaatacctgattcacctgtttctggatcgcggttgcacccttgtcggtcacttttggtgcaatcgcattttccttggcgttggaatagtaaataatttccggcttttgaatctgatcggaaaacagactcatcatctgggtactgaatttctccggaacaacaatcgccgcataatattgtccggattttaccccctccattgccttttctttgctggtaaatacccagtccatctgtgtattttcccttagtgcggaaatcacctgttcccctacattaatctcaagaggaatcagacttccggtatatccctcatccacacttgccaccgcgacctttaaatttcccgtattgttatacggatcccagcttgccgcaatattaaaccatgcatacagacacggaacgacaaggacaccgatgacaacaatcattgcgattacatttttgcgaatccgtttcacgtcgtcgatgaaaattttcagaatgtttttcatttgctgttctcctccttcaaaattttcatcagttcctcagaactcatctctcccaaaacagatttctttttcatctcttcatgcagatattccacaatcagcagatacagaatcagtgcaagtaaagaaacgatccacaaaatcagatagaccagtttggattccaggctaaacatcaaaatcagaaatacgagtggtataaccatcatacagataaatccggagcgtaccataaccggataatatttttcaaacgcgagtgttttctctgttaatttctttctccacgcatcatctttcataatcacctgcataatccgctgcagctgtggattatccctgcctttggaatccgtctcacagatcatcagatcggtttctgcaagtctgacatcaaacagatgattcagattcatcagaagcggacggagtacaagcccgataaacaatgcgaccagtaaaaataccagaagttttcccaggccgcttctataagtatgatgatagtatccggcaatacattcccgcattgcgctgatcgaataagaaaacggaagcagcggatgcagtctctggaaaaattccggcatcatttcaatcggatacgttccggaagaacccggaatctgtaaaattaccagaagaaccgccagtgcttttcccatgtgtttaaacgtcgatgccagtgcaaagatcagattcacatagacaaaggaagttaacattccggcaagaataaattttaccggatgcagacactgtactttcagcagaataatatctcccgcacatacgatagctccctgaatcagtcctatgataagaaacagcagaatacgcccgaaatacgcacttgtcggtgtaaaatccggcacttctttgtcccggtctacttcctgttttaaaatagaaaccagtatcagtccacctacccagagtgccaggtttgtataaaacggggtcattcctgttccgtaattttccacttcatacaggacatccgtctttatgtttaccggagaagacataaaattggaaatatctttggcatcaatcttttccagtgacaggatattctgatacatatccgaattctgcagtgtctgcagatccgtgaccgttttctgcagtttctgatccacctgtcccatgacattgcccgtctgtgtaaatactttggagctgctgtgcaatgcagattttaactgatccagcagatctctcatctgttttgtcatggatgttatgctatgtaaggttgttgacagatctccgcttatatctgccagaccttccagtgactgatccagctgcgggtaaatatttttgctgaaatcgatcctgctgtcctgaaaactctcacggttatcctctgcaagcgtttccagtgaacttctcgtatctttggaattctttaacactttccgcatactggtatttgcacttttcaatgaatttaccagtttctgcgcagaaatgctctgcgtctgcagctgtgaaattttctgtccgacagatgctgataactgtgtatcttttccaagattctgatttaacttttccagatctttgagaagcttggcatttttctcattgatccgggtgatcgtatcgagactgtccccaaccgcaagatttgccttatctgcctttatctcaaacttattcagactcttagaagccgaggacgaaacttcatccagaaaaacttccccgccggtcagcccattggagaactgtttataaaattttccaagtgccgtctgacttttttccagcaatgcagaagtttcttttaaagaagaagagctgtcctttgctgcctcatccacctgatctaaagactccttgatttctttgatctgtgcatcggatttatctacttttttctgaaattcttttaccagcttctgataatccgttaaattattctgaacttcggtaatggcagatgtcagttccgactgtgtatcgtccagtcctctggtaatactgtctgcggaagactttacaatttctgatactgccgaagatgccgtggcggaaaatgtgtcgttgatctgctgttgcaccgttgtcgcaccggtatccgtaatcttcggtgcaatggcatttttcttttcattgacataatagtccagcttcgggcgtttcaggtctccggagagaatacttaccagggaactactgaaattctccggaatgacgattgccgcatagtaatctcctgcctgaacaccttcttttgctttctcttcactgacaaactgccagcccagcgacttgttttctttcagtttttcaacaatcgaatcgcctgcattcatcgtgatcacatcggttttggcccctgtatcgcaattggcaattgccaccctgattcccgaagtatttgcatacgggtccatgtttgcggcaatattaaaccatgcatacaaagacggcaggagacatacgccgatcataaccagtgtcgcggcacggttttttaacagacgtcgcacatccctgcggaaaatctgaaatgctgtcttcattcattacctctttctattctcagtttcttaatgaaaaaaggaaaatggctttttcagccattccccttttttattataaagagttctatatgaatgttcaaccgaaacttgaaaattattagaacgtattatttggacgcagatattagaattttctctgttcacagaaaacctatcttcctaaaatcatgtccttatttttcatcattgcataccttatcatgccggcaaacaacaacaagagtccaaccataatcactacagttgccgcaacacaaaaccataacgcgccctgcacaccagaggcaaagatcctgtaatacaatacagacgcacagcctccaatgacaagccctatagcaatgccattccttccatatccgaaaaactcttttgcaagcatctgtttctcctgcttcggtgtcatgccgaccgagcgcagaatgacaaattcccgtctccgctgccacagatcggtcagcaccgtattacagatgttcgtcacaccgattaaaagcactgcaagcaaaaatccatagagtgcaattccatctacaaacaacagcatattgttttcccggttctgcagatcgcggtttcggatttcctccggataaaaatcataggttttttccagtgcctgtgtgagcgttcccggatcggtactggcgtattttacggtaatttttgcaccgccctgcggatcgtgggcatcaagccatgcatcactgacaatgatggttccggagtctgtatagctctgcgacgtatcgacaccaaacggccgcctggttgtgactgctgcgatctgcatctgatcggtcatgtccggtgttttctccatctgttcttcgtggcagaactgtcccctgatccagtcgcctggtttgtaatctgtcaccttccatgtggtttcctttccatcccagtacccggcatacgcattgtaaaatatcgcacaatcttttgccgtttcataggaaagtcccagttctttcaggtaattgcggtacgctgtttctccgactgccagtacctggatcactgcggtcgtctcatgtttaagatccggcgctccatttcgtcggatatgcgtctgtgtatacggtacctctttcgtattcaccatatatgccgccgtccgcaggactgccgcttccgtgacgcttttttcctttgtgctctgcaaaaccgcagaccggtttgcctcccagcttccctgcacatccaccgaaacattggcatgatcgtcaaacatatggttgctttgtcctaccgaaatcgtctgtactcccataaaataggataccagaataaaaagcgccgtacatcctgcgattgcagccgtgatcgtccgcttttttgcccggcggcttttctttgcctgcccgcgcattgccgcaaccggagaactttttgccgcctgttttgccggacggcgcgcggaaagaacaagagtgacagttgagagtaaaataccggcgataagcatctgccatgccacatgaacatgcagatactgtacggtattctgcccgtacaacaacgctttgatagcaaaaattccgcctgtcgaaagcaacagtcccagcacagttcccaggggaattgcggtgcgccctgtcagaaatgcctcgtaatacacactttgccgaatctgccgcggtgtggcaccgaccgaggcaagcatgccgtaactctttcgcttttcctccatggaaatagcaaagctactaccgatgcagcttaccgccgctgccagaatgataacatttgtgaccgcaactgcaagatagagcatgtgatacgccgactggccgatatccatgcgctcaaatcttatcagcccccagttttcataaaaccggtacaaagaccgctccatcagatcattaatctggcggtttgtgatgcgttcatctttgataaacggaaatttctgtacgccgggggtaagtgtaacacccacaatatccgctgtcgtctgtgcccggtcacgcaaccctgctttcgtgtacttgcaataaatatccgtgcgctgcatgtacttttccgggatattatctccctttggattcagatatgtaattacactgtagcccggtgctgtccactcctcaaatccaaagttcggacgctgcacaatgccaaccacctgaaaagatgccgttaatttctttttcagtttttctcccgttcggtaaccactcgactgtgtcagtacattcccgttcttatcctcacgttcggaaatgtccagtgtgatcgtatcccccacacgatattccacaccaccgttcgtcatcatatgccgggaaagcaaaatctcatgatcgtttttgggcatacgtcccttgatcagatgcagggcatttttctgcatggcccgattgtccattgcggtcagatacacatacggtttatcgggatttttactgccggaaagctttgcataccccagcccgacactctggtatgcggtcgcaaccttgcggttatttacaatgtgatccgcctcctcacgcggcacatcgtaaaatacatagtcataatctccgcttaaatcctttgcatattcgatcagtcccgcctgacaggacgaagcaaaggaaaaaactgcggcaaacaacgccgtggcaatgcaggttgtgatccacacggcaatggtctgccgtctgtttttctttcgctcacggattatccgttttttcataatggaagtaaccatgcctatccctcccttatgatttttccatcttcaatgacaatcacacggtcggcggtctttgcgatctcgagattatgcgtgatcatgatgatggtctgtctgtattcctgattcgctctgcgcagcagctcaacgatctcgtcactgttctttttatccagatttccggttggttcatctgccagaacaattgccggacggttgatcagtgcccgcccgatggatacgcgctgctgctgtccgccggagagttcttccggaagatgcgtttttcttccgttaagtcccagctcatcgatcagtttatccagacgctttttatccaccgtctgtccgtcaagttcacacggcagtgtaatgttttcctccacatttaatgtcgggatcaggttgaaaaactgatagatcagaccgatctgcctgcgccggaaaattgccagtttttccgtgctcagcgtgtagatgtcttctccctgtatccagactttcccctccgttggctgatccacgccgcctaacatatgaagcagtgtcgattttccgcttccggaactgccgacaacggccacaaattcgccctgtgcgacggaaagagacagatcattgactgcggtcacacttgtattgcctttgccatagatcttcgtaagatgttctgctcttaaaatttccat

SEQ ID NO: 853 - DNA, 14109 bp, unidentified
  source 1..14109: mol_type = unassigned DNA
ttattctacattcttcaatgcttcatccattggaatttttcttattttcttatattgcaatgcacctattatggaatatgctgcaacacctatcacaaacatttccacaaggacatacgacggtgctttatatgcaagccatcccgggtatgtccccataattgctctccacaggaatcctattgtaaaatcggacagtggaacacttataacaagtgaaataaatacgactatcgccgtagctgcaacatacagcctcattatctcatttcccttataaccgagaatcttgactatcgaaattgcattggaattcttctcaagaataatctttgaaagaagataaaccataagcatataaagtgctacggcaaatacaagccatatataaaacattcttcccattgaatctgtaagctggtcggcaactattgtcatatcattttgtgtaagcttcgtagcaacatatttttcatcaatatcaagttcgttgtcagtaaaatatcccgaataatacgtatcctgtttatcaaaatcatcacggaatctgtctatgtccgtaaataccgccagacttgacggatagacatagcttccggcaattttataagtatattctttatcctcatatttttcttttaaagttattgtatcaccctttttaagcctgtatttatcaaggactccgtcagaaacatatatttcattatcttttaatcccgaaaaatcaatatcaaaatactgcgagtcttcatttaatccatataccgtaaattcatcattcaggccattgtctctttgcatttcaagctttgttatggcatatttttccgcttcattatctttaatttccacaggcatttttaaaatatactgatatttacaaggcatattatcaataattgtctttttatagtcattaagaaccggctgcataacaagtccgaacagcagcattatgcttgaaaatgcaattcctataagcattattatgtaactcgaaatattctggaaaattattcttgtcctgaaacgtgtaaaaaatttccattcaggaagcttaacagcctttctgtttttgcgttttttcaaatcacgccttataaacttcagaggtgacaatttcagcatttttgtgagcatgaaaagattaatcacaaacataagcacacaaggaataattgttgtcataacaaatgcataaggcgaccatattgtcgtgtatacagtaaggctgtaactgttatagtaaatggcagcaactatatctttaaatatcgtatatccaagtatattgccgataatcgcaccgataaacataattatcatcggcagttccatataatgtataacaagctctttacgtgtatatcccgatgcacggagcgtaccgataaccgtagattctttctcaattgtacttattgatgtaaccgcaaaaataaatgccatgataattattacaatatataaaagcaccattaccattgctgtatccgagcccatatcgtcacccgcaaaatgaattgcctgattatcaggctccggtacaaaatcagtcatcaccgcattttttgcaaggaatgttttaatatcgtctgatttatcttttttctctttatctgtcagcgatgtgttgtcatatttccatgcataacaatattttaaattattatcgcttattctgttaaatgcttccggtgtcacaacagcaactgtaaaattttgtgcatcaaacattaaatccgtattgcttctgaataatgcactgtagtcagataaggcaaccagccctgtaatctcatattcttttttatcaagagttactttatcgcccacttttaaatctgcactgtcagcaaattttctgtctattgcaatctctccgtctttttcgggaattcttcctttgtgtacgctcacaccatctatatcttcacgatttttataaattctgtaagtgtgctctccctcttcttcctctttgtaaaaaagactataaacagttatgtcctcttcatcttcaagtttgttttgcaatgtcccggtaatctcatcatttaaaataaaatgtccgtcttcgatattatattctttaaaactatcattgtatgtctttaccatactttttccggcgacgagaaatcccgacaccagaccaatcgtaagtgtcataaataaaaatatcacaagatattttccaaattcgtctttaagctctcttgggagtctttttctaagcggatttttcatatttaacctctactttccatttaccattcaagctgctcggccggaattttattttcattatcatattcttttcttattcttccatcatgcagatgaactactttatccgccatattttttatcgcatcattgtgagttactataattattgtattgccatactgtttatttactttttcaataagttgtaagatttcttttgatgtattgtaatccaatgctcctgtcggctcatcacaaattaaaatatccggattttttacgatagctcttcctattgccgttctttgctgctgtcctccggataactggttaggcagcttatctttatgttcccacaatcccagcgtgttaagaagctcattcaaatcaagcggactgtcgctaagatacgcaccgacctcaatattttcttttaccgtaagattaggaatgaggttatacatctgaaaaacgtatccgagatgctttcttctgtataacgaaagctgtttttctttcatgtcttcaagctttgcaccatcaattattatgttgccgccgtcagcctcatcaattccgcctataatattaagaagcgttgattttcccgaaccagatggacccagaagcacacatatttttcctttttcaaccccggttgtcacatccttgaggacatgattcctgttttccccctctccgtaatacttgttaatcttttcaatctctaaaaacataaatcctccttgttttgcgaagcaaaatccgagtcctatgacgaggagaggatttagcctccttgtttcgcgaagcaaaaacactctgcaattttatatttataacttttgttagttttcactaacccaagttcaaaaatttagtctgtaatcattcacgttatatgccatatgacatttttatgcgatacaacttacctaccgcgaatgtattacagacttaaaatcccgtcagattaacttttcgagactctttaaacttattgctattgttgatgtattatgtaacagtgctgatgttgtaggtggaattatacccgcaacgccaagtacaataagggttgaattgatacccataatcattctgtaattcttatggatacgtttcataagtgcattgcttatatgttttaatgcaaccagttcatagaggtcatttccctcaactgtgacatctgcaatttctcttgcaagctccgctccgtcacttattgctattcctacatctgctgcagaaagtgccggtgaatcgttaattccgtctccaaccatgattactttatgtccaagcgatttttctttttcaacaaattttgccttatcttccggcagaacttctgaataatactcatcaacacctatttttgcagcaacagcttttgctgtacgctcactgtcacctgtcatcattacagctttctttattcccgcttctttaagcttctttataatatctgctgcttcttctcttataggatcctctatacagattactgccgcaagttcattttcgattgccatatacaatcttgaatattcatccggcaggccatcaaataattccttcttatcatcaggtataatgcatttttcatcttcaaatacaaaatgataacttccgattattacttttctgccttctatctgtgatgaaataccatgtgcaactatgtattctacttttgaatgcatttcctcatgcacaagattcttattcctggcagctcccacaacagccttagccattgaatgaggaaaatgttcttcaagacatgctgcaattcttaaaagctcatcttctccaagtccattaaatgaaacaacctgtttaactgtaggttctgccttagtaagtgtgccggtcttatcaaatactattgtatctgcctcagcaatggcttccatatactttccgccttttacagttgcactatatgttcctgcctcattaatagcacttaacactgacaaaggcattgaaagctttaatgcacatgaataatcaaccatgagtattgataacgcctttgtcacatttcttgtaaataaatatgtgagtgcagttcctgcaagtgaataaggtacgagctgatctgcaagatgtgatgctttgctctcaactgatgatttgagcttttctgattcttctatcatatgaacaatattctcatacttgcttccaccattagtagaacgcactgaaattgtaatctcgccctcttcaactactgttccggcatatacaatcgcagattcaccttttcttaccggcattgattcacctgtcattgaagcctgatttaccattgcttccccggaaactacttcgccatcaaaaggaattacattgccgactcttattcttacattatcgcctgcctcaatttcatctgatggaacaagtatttcctgtccgtcttttacaagccatacctttcctatattaagagacatgcttctggcaaggtcgtctacggatttcttatgtgtccactcttcaagaatatcacctatgccaagcagaaacattattgagcctgctgttgctgtatcatttcttaaaatagaaactccaattgctgtcgcatcaagaaccggaacctcaatctttccttttgcgagagttcttatcccctcccagatatacttgaacgaccttactattgtaatgcctgcccttataggaagtggtacgaaaagcttattgccaactctcaaaacaaccctgtttataagcttttccttgtaataattattaagttccctgcctgaattatcaagatatgtctgtggaacatccacatttttataattaaactgctgtaacagtttaatcacatgtgacctgctgccgctgtaacagataactacatcattaactctttcattaactttaacttttgtgacacatttctgtccatcaaagtaatattgcaaaatgtctgcctcacggcaagtcatctcattctgctttaccctgacacgcattcttcctctaatctcatctttaataacaaatttcataagattgtgcctctgtatatttctaaattatgtaatactatttatacaataattattgttcactgcatccacagccacattcagattcttctgacttagcttcctctaactctacatcctctgtagcagattcatcctcgtactcagctgcagctgccttacggtcatcattaatctgaactgctcctgcataaatgtcctcgcaattatcctgtacatttgctgcaatcttcataatacaatctttcattctaaggacagctgctgtgcatcctgtatatactttcttggcatctttacttgaaagaagtttgattcctgctgttccaaataaaacgcctgccgcaaaaagtcctgttttctttccgtcaaattttactgccataattatttcctccttgtgtttacgggttaattaatttcctgttttttccatatttttaacgaaatatatctcgttcaatttagtttacacctgaaaaaaatcagccgcaacaaaaatatccttattgatatttctttatcaataaggatatttcatcaatttttattatatataatcatttttttatatagaaaatcatattatgtttaaacaacatattttagttataattccacaatctatgcatggaggtaaacatgaaaaaatctatatttcaatcaattatcctgctcgcacttataatggtgcttgcctgcttattctatcttacccccgataaaaaaagcaaaaattcccatcccgtatcatcaggaagtgtctcttacataaaacccggaagcggaataggcggtggcgacattaacggaaatgctgtcgccggcaaaaaatcacttcctatttattgtgtaaaacatgatgacagtgaaaaatgcatttctatatcatttgacgctgcctggggtgccgacgatacaatagaaattcttaacactctcgataaatataatgtaaaagcaacatttttcatgaccggcggctgggttgactcttatccagacatggtaaaagaaatctgctcacgaggccatgacctcggaaaccacagccataatcacaaacagatgagcaagctttccgcctctgaacaaaaagacgaaataatgtatgtaacagacaaagtcaaagaacttacaggatatgatgtatttcttttccgtcctccatacggtgactataattcaacgttgattaacactgtatatggatgtaaccattaccctatacaatggaacgttgacagccttgattggcgtgattatggagttgaaaacataataaaaaccgtcaccaatcacaaagctctcggtaacggttctataattcttatgcataacggtgcaaaatatactgccaaagctctcggcaccgtaattgaaacactccagtcacaaggatacaccttcattccaatatcagaaatgataatacgtgataattttcacatggatggaaccggaagacagattgcagattaaccacgctttttcatcccgacattcacagctgccataactagcatgccaactgcattaaatgcaagcacaagtattgctgctgtcattcctattctgtctgcaagaaaaccaactatctgcggcgtaactattccaccaagtgctgctatggcaagaaaaagtgacattcctgccgtagaacctttgataatgctgccgacacttgatactgttgtcggatatattccagcaaagaaaaagccaagtcccgcaattgccacagttattaccggaaggctgtgcgtcgctgtaagcaaaaagaaaaatattgttgtagcaacgcaatatgccagaataagtttatttttatcaacttttgatgataattttgctgtgagcagtcttccaagcattaccataacccatgtaactgatacaagattagtcgcatatgcactgctcattatgttcatactcttaaaatatgttacaaaccagccatttacacagttttcaagtccaagatataagaaaagcagtaatccacagacataaaatacaggacttttgtaaaatggctgtgccatgctgccctcattcttacccttcttagactcaacaggccagttgtaatctatttccatccatacatataagataacagacagtgctgaaccggcaattatagtataagccggtgcacgccatccaaatccgtttcctatataaagcgatgttataaatggtgcaagaaatgctcccgctgcaaatgtcatatgtaaaaggttaagtgccgtcggcttgccgtttgaattatcattgacaacagcattattgataatgctgacagaacctcgtccgattccgacaagaacaaacgctgcatatattaccggcaccggtggaagaagtgttataacaaaaagcattaccggtattaatgcagaaaatattattatagttgcttttcttcctatctttgatgccatcggcggattcacaaagcttgcaataagattacctattgcaaatgcagataaaaatccaccggcaacactgtaattaattcctgcttcttctataatataaggaagaattgcaccaactaaaagtaccatcgcaccatttacaaaaaatgaaaaatagcacggaaaaaacaatctgaattttgatttcatttttacctccaaaaatatgcatacaaaatggcacgaagctaacgattaacttcgtgccatttatgcggatgacaggaattgaacctgcacgtctgttgacaatagaacctaaatctatcgcgtctgccagttccgccacatccgcaagcaatatatatattatcacaaacagatttaaactgtcaagttcatccattcaatcactttatttgtacgcatttcccatttatgattttctgcacatatcttatatgcattttctgcaatatgttccaattcgtcgtgattcgtcagcagtcttttaattttatcagccgcggcatcaatattttcaagattataaaaaataatattctctccatcaataaaattatctttcagatatccgcttgtatccgtaacacagacagcaccgtttaacattgaattaaacactctgtcgtgtgctccctgtttaaaccacggcattacatttactgatatttttgagcggcttatcatgtcaagacattcctgtgacgaaacatttccggcagtaataatattttccgggtgacgacattcaagcatatcccagccggcaccaaatgtatgaacctttattccactgtccgcaagccttgcaatcacttctgccctgaaataaaatcttacagacaaatcaacaaacatcaggttaggcattatctgttttaactcatcgtccgtaaattgaataccctgattctttagttcttcttcggctgcatcttcaacaatcatttcagggttttctataagctttcttacaagtcctctgtagaattcctgataatcactgtcaagatgtgctataaacctgtcaaaagaatttacaggtgtataatttcctgtaaatataacatcaatgtcacgcttatctactggcagaaatttatctgaaagaatatctcttttttcattaagttcagttccgccaagcacaagaaatccgtcatcaggtgcaagctgcacaccaggaaaaaaccttttcatataccttatatggttcttgtcaatacttatctgcatataattttccggacgcagcggcagatatttatgataatacagcggatggtcaacaaccatgttataaacgggaattttcgtttcattccagaagcttccgccttcaaatgattcgtcataaagcccgtcttcgcctgcaataccattaaaattaaatgtgaacgccatgaatttttttgatttatcagccttataaaaatcacagagctgttttgctgacaatccgcttaatacaaggtcaaaccaatatatttcatatccgtgtttttgaaatgtttttgacatctcaatactgaaatattcctgtgtctcaactccgcccttaaataaaatgacgactttatccattttaacagttccttattgcctcaaatatattatcgagtgcggaaacgtcaagatcttctgcaaatccgccatccacttttgatgctgcctcaggatttatcggaagcttagcaaccgccttaatatcatgttgtgcagcaatctcatcaatatggctctttccaaagatttcatgtttcttaccgcagtcaggacattcaaagtaagacatattttcaacaattccaagtacaggaatatccatcatatttgccatattaaccgccttttccactatcattgaaacaagctcctgcggagatgtaacaacaacaattcctgcaacaggaagtgactggaataccgtaagcggaacatcacctgttcccggcggacagtcaacaaacatacagtcaatatctccccattttacattttcccagaattcctttactgcactggctattactggtcctctccatataacaggatctgtctcgttatccatcaaaagattcatagacattaccttgattccgcccttcgtaacttcaggataaataactgttccttcttcatcacactttgccttctctttaagtccgaatgacttaggaattgatggacctgttatatcggcatccatgatagcagttttcagaccgttttttgccgaattaacagcaagaagcgatgttaccatagatttgccgacaccgccttttccgctcacaaccgcaattactttctttactcccgcatagttatctttatttttttgctcctctactctttcggcacagttagagccgcagcttgaacaatcatgtgtacattcttcactcattatatatactccttttcccttctcccaaatgttggatgtttctcccaattataatatattttgggagaaaattaaactaatcgggagaaaaataatttacataaaaataatttattatattattctaaccacttgtaccgttttaattaacggtatcaaccataaaaagctgcaccttaacggtttttacccgtcaaagtgcagctcttttcattacacagattatttctatggcatatttaatcaaatctgtatattttttacatttaacttacatcgataaaatcattttttacctgcaaatacaggtgttgaaaggtatctgtctcctgaatcaggaagcaaaactacaattgtctttcctttgttttcaggtctttttgcaagaatgtcagcagcctttaatgcagctcccgaacttatacctacaagtataccctctgaaaatgcaatgtttctcatttcttcaaaagcatcatcattttcaatttttataatctcatcatatactgatgtatcaagagtttttggaatgaatccggctccgattccctgaattttatgaggaccggctttgccttctgaaagtacagggcttgtggcaggctctactgctacaatttttacatcaggcttcacactctttaaatattcacctacacctgatattgttccgccagtccctactccggcaacaaatatatccaccttgccttctgtctgtttccagatttcaggacctgttgtcttgatatgtacctttggatttgccatgttatcaaactgtgcaagaataactgaacccggaatctgctcatgaagttcctcagctttttcaattgcacccttcatgcctttaaatccatcagtaagtacaatttcagcaccgtatgcttttaaaatattgcgtctttctattgtcatagtctcaggaagagtaagtattgccttatatccttttatagccgcaactgatgcaattccaatacctgtatttcctgaagtcggctctataattgtagctcccggctttaaaagccctttttcctcggcatcttcaatcattgacaaagccactctgtcttttacagaacctgtaggattaaaatattcaagttttgctattacacttacatcactgattccagacttcttcatatatctgtgaagaaataaaagtggtgtatttcctattaaatccgttgcactatgatacatattctccattttcttactctttctccatttcttaaatgtttctgagatattccataactgaatatatcgcattggcaccgtctgccgcagcagttacaacctgtcttaactgctttgtgcggacatcaccggctgcaaacaggccatttactgtcgtctttgtatcttccgatgcctttacataattgctctcgtcgagcacgccgaactcttttaacagttctgtctggggaatcattccgactgctgcaaaaagtccgcttatattaagctttgttttattgtcaagaattataccgtcaatttttttatctccggtgatttcctcaactctggcattcactataatttctacattttctttttgttttaacttctcaagtgttgaagcagaacctctgaaaaattcacgtctgtggacaaggtataccttttcacatatgtcagaaagatacattgcatcatcaagtgcagtatcaccgccgccgattactgcaactctctttcctttatagaaagcaccatcacatacagcacaaaatgacaatcctctgccataatatttttcttcacccggtacgccaagtggtctgtttttacagcctgtggcatatataaccgctttactttcaagcgttatatcttcatcacagcctattatccatatcccgtctttttgccctaaagacaaaacctgtgcttccgtgaattcgacgccgagactttctgcatgctcacggaacttttcaccgaggctgtaaccgtcaattcccggaattcccggataattgtcaactctgctgctctctgctatctgacctgttccaagatattctttttccacaactgcaacattaagattagctcttttggcatagattgctgcggtaatacccgcaggaccgcttcctataataacaacatctaacatataactaattcttcctttgtcgatacatcgccctcaatgtgaaatgaattaagcaccggcttttccggctccattaatgaaagaatcatataacttgccttgctgtcatatgcaagacgtttatcttcttctgaaggtcttgaaggtgattccggatgtgaatgccagttgccaagcggaacaagaccatttgccctcatatccttaactgctgcaagctgctctttcgggtcgagtgaaaaatgctcatttgaatggtcaatatttgtaagaatatatacttttttaatctctttatcaccgccattcttaacgcctgcaataagtccgcatgcctcttccggaacgcatgactttgcatgttctaagataagctcataatctttttttgtcatcgaaatcataatctgctcctttattgaacattattttttcagtagttcattgcactttatttatcagtacattctacctgttcgtagtcgataagttctgttattgtaggatgacttccgcatactgcacaaccatctgtatttgatggaagtttaatcttgtggaattcctgattaattgcatcgtatgtaagaaggtaacctgtaagaagcttgcctacacctgttatgtatttgatagcttccatagcctgaagacttccgattacgcctcccatggcaccgattacaccagcctgcttacatgtaggaactgcatcctttggtggtggattcttgaatacacatctgtagcatggtccttctcccggaacataagtcatgagctgacccttgaatctgataattccggcatgtgaaaatggcttcttagccataacacaggcatcattaataaggaattttgcagggaaattatctgttccgtcaattatgaaatcataatccttgattatgtccatgatattttcacttgtaaggaattctctgtatgtattaactgtaacatcaggattcatggcattgattgtctcttttgcagacttaacctttgccttgccgatatcagctgtctgatgaataatctgtctctgaagattgcttaaatctacatcatcggcatcaacgattcctattgtacctacacctgctgctgcaagatacattgcagccggtgctccgagtccgccggcacctacgataagtaccttcgcattaagaagctttctctggcctttggcacctacttcttttaaaatgatatgtcttgaataacgttcaatctgttcatcagtcaatgccatagcttccacctcccatgaagtaaaggaattctacattatcgccatcctttaatactgtgctgtcctttgctgcactttcaacaaattcttcattaattgaaactgttacatactccggtgtctcaacattttccatttcaataagttccggtaatgtaagtccgtcttttacttctttttctgttcctgatactgtaatcttcatattttcctcatttccgcctgccggctttttattttatttatttgagattttcctcaatccattctacaagctgtggttttcttacagctccgctctgtcttgccttctcgcttcctttgtcaaacaaaagtagtgttggcacagactgtacatcgtaactttctgcaagctctgtatcaaaattaatattaaccttgtatactgcaagttttccttccatatcatcttctacatcaccgataacaggtgtcatctttttgcatggaacacagctgtctgaataaaaatcaaccagaacgggaatatcactttttaataccttgccttcaaattcatccttattaactcttgctgccat

SEQ ID NO: 854 - DNA, 8845 bp, unidentified
  source 1..8845: mol_type = unassigned DNA
tcattttctgctgccgcagatatcaaggaggggacactcgctgcagcgttctccccttgccttgcagtattcacgtccgaacagcacaaggcggtgacagaagtcggaagacttctccggggggagtatttttctcagatcctcttccacctttgcaggctctttatttttggtaagcccaagccttccgcatatccttatacagtgggtatcagtgaccaccgcaggcttatgaaaaacgtcgcccataacaaggtttgcggtctttctgcctatgccagcaagggtagtgagcttttctatagtatcaggtatctcaccaccgaaattatccattatctgtctgcacattgttacgatagagcgagcttttgttttatacagaccgcaggggcgtattatctcctcgatatcagcaacatctgcgttagcaaaatcctcaatggtcttatattttgcaaaaagctctttcgtgacgatattcacccttgcgtctgtacactgtgcagaaagtctgcctgctatcataagctcgtggggctttttatagtcaagggagcatatgccctcggggtagacctgctccagcctttccactatcatttgtgcacgttctttctttgtcatcggtactgctcctttgtttataagtgctttattactttatattgtacacttttttgcaggattcgtcaaccaaaatttcatatcagggacgatattccagcgggtttgtgcgttataccggcataaaaatgcattttgtcatttttgcgggctgaaacagctttggtcacagtgcactgatttgtcgacatttcacggaaaatttacacgaattatgaatttataatcgtgattttacttcacatttcaaaaaaagcctatgatttttatacaatttcaataaaattatgaaattttgcattttactacttgcaaattgcaaaatagtgtgctataataagtaagtgatgtgcggaacgagtaaaaaagccgtgcacaaattataatttataagatgggagttttaataatggctttgaacaatgcgtatcttgaaagcgtttatgagaaggttgagaagagaaatcccggcgaaaaggaattcctccaggcagtatatgaggtactggaaagcctcattcctgttgtagaaaagagacctgaccttgttgaggcaggtataatcgacagaatagttgagccagaaagacagatcattttccgtgttccttgggtagatgacaacggcaaggtacaggtaaacagaggtttcagagttcagttcaactctgctataggaccatacaagggcggtatcagacttcacccttcagtatgtgcatcagtaatcaagttcctcggcttcgagcagatcttcaagaacagccttacaggtcttcctatcggcggcggtaagggtggttcagacttcgatcctaagggcaagtctgacggagaagttatgagattctgccagagcttcatgacagagctttgcaagcatatcggtgctgacacagacgttccagcaggcgatatcggtacaggtgcaagagagatcggctatatgttcggtcagtacaagagaatcagaaacgagttcacaggcgttcttacaggtaagggtctttcatacggcggatcacttgcaagaacagaggctactggttatggtctttgctactacacatctgagatgatcaagtgcatgaagaatgaaacattcgcaggcaagacagttgttatctccggttctggtaacgttgctatctacgctacagagaaggctacagagctgggcggcaaggtagttgcactttctgactctaacggttatgtatacgatccaaacggcatcaacctcgatgttgttaagcagatcaaggaagttgagagaggcagaatcaaggagtatgtaaacagagtacagggtgctgagtaccacgagggatgcagcggcatttggactatcaagtgcgacatcgctctcccatgcgctacacagaacgagatcaacgaagagtcagctaaggctcttgtagctaacggtgtatttgctgttgctgagggtgctaacatgccttcaactccagaggctatcgctgtattccagaatgcaggcgttctctttggaccagctaaggctgctaacgcaggcggtgttgctacatcagctcttgagatgtcacagaacagcgagagactttcttggacattcgaggaagttgacgctaagctcaagaacatcatgacaaacatcttccacaactcatacaatgcagctaaggagtacggtcttgaaggcaacctcgttgcaggtgctaacatcgcaggtttcctgaaggtcgctgacgcaatgaagtggcagggtatcgcttactaatataagcgtaatatcaaagctatatacaaaacggacggtttttatgccgtccgttttgtgttatatttcaaagacgcatggaatgttcccgtaggtctatttgacctgattttcttttattatcctgccacgctcaaaagcacaagcattctcaagcgttgtgcagcttatggcggctagagcttcttcggtgaaaaagccctgatgagaggtgacgataacgttaggaaaagacagaagccttgcggtcacggagctttctaggatatcctcctgtcggttttcaaagacgttctctgtttcttcctcataaacatcaagacccactccgtggaattttctgcttctgataccttttataaggtcttcggtattcacaagcgcacctcgggaggtatttacgaaaacaacattctctttcataagagagatagtttcagtattgataagatgatagcttgcctcggtcagcgggcaatggagcgagataaggtcgctttctctcaggacttcgctaaggggataatatttcacaaaatcaaggtcggagttttgataaacgtcataagctataacacgcataccaaagccgtggcatatcctgcacattgccgcacctatcctgcctgtgcctattataccagcggtcttgccatggaaatcaagtcccataagaccattcaggctgaaattgttctctcttacctttatatagcccttgtgtattcttcttgttactgcaagcgcaagcgccatggcgtgttctgccacggcttccggagaatacccaggcactctaagcactgttatgccgtatttatcggcggcttttatatcaacattattatagcctgcacatcgcataagaagaagctttacaccatgttcatggagccgtctaagcactgagcctgttatcgttgagcttacaaaggcacacacgccctcacagccctcggcaagccttgctgtgtcttccgtcaagtcagcttcaaggtagatgctttctatatcgggatagttttttcgctgcttttcaaatgaatctatatcatactgctttgcgtcatagaatattattttcatgaaaactcctccaaattttaaagtatttcattttacgcttgtattttttgcagctgtttataaaaatatacggtttttgccttaataagataaaattatcaaaggttgacaattgtgcgtaaataggatataatataggtgtcggtatgtaaaaatatactttaaatatactttaaatgcctgttttctacagaaaggatatgatgccaatgtcacaattttcggaacttctcagagaatacataaagaaaaaagatattactataaaagcccttgccgaaaaatgtggtatcgacagaacatatcttcataagatactcaaaggtgaaaggaaagtgccaagcgtagattttgtagaaaatataagcttgcagctcatgctttccacagaggataaaagcaggctcatggagctttataacatttctgagatgggggaagatgtctacaatcgccgtaagcaggtgtcaaagataatacacgatatggcaaacaccaacatggaagagcctgacgctctgactttcaagacagaagttgatattgactctgtgcctgagatatcaatctacaccgacaaacgtgagcttagaaaaaacctgcaggtgcttatatgcagcgatgttcataatggttctgacattcaggtcatcgctcagccaacagagtttcttaccaatctgctgtccattgccgcagaaggcagcgagtctgccataaaccatctgttcttctttgacaacacctcaggtgaaaaaaacaccgcaaaatacaatctggatatttttccgttcatatgtcaccttgcgcaaaagcatgaaaaatatgaggctttttattattatgagggtgcgtcggcatatttcaactccacgaacatcatgccaaacataatgataacgaataattttctgatcagaacagacagcgattattgcgagggcgttatatacagatctaagcctatggtagaattttatatgcggcagtttgaaaagttcaagacaaaatgtgcaaagcttctcgaccacgccgtggatattttggaatatgtttacttttggtacgatgacaacgcaaatttcatcggcgtggattttcagccatgcaccatgctttgtcttacagaggatatatacaacgcccatgcacttttgccagctgacgcaaagaaatttgtaaaagcaaagctcaccatgggcaagaaggctctttctgaacacaaatttgtaaatctgttcagtgaaaagggtcttgcagagtttatgacgacgggagagatttttgagcttccgagaaattcatatacttttcccactcttgcagaacgcaagataatgctacagataatgatatcgctttgtgaaaacggcatggcagactacaggataataaagaacgactattttgcggtgtcgaaaaatctttgtatcaacatttctgacaacacaagtcttaacatcattgccagaaacaactgcttctctgatttttcttatttgaagataagcgaaacgagccttgttcaggctttctgggattattttcagcactttatagattctgacgctgtttgctcacatgaagaaactatcgagatactcaggtcttatttgtaaaaaatgggcgaccaaaagccgcccactgtaatgatattatttaagctgttcacgcattaaagtgagcagctttttttcacgtcttgacacctgcacctgcgacataccaagttgttttgccgtttccatctgagttttattctgaaaatatctcaggtatataagctttctatcctccgcttcaagggaagctatgacctgacggagagagagcctgtcagcaatttctatgtcaggagcatcaacagggatatctatttgtccgtggcggtcgtcttcatctgagctttcagtaagactaacagggggcagggcgacgttcatggctagagtaacggcttcttcgctttctcctgacagctcacaaagctcgcttactgtaggttctctcccctgctgtatggaaaatcgctcacgttctcttacaaggcgcatggaaagctcttttatgcttcgtgacacttttatcgtgccaccgtcacggaaaagcctttttatctcccctaatatcactggcactgcataggtggagaatttcacaccacggtcgctgtcaaaggctttcgcagcttttacaagacctatacagcctgcaccgtagaggtcgtcatactctatgccacggttgcggaagcggtttgcgcacaggtgaacaagccccagattttcttctgcaagaggggtctcgactatgctgctcattttatactctttctttcaaggttttttcaaggataagggtagttccttctccaagcttgctacgcaccttcactttatccataaagctttccatgaccgcaaagccaaggcctgctctttcctcctcaggtgcagtggtgaaaagtggctgcatagcctgctcgatatcagcgataccgcagcccttatcccttatttttatgtagatgtgtctgttctcgaatatccttatttgcatgaatatctcccctagggtgtttcggtatccgtggacaatggcgtttgtgactccctctgacactgcggtcttgacatctgcaagctcgtcgatctgagggtcaagctgagtaaggaaaccgctgactgcaactctagcaaagcgctcattttcagaatagctgggaaaactgactttcatttcattaaggggttttcgtttcaattttatcactctcctttgttttgtcatcggggctttcattctgttcctgagctgctttcttctcttgtatatacggggtcatatccgtgactatctttgtgagtctgtgcatacctgcaagctgcaagacctttcggatataagcaggaggcgacgccactatcacctcgccacccatttctgacattatcctgtatctgcccataacaagtccgatgcctgagctatccataaaagtcacctgagaatagtcgaggataagggtaagagggttatggcttctaatggctttatctatctctcccctgaaatattttgctgtatggtggtcgatatcgccgcatatctctgccacaagagttctggctgacggatagttttttatctccacattcatgctttatcattcctttcatcttttcgttttatccgctgaaaatatattatcacttacagtgggatttttttgtcgcattatcgtatgggtgaaaaaagcaggaacacacttttttgtgtgtccctgcctaggaaaattattatgttctatgcttatgtattaaagtccgttaggattattcttaatgaagttccagctatctgctgtcatttcatcaagaccatattgagcttcccagccaaagaccttctttgcctttgctgtatcagcatagcaggttgcgaggtcgcctgcacgtcttggctttactacatatgggagcttctttccgcaggctttttcaaagctgtgaagaacgtcataaacgcttgagccttttcctgtgccgaggtttacggcttcaacacccttgttttccattacatacttaactgcgcaaaggtgacccttagcaaggtcaacaacgtggatataatctcttacacctgttccgtcaggagtatcgtaatcgtcgccaaacacaccgagcttttcaagctttcctactgctacctgacagatgtaaggaagcagattgtttggtataccgttagggtcttcgccgataagaccgctcttatgtgcgccgatagggttgaagtatctcagaagtgaaactgaccaatcgttgtcggaaacataaacatctctcagtatctgctctatcattacctttgtatagccgtaagggtttgttgctgatgtaggcatatcctccgtatatggagctttgtttacagggccgtaaactgttgcggaagatgagaaaactatcttcttacagccgtattttctcattgccttgataagcatgagagtgcctgtgatgttgttgtggtaatattcaacaggcttctgaacagattcgccaaccgctttaagacctgcaaaatgtataacagcgtctatcttgttttcttcaaatatcttttcgagcgctgcaaggtcaagaagatctgcctcataaaaagcaaagtccttgcctgttatcttctttattctgttaagagcctccggctttgagtttgaaaagttatcaactataactacttcatagcctgcttcaagaagctcaacgcaggtgtggcttccgataaatcctgctccgcctgtaacgagtatttttgccatattctttacctcccaaatatgtcaggttttttcttacacttacattataccatattttcacgtttttgcaataccatttttgtttcaaacacatggatttttgttgcaaagagaataaaaatatgctatcatatctataacagaccatctcacagaaaggaacacacagaatgaacacagaccgtcattcctttaaatcagatcagacggacgcactttcactgtcagtatacaacgtgggctatgaaaaatgtcaggggcttcacagttggggaagcggcgttcgtgaccattatcttatccaccacatcataagtggcaagggcgtatacaaaacaccgcagggagagtatcaccttagcgcaggggacacttttctcatttacccctacactgttataacatacactgccgacaagaacgacccatgggaatactactgggcaggcttcaacggctctgacgctgaatttatccttgatcgtgcaggcttcacaagagagtgtcccgttatctccgcagactttggaagcgagcttaaagacagtcttgaacgcatttatcgtcttagtggaaacagaagctcagaccttgtgaaaatgacaggtcagctttacatcacgctaggcattcttatggaacgctcgggaagtcaaagccgttcggggagcaccgcaaagggatatgtcacaaaggcgaaaaactacattgcacacaactacacccttgggataggggtcgagaatgccaccgatttcgttggcgtgagccgtgccacgctatatcgagctttcatggaatacgaggggatttctcctgcacagtatataactgatttccgtgtgaatgccgcctgccgtttgctggaagaaactgagcttcctgtgtcagctgtggcaaggtcggtagggtataatgacagcctttatttttcaaggatattccacaagacaaagggtgtgtcacctacggaatacagggctgacgctttgtgtacaaaaggtgaaaacaaggcgttttcggttgacaagggtatataa

SEQ ID NO: 855 - DNA, 9580 bp, unidentified
  source 1..9580: mol_type = unassigned DNA
  misc_difference 6709: note = a, c, g, or t
  misc_difference 6710: note = a, c, g, or t
  misc_difference 6711: note = a, c, g, or t
  misc_difference 6712: note = a, c, g, or t
  misc_difference 6713: note = a, c, g, or t
  misc_difference 6714: note = a, c, g, or t
  misc_difference 6715: note = a, c, g, or t
  misc_difference 6716: note = a, c, g, or t
  misc_difference 6717: note = a, c, g, or t
  misc_difference 6718: note = a, c, g, or t
  misc_difference 7539: note = a, c, g, or t
  misc_difference 7540: note = a, c, g, or t
  misc_difference 7541: note = a, c, g, or t
  misc_difference 7542: note = a, c, g, or t
  misc_difference 7543: note = a, c, g, or t
  misc_difference 7544: note = a, c, g, or t
  misc_difference 7545: note = a, c, g, or t
  misc_difference 7546: note = a, c, g, or t
  misc_difference 7547: note = a, c, g, or t
  misc_difference 7548: note = a, c, g, or t
atggcaaaacgagtaagcagcgaagattttgaagccgaggtccttggatccgatctgccggttgtggtagaattttattcggacagctgcattccatgcaaacagttatctccaatccttggtggcttggaagatgattatgaggaccaggtaaaagtagtaaaagtcaatgtaaattttgatgccggactggcacagaaatatgaagtggcagcctccccgacgttgttatttttcaaagatggcagcgaggttgagagaatccgtggtctggtaaaacgaccgaagttggaagaaactgtcaaaaagttattataaaacaggaggacaaagaaatgttagtaaccgtagcaggagagaaaaaggaaatcgaacagggaactaccatcgcgaaactgatcgtcgatgaaaaggtagaaaacccggattatgtaaccgttaccgtaaacgatgactttgtagaaagcgaagatttcgacaaaacagagatcaaagaaaatgatgtcatcgaatttctttacttcatgggaggaggagcattttaatggcatttacgaatgaacagatggagcgctactcacgccatatcattttgcaggaagtcggcgtgaaaggccagaaaaaactgctgaatggcaaagtgctgatcatcggagccggtggacttggtgctccggcagcgatgtatcttgccgcagccggtgtcggaacgatcggtattgtcgatgcggacgaagtcgatctttcgaacttgcagcgtcagatcatccacggcacagcagatgtcggaaaagcgaaagtaaaatccgcaaaagagactatgaatgcgatgaacccggatgttacagtaaatacttaccgtgaatttgtgacatcggagaatattatggatctgatcaaggattatgatttcattatcgatggaaccgataatttccctgcgaaattcctgatcaacgatgcgtgtgttatggcgaaaaaaccattttcccacgccggaatcattcgctttaagggtcagctcatgacctatgtaccgggagaaggaccatgttaccgttgtgtattcaaaaatccacctccaaaggacgcagttccaacctgtaagcaggcaggtgtcatcggcgcaatgggcggtgtgatcggaagccttcaggcaatggaagcaattaaatatctgatcggagtcggcgatcttcttaccggaaaactgttgacttacgatgcgcttaagatggaattccacacgatcaaactgccaaaagcaaacggaacttgtgccgtatgcggcgatcatccgacgattaccgagctgattgattatgagcaggtggaatgtgacggcaaatagaatgtaaatgtttttttcgaaggaggaaaactatgttaacgatgaccaaagacgattatgagaaaattcttgctcattgcaaggaaggacttccgaacgaggcttgtggtctgatcggagggacaaaagacggcggcgaaaagcacattaaaaaagtgtatcttctgactaatatcgacgagagcaatgagcatttttccatggatccgaaagaacagcttgccgcagtgaaagatatgcgtgcgaatggatatcagctgcttggcaattttcattcacatccggaatctccttcccggccatccgaagaggacaagcgtctggcatacgattccaaagtaaattatctgatcttgtctttgatggatctcgaaaatccggtactcaatgcgtttgtcattgacgaggagaaaaatgtatccaaagaagaattgatcatttcttaaaaagggaaggaagagggctgttgcaggcagctttcttcctttccgttactttaaagaagagaacggagtttatacgtatgatctgtatcagtatcaatcacaaaaattccataaccgaaacgcgggaacgttttgccctcagcgacgaggaaaaagaacagttttttcggatggcaggggcgcagaagatcgacggctgtgttcttttgatgacatgtaaccgctgtgaaatatacatttccgggtcacgtgaagtatatcatgtagtggaggaattttttcagaagaaaaagggcatcacgcgagaagaattttggaaatgcgcgatgcgttacgaaaagaaggcagcagtaaaacacctgtatcaagtggtttgcggcctcgaatccgcggtgcttggcgaagtggagatcatccgtcaggtaaaactggcttatgaatccgcaaagacgcgccagatgacggacggtgacctcaatgtcattttccagagtgcattgcagctcgcaaaggagatcgcagaccagtccatgatgacaagactgccggtgtcggtcggtacattgacgacattggatgccctgcagttctgcgcaggaaaagaagaaccacatattctgctcgtcggagccagcggtgatattggatcgatcgtacttcgtgatcttgtggatgcggacgaccgcgttcggatcgtggcgacaagccggaaacacaaacaatatgaacttgcttttcaggataccgagcaggtccgctgggtgcattatgacaaccgttatgagtaccttggctgggcagatgtcgtgatcagtgcgacaagcagcccgcattacattttcttggaagaaaatgtaaaaaaagtgtggcgggaaaaaccgctttgttttatcgatctggcgattccacgcgatgtcgatgaggcgattgaacaactagagggatgtatcgtcaaaaatatggacgatatccaggcgttggcaaagaaaaacaatgaaaagaaactgacggaagcgaaaaagatcgcattgatcatcgaggaccgcgtggaagagatggaaaaaacacttgcgtttcggatgtttcgcgatgcatttccggaaaaaatggaacaactggaagagaaaaaggcttcgtggcttttgtatcagctgcgggagcacttggatctcgaggcatttgaacaagtgataaagagtttggagggcgaatcctgatggcgtatttcccatttatgattcaattggaagataagacctgcctcctcatcggaggggggaatgtcgcggcgcgcaaagcagaaatgatgctggaatttggtgcgcaggtacatctcgtggcaaaacaggtgtgtgacaaaatatggaaaattaaaaataagaacctcacggttgaggagcgaagctatcagccggaagacctcgaaggagcggatattgtcattatggcgacaaatgacagcaaattgaactcagaagtcgcagatatctgcaaggagcgccgaatcttggtcaatgtcgtcgatgtgaaaaaggactgcggattttattttccggcgatcgtgcgccaaaaggatgtggtcgtagccgtttcgaccggtggaaacagcccggcgctggcagcgaagattaaaaaagagatcgggaagaatctgcggaaagattatgggcagattgctgatgaattgggaaaggcgcgcgaagaagtgatgcttaccgaaccggtggaggcaaagcgcaaggagattttattggatatgttagaggagaaattggaaaataatataatcaaactggggacaagaggaagcgaacttgcgcggattcagacggatatggtgctgcgggcattacaggaaaaatacccgatgtaccgctatgagacggtgatcctgacgacgaagggggatcggcagacggatcgtccaatcacggcatttggcgggaaagcggtctttgtcgaggaaattgagcaggcgttgaccgacggtacgattgatattgcagtgcacagcgccaaagatatgccaaatccgtgtggagacggtcttacgatcgcaggaacgctgccacgcgcctgtgtgcaggacgtattgatctatccgaaagggaaagagattacaaaagagacagcatttactgtggggacaggaagtctgcgcagacgctgtcagattcaggcgatgtatccgaaggcagagtgcagggatctgcgtggcaatgtcggaacaagaatcgcaaaattaaaagaaggaaattacgatgcgatcgtgcttgcagccgccggaatcgaacgacagggcttagatcacgatccacagttagtatatgaatatctgccggtaaaggaaatgcttccggcagcaggacaggccatcattgcggtagagacgcgaaggaccggtttcgtaagaaaacttgtcaaagggatcagcgatgagacgagtgcctttgaactcgaagcagagcgggcggtgcttaccgcgctgaatgcgggctgtcatgaaccgatcggggttttgagccgggtttccggggaagagatgagccttgatctgatgattgaaaaagacgaattggtgcaccgcgtacaggcgcaggggcaaaaaaaagactgggaaaaattagtagaaacagtgtgccggaaatttcgccgggcataaggaggacaaaatggtttatttggttggagcaggtccgggagatccgggactgatgacatgccgtggcgcagaggtgctgcgggaatgcgaagcggttgtatatgaccggctcggaacgagcggattgttggaacttgtgccggaagactgcgaaaagatctatgtcggaaagaaaccgggaagccattcgaaaaagcaggaagaaatcaatgagattttaattgataccgccaaacggtttgaccgtgtcgtgcgcctgaagggcggagatccttttgtcttcggacgcggcggcgaggaagtgctggcgcttcaaaaagaaaatatcccgtttcagctggtgccgggtgtgacctcggcggttgctgtgccggagctgctcggaatcccggttactcaccgggagacaagccgcagttttcacgtatttaccgggcacacaaaagccggcgatgagacaagccttgcgcacattcatccgcaggaggggacaagcctgtttctcatggggatttcgcatcttgcggagatcacggacaaattaatccgggaaagaaaagatccgcagacaccggtggcggtaattgccaatggctgtatgccgggcgagcagatcgtgcggggaacccttgctacgattgccggagacgttgcggaagccgggatccggccaccggcgatcattgtcgtcggcgagaccgcaggatatgattttatttcttccgaccgcggtgccttggcggataaaaaagtcggaatcatcggaacctttgctttgcaggagcggatgcgcagacggctattggaaaagggcgcgcgtgtgtatacggtatgcgagatgaaagtggaagaaacggcggaaatccgtgagttagacaaagaattagaaaacatttccaaatattcttggatcgcgtttacaagccagaacagcattcgtcttttctttactcacgttttccgtgaaaagattgatctgcggcagtttgccggtattcggtttgcggtcgtgggaagcgggacaagagatgccctccgcgagtatggatttgaagcggatctcatcccggaacgttatacgacagaagcattggcggagagcctcgtgaaaacgatgaaaccgggagaaaaactgcttttgccgcgagccttgcagggtagcgtgcgcatggttcaggtgctggaagaaaatggaattgacaaaacgattcttccaatttacgatgtgcagggaaaaaagaccgagaattggaaatatctattggactttgatgtgctgacatttgccagcgcatcgggggttgaagcatttatcaaagaacttggtgccgaaaatgcagcgaaatgggagcaggagcgcagaaagaagccgacgaagattggggcaatcggcgcggttactgcagaaagattggaaaaatatggaatacatgcggatgtcataccggagcagtgtgatatcgagcatttgatagaagaaatggcaaaggagcgagaagtatgattcgtttaagacgactgagaaataatgaaaccgtgagaaatatgatacgtgagacgagcgtatcggtgaatgacttggtttatccggtttttatcaaagaaggaacggatgagaaaattccggtggattcgatgccgggcatttatcaatatacaattgatcgttttccggaagaattggatcgcatacagaaggcaggtgtgtcggcaatcctgatcttcggaatcccggaacacaaagatgagtgcggaagtcaggcttatgcggaagatggcattacacagcgcgccatccgtcagatcaaagagtgggcaccggatcttctggtgattgctgatgtctgcctttgtgaatatacgtcgcatggacattgcgggctggttcacgagggtaagattttgaacgacgagacacttccgcttcttgcgaaaatggcggtgtcgcttgccaaggcaggagcagacatgatcgcaccttccgatatgatggacggccatatcaaagtgcttcgggaaagccttgatgagaacggctttacggatacgatcgttatgggatacagcgcaaaatttgcttccggatattattcgccgtttcgcgatgcggcgcattcggcaccggcatttggcgaccgccgtacgtatcagatggatccggcaaacggaagagaggcactccgcgagtgtcaggcagatatcgacgagggagccgacattatcatggtaaaaccggcacttgcgtatctnnnnnnnnnntgcggcaggcgagagatcttacgagactgcctcttgcggtctacaatgtaagcggcgaatattcgatggttaaggcggcagcgcagaatgactggattgatgaaaaacggattgtgatggaaaatatgatcgccatgaaacgggcaggggccgacattattattacgtatcacgcccttgatgtggcaaaatggctggaggaagaacgatgacaagatcagaagaattatttgaaaagtccaaacagagaatcccgggcggtgtcaattcgccggtccgcgcttttcagagtgtcggcgggacacctgcatttattaaaaaagcaaagggttcacatatttttgatgtggatggaaatgaatatattgactacgtttgttcgtggggaccgggaatcctgggccatgcgtatccgtcagtgatcgacgcggtaaagaaggcgtgtgacaatggtctgacatttggtgcaccaacggaaaaagaatatgagattgccgagctgatcgcggaaatgatgccttcgatggaattgtcgcggatggtaaattccggaacggaggcagtaatgagcgcgatccgtgtcgcaagaggctttacgcaccgcgactatatcgtgaagttccgcggctgttaccacggccactcggacggccttcttgtgaaagccggttccggggtacttcagcaggcggtgccggacagcgccggagttccggaaggatatacaaagtacacgttgattgccgagtacaatgatcccgattcggtacaggcattatttgagcagtatggcagccggatcgcggccgtgatcgtagagnnnnnnnnnntagagccggtcgctgccaatatgggcgtggttccgccgaaagccggctttctggaatttttgcgggagatcacaaaagacaatggtgcactcctgatttttgacgaagttatcaccggatttcgtctggcgcagggcggcgcgagcgagtattatggcgtgacgccggatcttacgacacttggcaagatcatcggcggtggtatgccggtcggagcctatggtggacgccgcgagattatggaatgtgtctccccggtcggaacggtctatcaggcaggtacgttatccggcaacccgatcgcaatgacagcgggactggagactttgaaattgttacggaaaaatccggatatttaccggaaactggaagaaaagacaaaattactcgccgacaatgccagaaaaatatttggtgataaagtatgggtaaatcaggtgggttctctgatgagcattttctttacttcgaaggaagtggtagattttgacagtgcgaaaacatcggacactgaggcttatgcagcgtatttcaatgcgatgctgcatgcgggaatttaccttgctccatcgcagtttgaggcaatgtttgtctccgccgcacatacggacgaagagattgagaagacttgcaaagaaatgagggaatattatgacagatagaaaagatttggtgattattggaagtgggccggctggcttgtcggcggcggtttatgcacagcgcgcaatgcttgaccaggttgtgatcgagaaggagccgtttagcggcggtcagattattacgacggagcgcattgacaattatctcggcctctatggaatgggcggttatgagctggcaatgaaattccgtgagcacgctgacgcgctttcggttccgtttttggaaggagaagtgaccgcgattaacgacgatggcgaagtgaaacagattacacttgcgagcggagaaacgatagaaacaaaagcggttctttttgcgacaggggcacgtcataagacactttccgttaagggcgaaaaggaacttgccggtgccggcgtttcgtactgtgcaacttgcgacggtgcctttttccgcggaaagacgacggctgtcgtgggcggcggcgatgtggcgctggaggatgccttgtatctttccaacatttgtgaaaaagtttatctcatccatcgacgtgatggacttcgcggggcgaagatgcttcagcagaagatcaaggaaacggaaaatatcgaatttctcccattttatgaggtacaggagatctgtggcgacggcaaagtggagaaagtgattttaaagcagaatcagacgggcgaaacgagaaatctcgaattgtccggtatctttatcgcaatcggaatggatccgcaaaatgaggctgcccaagggcttgtcgatctcgacgcgacaggctatatcgtggctggcgaggactgccgcacaagccactctggcatctacgcggccggggatatccgtacaaagcagcttcgtcaggtggtgacagcggtagcggatggagcgacggcaatctcgtccatcgagcaggattctaattgttaaaatatggcaaaggaggaagcaaataatgtatattacgagaaaaggacaatacgccttgttttttatgataaatctggcaatacatgcaggcgaaacggttccggtcaaacaggcagcaaaggaatatgatctgtcagaaaaatatcttgagcaggttgcttccaaacttcgtcatgcaggtcttgtcaaggtgatccgcggcaaccgcggcggctattatcttgcgaagccggttgcccaatacacggcagcggagatcattgatgtgatcgaagggcagcagaacgcggtagatattgacatttacaaaatcagcgaaaataataagacgatgaacagcatcgtgcatgacctcgggcagtcggtggacaaagccatcgacggggtccttgaccatatcacgctggcggacatggtgaagcggtaccgcgaggaatcgtcatttgcgtatacaatttag

SEQ ID NO: 856 - DNA, 31481 bp, unidentified
  source 1..31481: mol_type = unassigned DNA
ttaccacagaccgctgccattgaccttctggctgatcttgtttgtgatcatgaccagtgcgaagctgacaaggcagttgaacataccgaccgccgtactgtagctgaactgtgcatcgatcatgcctttacggtaaacatatgtgttgatgacatcggcggtgttgtaaattgcggggttgtacaacagcataacgcgctcataaccgacattgaagatcttacccatcttcaggatcagcataatgacgatggtaggcgcaatgccggggagcgtgacatgcaggcactgctgccaacggttcgcgccatcgaccttggccgcatcatacaattcctgatctatgccggaaagagctgacaaatagatgatggagttccagcccagcgtctgccaaagctctgtcaatatgtagatcggcaggaagttggacgggttatttagcagcgcctgctctttgatgccgaaaaagttgtgcagcacctcggtaatggcaccggtggagctcgtcagcgtgataacgataccgcagataacaactgtggagataaagtgcggcacatacagaagcgtctgcgctgtcttggagaatttcttgtttttcagctcgttgataagcagcgccagaatgacaggcagcgggaaggtcagcagatccgccaccgcaatgcgcacggtgttgatgagcagacggccgaagtaatagtccgagaagaaagacttgaaccattttaggccgacaaacttgctgccaaaaatgcctctggcgggcttgtagtcgatgaaagagatgtacaaaccgaacatcggcccgaatttaaagatggcatagtagaccagcaccggaataagcatcgcatagatcatgccgttgcgctgcagatcttttttgatgcggtagctcaggggcacatgctctgagcttaaggtgatcggctttttttcttcggccgccgcggctttgctctttgtgctcatgcttgattctcctttgtgtcaaggcggatgacctcgtgatttttagcggaagaataaaccgcgtggagaagcctagtactgacaatcgcttcctcaccactgacagggaaccgttcccctgccgccagcttagtgtagtaatcctcaataaggaacccgtgaccgctgccccaataatccttgccgaacaccgtaccggaggagaaatccttcgtttctgtcttgccgtccagttcagtagtgacaaggttgccgaccatgcggatactgccattctcgcagacgatttctaactctacgggggcatttttcacatagcagttcgtgcagaaaaagacgagccgctcgccgttggggccggtcataaagacatcgcaggtatcctctgtctcaatgacgcccttgtgacgcttggtggagcagcttgcctccacagtcttgatcggcactgtgagccactgcatcagatcaaatgtgtggattgcctgattttccagtgcgctgccgccctccttgtccaaggtaccacgccaatcagattcggtatagtattcggggtttcggttccagaacacagcgccccgtgcccccagaaccttgcccatcctgccggagtccatcaggctgcgcatatatctggacgaatcgttgtagcggttctggaagcagatgccaagcgtcctgcccgtgcggtcgcggacttcaatcatcttttcggcatcggcggggtccagcgccattggcttttcgcaaagcacatgcttaccatgctccatggcttctatggcaacctgcgcgtgcagatagtggggcaggcagatgtgcacaacatcgatttccgggttatccaacaccctgcgatactctgtctccgtgtgtgggatgccgtaggtttctgcggcggctgcggcacgctccgggcgaatatcgcaagcgacaacacagtcggcattttcgacatttttcagggccttgaaatgatttttggagatcataccacagccgataactgccgttttaaatgttttcattggttgtttcttcctttttgctgtgcagctccctatattgagtaggagttacaccctcatattgtttgaagatacgcaggaagctgcgcagactgccaaacccgcaggtgacggcgatcgtctctaatttttcgtcctgcagcagcttttctttcacatgctctaagcgcactttgtgaatatactgggtcaggttcgtaccgttcatctctttgaagtagcgggaaacaaacggagcaggacggtcaaaatgctctgagagtgcatttacattcagcgcagcatccgaatagttagcctcaatgtagtcccgcatctccagatacaggcggcctttttcatccgctgccgcctcctgttcagaggcgcgaaccgcttggcagacagtgcctgccaaccgacaaagcgcctgctccatcgcctcggtgttaccacggcgagcggcctccataacgcgattttgattttcggccagctcgggatcatcactccgctgttcgcctgcacgcacgatggtcgacataatcttacccacgaggaactgcatacctgcagggctcaagtagttttcctggttttggcgcatcaacgcttgaatctgtgtacaggcctcgctttcatcgccgctgcgcacagccagatgcagcttattttccgtttcaaccggatagcgtactgtcgtgtcgccgggctgtaccttcaggtcgctgtagaatatcgttccggtatcctgcgtgcgctgctggtattggtatacacggcacacctcacggtaagctttatacaccccatcaatgccggtgtgctcaccgctgacggcaatgtcgtagcggaactcaaaatgctgggccaaaaagctgcggcagtattcataactccacaaaatgctttcaagcatctccgggtcttccttctcggtccagataatgtaaagctgcatgccgccttcacggaaacaaaggttctcaagactgcggctcgtaagattctctctggttacattctggagtatgaaccactgcatctcatatattttgtcaggatccttctcatttgcaagatcctgttcctgcaggcggtaggccagaagataatactgttttgccctgtggatcgggaagccgagattttccagctggtctgtatcggcctcgtttgccgcatctgcgttcgttatcatcgcgtgaaactgctcacgcagcatcgcggtacgctgctgttcaatgagatcggagctttcgacattatcctgcacaagcttctgtacgcggctgtcgatataggcgaaggcatcggtcagattttcctccgggtcagccgcattgccacggtgcagcacctgcacgatgttgcgcagcttcaaataacgcttggccgcgctgttggcaataaccgctaccgtcaacagcaggtagatgatgacaacaacagccaaaagcttctgtatatcaatgattttcgatgcaaacgcctgttccttcagaatgactgcaatgtcccagttttcgtaggtggaagaaataatggagatgtattcctctttgctcgttgtatgtgctgcttcgtaaaacttacggcttccgctgcttttaatcagctctgtgacagcattttccgttgccgcagggagttcatggttagcaaccagcacaccgttgttacggtcattgatgcacagtgtatcgttattcagccaatcagatgccttgaacagatcctccaaatcaacgatcataaccgccactgccttatcaggctctcggcttgtgatgttcagcggacgcatcagaaccagatagtttttgctatccttgccctgtacaacaggttgaaatacccgcgttgtcactaagtcctgcttcaatatttccatccaatcctcatagctgatgccataagcctccagcacaaggtcataaaatcgatggctttgcccgtatttcgtgttggatactatcgcatccgtggacggaaaataaagaaagtatgcatcccccataccgtagttgatgacatctgtagagattttcctcgtaagcatgtagtaatcataccgtggaatatcatcatagtcatccgcctgacgtacggcctcaatggccgctgtgctgctctcctttgccgtgatgttgcgcagcagcttaaccttctgatccagccagacccgcgtcatatccagctggatgccgttcgtgtattccaaattgtcccgcagcacatcaagatatctgtacccggatgccaaaagcagcgtcagggcaataacagaaatcagcagataggaaaggcaccactgccaaaacatttttgtaggggcccactttttcttttcagccacgtttgtatactccgtttcttcggcttagcttctgctgcgggcagctgttattttgtgaccggttccttgcaatgctcctgcagtttttcaaggaacagttccccgtccacggggatgttgacccattcgccgttcagccaactggaaagatgaatagcgttggagatctgcaagccgcggatgccctcggcgccgggggcaatgggctttgcacctttcaggatgcagtcacagaaattgttgataatgccggggtgggaggtgtaagtgcccttgatgggaatcttgcactcccacacttccggcttgccaagaccacccttgtaggtggcgttgaattccggttccggaatgcgcagacggtagaaggtaagctcgttattttctactacaattttaccatttgtcccgtcaatttccaaacgatttgtaccgggggcatcccctactgtcgtaatgtagcagcctgtcgcaccgttttcgtattccacaagggcataaaggtcgtcctcgacctcgatattgcggtgctttccgtagtatacctgagatttcacgcgcttaggaatgccgcacatccactgccacaaatccagattgtgggggttctggttcagcagcacgccaccgccttcgccatcccaggtagcacgccagccgccctgatcatagtagctctgcgagcggtaccaatccgtaacgatccaaataacgcgggtcatctcacccaaatcaccgctgtcgatgagatccttgacctttttgtacagcgggttcgtgcgctgattgaagtccatacagtagacaagctccgggtgtttggccgcaacagcgttcatttcctcgacctgcttggtgtagacgcccgcgggcttttctacgatgacatgcaggcccgtttccatcgcttcgattgccatcgaggggtgcaggtaatgcggcaccgcaatgatgacagcctgacacacgccggagtggatcagctcggatgcatcggtaaatgtctgaatgtcctcaccgttcgtcttttttgccagttcaagacgggcggggtcaatgtcgcagaccgcagtcagatcgacctgcggacactttccgtcccgaatcgcgcggccatgctggctgccaatatgaccgtagccgatgataccgagttttactttatcagccattattttgcgcctccaactgttttaggtaagcaagggcggccgcaccgtcctgctcgatgttctctgttttgccctcgatactcatgcggccgtggtaacccgccgtgtgcagagcagcaaaaagctcgccatagttttcgccatcgccgggcagcggatagcgccggccattgccggacgcaatatggatgtgtccaaagtccttgatgactgcgatgctgttgaggtcatcgtggttggcgcaaacatggaagtagtcggccagcagccctacattctcgttggccacatccctctgcagcaatgcgccctcggccacggtacagaccatattggtttcttttcggctcaatggttcaataaccaccttgatgccgtaccttcctgcgatttcacccgtcagtcgacaggctttgacaaggttctcgtaagcgtccagatacttgacctccggcgggcatgtacggcacttgccactgccgaacacgaccactttaccatgcaaatcggcaaccattgccattgccttttccagataagtttccaactcatcaaggctcgttgtcttaccatcaacgaaattcatcgttttggggaacagaatgttgaagcactccgcctcgattccgctctcctccagcgccttcttgcctgcagcgtacaccgcagaatcaaggcccatggtctttgttaccgaaagctcaatgtagtcatagcccaatttttttacaagcccggcattttcgatgccggtacagataccgtatctcatcttgcaggctcctttctcagcgcagttctaccgcattctctgtcagcgtcaataccttgccaccagccagcgtgaccgtggcggcatcaccattgatggcagcttcggctctggttcccgccggggccagcaccgtaataaagtggatgggtgctttaccgctatgcttggcaatcagctgcgggatgggcttacgccatgcgtaaccgtagctgatccacccaccgatgggatcctcgctgccctcaaggatttcaaaatcgagctttttgtcagcctgtacggtcatcgtatacccgcgtcccttttgggaggtatagtcaaacttgccgttttctccatccagatggccaaacgcaaaattataatacaggcggatgtcatggtcttccctgcagatgccggttacgcggtcctcaatgacatagacatcatcgggcaggcgcacaacgcggcggcggtggaacatcgggtcatccatgaagtcatagccgttatgagaaatgtcgataagctgatactgctcgttttcctcaaacgcgtgcaggtaggtacgtacaccgcgggtgcgggtaacaccgggcacggtacccatctcgtggtcatccacatacagggtgttatgcgctttagcagacaggaagtaatggcgccaatctttccaacaggagctattgtaaatgtagcggcccgagtctgtcagaatgtcctcgcctttggcgtgaatctccacatggcccgtgtcattgtgggagtgcgagctgacctcaccacgctcaagctggatgccgtgtacatggaagtagctgtcctccgggccccagcccgtgcgcatgacatagatacccgccgggatgtacttatagttgcgctgtgcagggggtgtgccctgcttgcccgccgtggccataaaccggaagtcctcgcggcccgtttcctcgtaccatgtacggaagtacgcgcgcatttcgttcaaatcataggggtcgaatgtcaggttcatgccctcgtacagcgaggtatcgcagcggcgggtcgtcagatcgtctcgatcggcgtcaccaatcatcggcgtggacaggtctggcttgaccagactcatgataaactgtgcggatttttccagtgtcggctccatgtagggcggcacggggatgtcgttcagcttgcacagacggtagcactggaagtagacgcccgcagccaccatgtggtagatgggggtgcgctccatgtgaatgccgtcattgtcgaaggagtacttaacttcctgcatgacccggcggtagccggtcatgaaccagtcggatttgatttccgggaacagaatgccgcattccagcagcgtaccgctttccatcgtcagccagttggacgatttcttgtggttgctgtaatgggtcatcaagaaatctgcatgatcgcacagcagcgtcaggaatgtaacccatccctctcgatcccatacaggcgaggtgcggaatgcctccatgcagggcagccagaccgtgtagatgcgcatggccgtctcgatggtgcgccaggagtggccggggaatttgtacttggccgcagcatcctcttcattctccataaagggggctacaggccatgccttgccccactcggtcatttcgtgcaggaactctttcgtgtacttttcatccttcgtcaacgcgtaggcacgagccaacggctgccagtaaatgtggcggtacagcgaccaggtccattcgttatcgtgggaggtatgctccgtcgggttgaagaaccagtcgatctcgccatcaaacttgtgaccatagatataatgatccagcgtctcctgcgcatccttcaggatgccatcgaccttgcactgctccatctccttggcggtaaagagatacttcggcgttgtgcgtgtgcggaaatgctcaacaaccgcatccattgcgccattcgcatccccctgtgcatagcacatctttgctttttccagtccgggcagatcataattgatccgttccagcagctctgtcattctgttcataatcttgtcagcaccccgtagtgtttccttatagaaatggcatccgaaagagcattcctccggatgccatttttaacatagtattgttgctttatcgcatcggaactcagtttgccatgtaggtgtcgtatgcttcctgcatcatctggactgcctcttcaatgccggcatccttcagcttctgctggtaggaatcccactcgctcatcggggtggtgccgcagatgaagctggcttccatctcatcggccagtgtgctgacctgactcatgatctcggagtagcggtcctgattttcttcagaaacggatgtcggcgggaacatatgctcacccatgtcggtcttcatggaaagttcaagcgcttccttctggttgtcctgagagtaatactgatcaatatggtcttcactttggacaccaacaccagagcaagaagcacgagtataagcagccaatgcctgcgcaacactccaaccatctgggttattcataataagatcggtgtagacaggcttgccgtccttcatctcgtagctgacgccctcgatgccgaagttgtagcagatctgtccttcttcgctgtacagccagtcgagcagccaaacggcggcctcaacatttttgcactgagaagaaattgctgcggaagaagcggactggtcatagatgttgttcatcttggagaacttggcgttctggcccttggtagagctgacaggtgcgaccgcgcggatgtattcttccttaaagttggggtcggcgtccatcatagccttggtgtagttgccgaggccctgaccgaacggagcatagcccagaatgcagttgccggagacgaagtcggtctgggtggacttcttgtcagcctgcatccagtcgttgtccaacaggccttcagcataccagtcggccagcttctgaatgaaatccttgcggctgtcctcaatcaaaccgttcttcacaacgccgtcctcgacgtagaagctgccccagttgtcgtaagcggaggaccagacgtccttgacccactctttacgggtcgtgaacggcttactgaagccggcagccttggcggcacgcaggacttcttcccactcatccattgtctcaggcactttttcaaagcccagatccgccagcgcatcggctcgatacaggaaacctgaggaaaattcggtcttgttgggggactccagaccacgcaagcaggggaagcaataatagttgccgccggaagacttgatcatcttgctgatttcgggattttcttccaaaatcttgctcaggttcggggcgtccttcatgtagtcatccagcgagatgatgacgccgtcattaacagccgcgcctgcaccgccggagtacttcgtccaagtgtactcgatgatgtcgggatactcgtcggaggccagcataacggcgaattcttcggcttcagagccctgcgtcgggtgctggaattcgatggtaatgccggtctgctcctgcacatactttgcccacggcgtgtcgccgaggtttgcgaagttgtcagagacgttgccgttcaatccggtataccaagtcagcgtagtgcccgcaaagggtttgtcgctgtccgtggtcgcttccgcctcagtggctgcagacgatgcagtttctgtagaggttgctgccgtagaggatgcagaaccgccgcagcctgccagcgtagcgccaaccattgtggctgacatgccaagcgccagtgcgcgcttgagggtgctttgctttttcatagtgtttctccttcatatttattcccgggaagtccttcttgggaaagcatttcccggtttttgtaacaagtaataaagaggtcgtgcagcccaacgatcgtgtggaatgtgtcgtcatcctctctgatgtcctccacactttcggtcggaatggaaacaatgggcagctttgcaattttttctactgcctccaaatgagggatcgcacactgtacagtgcagacaggatgtttccctgtgcgcacggcttcaatggcatcgtagaatttttgcaggcgctcccccttggggatgcggccatagtcgatctgctcgccaatatcgccgatgtagacatattcggctattggcccactgccaaagtcttttccgaagtaaaccgtgcccttctcaaagcggtattcagctatagggcccagcttcttgtctgcaatggcgtggcctgtgccgtaccacagcggcacacctgataccgtatgcgcccgaactgtaatcgtgtcgaaattttcgacattggggtttcctttatagggctcggcctgtacatcggccaactcggccgcgcgctccagacgctcccccagcaggaaagtcatcacttgaaattggtgggcgcaggcattgttgaacgggctgtcattcacagcacagccctttacatctatgtgccccgcccagctgttgcgggcgtagtatttatcaccccgccgcatcgcatgcagtgctttcatgtaaagaggcttgccaaagcggccatccagaatgtcttgcttcaggaccagtacatcgcgggaataattaagctgatagcccaccgaaataaacttaccggtttccttttccagctgttccagcttgcgtgcgccctctaccgaggtacagaccggcttttcggtcagcacattcgacccgtgcgtcaggcaggtgacgatctgcgaataatgcagatgaatgggcgttgagacaacggccaaatcggcggtatgctctttatagaagtcctcaggcgtttgataaatcggaatgttctgttctttaatgatgggatacaaatctgcggcattgggaacgacctcacagatacccgcgatctttataccgggaatgtcgcgctccgatatctccttgatgtagttgctgccatacccgcagatccccagcagcagaatctttaccactgcctgctccattttctgctcactcctctttggcgtgtatcttcaaccgtttgggggttgtttttcactgcacccccatcctatcaccccaatgtgtcaatgtaaacagacagcttctatttgatgtgacaatttttgcgcttcgttttatgctcgatatatcatccctatttttatgtcgatttttgcttccgttcatttttagacacttacaaagcatttgttcatgctgcagccctaatttttatagccatagcggcggggttagaactactttcatggcgccgaatatttttctcttgcttcgtttcttctttatattatcgttttatatctctttgtcacccaaccactattttgtcatatccaacgattctttcccgctgtctggtctattatgcggcaagtgcaaatatttccgcttgacaaatgtgaaaaaatctgtaaaataatagattgttagccttttctaacccccgttttgatttcattgcgcatcaaagtggctgcaataatcgcatccttgtcagcttgcaaaatcatttcattcttatgtatgtgatgaacgccgcgcgctgcgcgtgcttgcaggctgataatttttgcaatcaggttaggtaacgctaatccgtaaatctgcgctcttgctgcggcgcaaacaagctataagggagtatcgcatgatagacaaggatcttctccgcctgctcggcggcaacaaaaagtatatcgccttctgtgtaggcttgatggtgctggggctgtttgcgaatgtcggcatcactgcatccctgtgctgggccattgcgcttgccgtccggtacaacggcggtgcgggtgtttttctggcaccggcggtctgtgcttgtatcggattggcggttcgctatgccaccactcgccttgtcggggatttgaaggatacgctggggcgcagcgtcaagaaagatctgcgcgaacgcgtctacaacaaaatcgttcggcttggcgtgcgttctaccgatgatatgagcatggcgggtctgacccagattgcgctggagggtgtggagcagttagacctgtactattccagctacctgccgcagttcttttacgccatgcttgcaccgcttttgttgtttgccattaccgtgggcatttcgtggcgcgtggcattggtgcttttgtgctgtgtgccgctgatccccttatccattattgcggtttccaaatgggcgaaaaagatttttgccaagtattggggcaaatacacctcgatgggcgactcctttttggacagcgtgcagggcttgaaggagctgataattttcggtgccgatgccgcacagcaccgcaagatgaacgaaacaagcgaagaattccgcaaaatcacaatgaaggtccttgtgatgcagcttgccagcacgaccattatggatctggttgcctacggcggtgcagggcttggcatcgcaatggcactgctctccgtgacaaggtgggggctttcccccattgcggcactgttcctgattctggttgccgtggactttttcctgccgctgcgcgcgttcggttcagcgttccatattgccatgaacggtgtctctgcggggcagaaaattctctcccttctcgggcaggatgaccctgtctgggggcaggaggctgtgacagataccgagctgaagcttgagggggtcaccttctcctatgatggcaagcgggatgtccttgaaaatgtgacgatgaccttcccccgccacggcatgaccgcccttgtgggcgagtccggctgcggcaaatccaccgttgtgaaccttttgttcggcgcgttccgcccgaatgccggtgttgtcacagtcggtgggaaaaaattggagagcctttcccgcgcatcttactattcgcacctcgccgttgtcagctacaacacctatatcttcaacgaaacggtgcgggcaaacttccggcttgccaagccgcaggtcaccgatgaggaaatctgtgccgcgcttgaaaaggtcaacctgctcaccttcctgcaggagaacggcgggcttgacaaaatcattaccgaggatgcggccaacatctccggcgggcagaagcagcgtctggcgctggccgtgagccttgttgccgacaaggacatttacatttttgacgaggcaacgagcaacattgatattgagagcgaagccgtcattatggagaatatccgtgagttgtccaagaccaaaagcgtcatcgtgatctcccaccggctggccaatgtggtcccggcagatcttatttattatatggaggcgggccgcctgatcgaaaccggcacgcacgccgcgcttatggcacgaaacggcggatatgccaagctctacacagcacagaaaaatcttgaggaaggctatgcggaggtgctgaaatgaaacaggattccaagcttcgcagaagcggcgccgtaattatggcgaaccttattttgcttttgggcagtcttgcctacattatgcttttggcagtcataaacggctccgttggctttctctgcgccatgggcgtaacgctgtgcggtgcggtcggcgttgccaaagccttgggtgagagcatcgccctgtcctatggcacaatcattgcccttgccatcggctgcggcgttttgcgcggtattctgcgcttttttgagcagtacagcaaccactacattgcattccggctgctggcggtgctgcgcgataaaatcttcggcgcactgcgcgcgctctgccccgccaagctggagagcaagcaaaagggtgcgatcatcgccatgatcacctccgacattgaaacgctggaggtattctacgcccacaccatctcccccgtctgcattgccgtcctcgtgtccgcctgtgttttctgctttgtgggcgcggtctcctcgtgggcgatcgctctggtcgcaatgctgggctaccttaccatcggtatcgttgtccctgtcatcgcatcgggccgcttaaaagcctccggcgtgcgataccgtacggaatttgcaagcttcaacgccttttttctggacagcattaaaggcatcagggacatcgtgctcaataacgccggtcagcagcgggaaacggaggtcaacgcgcgttctgaggcacttctcaccgaaaccaaaaagatgaagcacgacatcaccaaaaccaccgccgcgaccgagctgtgcgtgtctgtttttatcctggcaacgcttgcagtcggcatctttcttgtagcaaacggtcgtctttccgccgggcgcatgatcattggcgttgtcggcgtgtttggctcgttcgggccggtcatcgccatctctgccctgcccggcaaccttacccagacctttgcctcgggtgaccgtgtgctgaaccttttggcggaaaaacccgcggtaacacctgtaaccaacggcaggcggaccgattttgaaagccttgccgtaaacaacctttccttctcctacaatgaaaacgccgaggttttgcaggatattacgatgcacgccgagaagggcgagatcatcggcattgtcggtgaatccggctgcggaaaatcgaccttcctcaaattgctgctgcggttctggcaaaaagacagcggtgaaatcaaatttggcggcgcggatgttgacagcatcaacaccgacgagcttttgaaaaatgtaacgatggtcagccagacaacctacctgtttgacgaaaccattgaggacaatctgcgcatcgccaagcctgacgccacgcaggaggaaatcgaggcggcctgccggatggcctcggtgcatgagttcatactctctctgcccgatggctacaagacgcgggtcggggcgctgggcgataatctgtctgccggcgaaaagcagcgtatcggcttggcgagagccttcctgcggggaagtgaatggatcctgctcgatgagccgaccagcaatgtggacagcatcaacgagggtatcattctgaaggccctgcaggagcagaagcgcaaaaagagcattttgcttgtgtcgcaccgcgaatccactatggctattgccgaccgcatttaccgcgtaaaggacggcagaatggccgaaatttaatgaggaagctatgaatcaaaacaacatcgccgccaagcgcgagcaggaaaaacgcatcgtttcactgatgatacgcacctactgcagggggcaccacggcacaaggcaggggctttgcccggaatgtcaggccctgcaggagtacgcgctgctgcgcgccgaccgctgcccgtttatcgaaacaaagaccttttgctccaactgccgggtgcattgctataagcccgccatgcgggaaaaaatccgtgctgttatgcggtattccggaccgcgtatgctgttcagccacccggtactggtcgttcggcacggcatcgagagtattcgtgaaaagaaacgcttggagagagaaaacaatgaagattaaaaagatcgtatggctgctgctcggtttggtcgggctggggcttggcgcactgggtgcagtgctgcctcttctgccgtctgtgccgtttttgatgctggcgctgttcagctttggtaaaagctccgaaaaactgcacagctggtttaccggcacaaagctctacagggataatttggaatcctttgtacaagggcagggcatgacacggcgtgcaaagctgaaaatcatgggcacagtcacgcttttgatggcgttcggcttttgtatgatgctgcgcgcggggctcgttctcccctgctgcattctggccggcatctggctggcgcatattttgtattttgtgttcggcgtgaaaaaatataaccctgatcaagaatcctgacaaaaaactgccttgccgcatttgacggcaaggcagtttttttacataatttcgagcattgcctgcacaaacgcagggtcaaaccgtgtggcgctctggtcactcagttggcggcgaatcttttcctctctctcaccacgcctgcggtggcggtccacatagtcagccacagccacaatacatctatcaggctgccaaaaactcttgtaggggcgagcattgctcgcccctacccgtttctctgtgaaaatgctttcctgaaaaacgcgttgctgcaccaggatagcgggtgaccaatggtcgcccctacacattcaataggacaagaatgtgattttttgacatgctgatctatctattatatttttattagaaaactgcggaaaatcaagcccggctgtgaatttgtttttactgcaaaaattataggtaaattattttagctaattctattgacatgtcaacaattcgtggtataatgacttcgttgcaaatttgcatcaataaatttaggtaaatatgcaggaggtacctaccatgtgctttgaggaactgaaggaagtatttgttgacaccctgagctgcgatgccgataaggtcacaccggaggcaagcctgacagaggatctgcaggcggacagtctggacgctgtggagctgaatatggcatttgaggataaatttggtgtttcgattgccgatgaggatcttgtgaatctcaaaaccgtgggcgacatctttgactatctggccgcccgcgccgcctgagggagccgaaagccatgagcaccattgaaaagctgttcccggtcacgccgcaggagcgcagctttcagttgaaggcccgccgcgatgccggtacagcagcccccaactggacaccgccccagtttgtggactgtgaaaagtgcggacgccgcgccacacggcaggtctgggccaaaagcctgtatgtctgccccaactgcggcgtgcatctgcccatcggtgcctattaccggttaagccttgtgctggaccacggcaccttcaaggagctgaacgctgatctgaccccgcaggatgtgctgcattttccgcgatacccggacaagctgacggcagccgccgccaagaccgggctgaaggaggcggcggtcacggccacaggcaaaatcggcggtgtgcaggcggtggttgccgtgctggacagccggtttttcatgggcagcatgagcaccgccgtgggcgagaagatcacccgcgccgttgaatatgcggcggacaagcatctgccgctcgtcatcttttccgccagcggcggcgcgcgcatgcaggagggcatcttcagcctgatgcagatggccaaaaccagcgccgcactggagcggttcagccgccgcggcggactgtatatcagcgtactgacccaccccaccaccggcggtgtgaccgccagctttgccagcctgggtgacatcatgcttgcagagccgggggcgctcatcggctttgccgggccgcgcgtcatcgagcagaccatcggcgaaaagctgccccacggctttcagcgcagtgagtttcagctggagcatggctttctcgatcaggtcgtaccgcgcgctgcgatgaaggaaacgctggagcgtattctgcgcctgcacacccaaaggaggaagtacagttgatcaaagaggttttgcagcagcttgaaccgctggacgcacagatcgacgcactaagcggtgcagatgacggcgagatgcttgatttgactgcccacgcagccgagctggcagagcttgccgcgcaggaggacgctcttctgcagcgctgcacggcattgacgccggaggatcgtgtgtttctggcccgccgacctgaccggccgcacattgatgagatcatcgacaacctgttcaccgacttttttgagcaatgcggcgaccggcaatgcaaggaggatgccgccattctctgcggtattgcccggttccatgggatgccggtcacagtgctggggcaccgcaagggagcctcgctggaggaaaacctgcgctgcaacttcggtatgccggggccggagggctaccgcaaggccctgcgcgtcatgaagcaggcggaaaagttcaaccgcccgatcatcacctttattgatacgcccggtgcctaccccggcaaggacgccgaggagcgcggtcagggcgaggcgattgcccgctgcctgatggagatgagcggcctgagtgtgcctgtgctggcagtcgttaccggcgagggctcaagcggcggcgcactgggccttggcgttgccaaccatattttgatgctggaaaatgctgtctattcggtgctcagccctgagggctttgccagcatcctctggaaggatgccgcccgcagcggtgaggcctgcaccatgatgcggctgactgcgcaggatctgtacgatgacggcatcgtggatgagatcattcccgagccgctgggcggcgcacagcgcgggcgacaggcattgtttgcccggatggataccgccattcaggcacatttggcaaagctctgccgcatgagcggtaaggcattggccgatcagcggtacaaaaaatatcgccgcatcggagaaatgaggggcgcatgagaggtctgcagctgattgcgaccggcggggccaagcccggccgcgttgtgacaaatgaggaactgagccatcaggtggacaccagcgatgcatggatcaccacccgcacaggcatccggcagcgccgctactgcacggacgaggaggacgcagccacactggccatcgccgcagcccgtcaggcgcttgcgcgcagcggccttgccccggaggatattgcctgctgcgttgctgccaccctctcctcccccactgccgcgccgagcgtggcatgccgtgtacaggcggcgctgcacctgccggaaaaccgcccggcctttgatgtgaacgcggcctgcaccggttttctgtacgctgctgcggcagcccatgggctgctggctacactgggcgggcggtacgcgcttgtcatcggctgcgaggcactctcccgactgacagaccctgctgaccgctccacctgcgtgctgttcggtgacggtgccggtgccgccattctggagctgaatgataccgcgccgtttgccgttatgctgggcgcgcgcggcagtgacgcgatccgggtcggcggtgtgtccgcacgcgataccgcgcccatcacgatggacggccgcgccgtctttcgctttgcggtggaggccctgccgcactgcctgcacacggtgcttgaccagacaaaccagacgctcgatgatttggactgggtggtctgccatcaggccaacagccgcatccttgatcactgcataaaacagctgaacgccgaccccgccaagttttacaaaaacatcgaccgctacggcaacacaagcgccgccagcatcccgctggccctgcatgagatgagcgaaagcggtctgctgcagcccggccagcagctggcctgcatcggctttggcggcgggcttacatggggcggcatgctgcttacttataaaggtagagaaaatgaaactgctgaatgaaattctgggcacaaaatatccgatcatacaaggcggcatggccaacattgcgaccggtgagtttgcagcggcctgctccaacgccggtgcgctggggttgatcggtgcgggcggcatgaaccccgaaacactgcgggagaacatccgccaatgccgccacctgaccgataagccgtttggcgtcaacattatgctgatgcacccgcaggcggatgaatttgcccaaatcgtcatcgacgagggtgtcaaaatcgtgaccacgggggccggcaatcccggcaagtacatggctgcatggaaagcggcgggcatcactgtaattccggtcgtggcagccgccgtgctggccagacatcttgcgcccctcggcattgatgccgtcatcgccgagggcaccgagagcggcggccatgtgggcgagatgactaccatggctctggttccgcaggtcgtggatgccgtggatctgccggtcattgccgcaggcggcatcgcggacggacgcggccttgcggcggcgctggcgctgggtgcctgcggcgttcaggtcggcacctgtctgctgaccagcaccgaatgccccatccacgaaaattataaggatgcgctcctcaaggcgcgtgacagcgataccatcgtgacaggccgccttggcggcacacctgtccgtgtgctgaaaaaccgcatgagccgcgaatatgtccggcaggagaaggccggcgctgacaaggcagcgctggagcagttcacgctcggcagcctgcgaaaggcagtttttgacggtgatacggtcaacggcagcctgatggccgggcaggcggcgggccttttgcatgaggtccgccccgttgcacagattctggacgaaatggtgtccggtgcgcgtcagtgcattgcagccctgacgctctaaggaggtttttgcatgaagcttgcttttttatatgcaggtcagggcagccagcaccccggcatgggtgcggatctctacgatgcctgtcccgagttccgcgcagcctttgatgaggcggctgcagctgttgattttgacttacaagaggtctgctttaccgatgcagcgggtgtgctgaacgaaacccagtacacccagccctgcatgaccgcctttgcaggcggcgtcaccgctgtgctgcgcgctgccggcatcacacccgactacgctgccggtctttcgctcggtgaatactcagcgctggcctgcgcgggtgtatttgatgcccgtaccgccgttgcactgacggcctttcgcgggaaagccatggctgctgccgctgccgggcgcagctgcggcatgaccgcagtgctgggcctggactgcgatgccctgcagcgctgctgcgacattgctgccgatgcgggcgttgtacagatctgcaactacaactgccccggccagctggtcattggcggcgatcaggccgctgttgacaaggccgccgcactggctgcgcaggccggtgcaaggcgctgcctgccgctgaaggtgagcgggcccttccacaccgccctgatgcagccggccggggatgccctgcgggaaaaattcaagacggtgtcctttgcaccgatgcagtgtccggtgcttttcaactgtctgggccgcgaaaaggatgctgctgactcgatcccttccctgctggaaaagcaggtacattccgccgtccgctgggaggataccgtccgccgtctggccgatctgggcgtagatacggccatcgagatcggtcccggcaaagcactgaccggctttgtgaaaaagacagtcggcagcgcgattgcctgctatcccgtggagaccgctgcccaactgcagcagcttatccgcacattacaaggagcgtgagcccatggtacaaagcgaaacaccgcgccgtgccgcactggtgaccggcggggcgcgcggtattggccgcgccgcctgtctggcactggctaccgggggcatggatattgccgtcaactatgccggcagcgccgcggcagccgagcagaccgccgctgactgccgcgcactcggcgtacaggcagtggccctgcaggcagatgtgcgccgccccgaggcctgcaagcagctcgttgaggatgcagccgccgccttcgggcggctggatgtactggtcaacaatgcgggcgtcaccgccgacaaactgctgctgcagatgacagaggccgattttgatgctgtcatcgagaccaatttaaagggtgccttcttctgcacaaaggccgccgcccgcctgatgatgcgccagcggtacggccgcattatcagcgtcagcagcgtagtgggcctgcacggcaacgcgggtcaggcaaattacgccgccagcaaggcagggcttatcggcctgatgaagagcgttgcgaaggaatacgcctcccgcggcgtgacggccaacaccgttgcgccgggctttatcacgaccgatatgacggcagccatgccggaggctgcccgcgccgccgcaaacgccgccatcccgatgggcaagcccggccgccccgaggatgtcgctgccgccattgcctttctggcaggagaacgcgccgggtacatcaccggacagctgctctgcatagacggcggtatgggaatgtgaggttagctatgaacagcaataacaaacgcagagtcgtcataaccggtcttggcacagtcaacccgaccggcagcaccgtgaaggaaagctgggccgccgtcaaggcaggccgctgtgccgtggggccgatcacggcctttgacacggcggatttcaaggtcaagctggctgctgaggtcaaggactttgatccgaacactcgtcttgaccgccgcgaagcccgcaagatggcccgcttcacccagtttgccgtggccgccgccatcgaagccattcaggacagcggtcttgccttggaaaacatcgaccgcacacggttcggcgtgatcctctccagcggcatcggcggcttgcccaccatcgaggccgagcatacccgcggcctgcaaaagggctttgagcgtgtcagcccctattttgtgccgatgtccatcggcaatatggctgccgggcagacagccatcctgttcggtctgcagggcatctgcagctgccccacgaccgcctgtgccggcggtacaaatgctatcggcgatgccttccaccgtatccgggacggctatgaggatcgtatgctctgcggcggcacagaaagctgcatcagcccgctgggtgtcggcggctttgccagcatgaaggccctcagcactgcagaggatccggctcgcgcctcgatcccgttcgacgcagagcgcagcggctttgtgatgggcgagggcagcggtgtactgctgcttgaggagctggaggctgcccgggcgcgcggtgccaaaatctacgccgagattgtaggctacggcaccaactgcgatgcctaccacttcacggcacccgcgccggacggtgtcggcggtgccgcctgcatgcggctggcattggcggacggcggtgtagcccccgagcagatcgggtatatcaacgcccacggcacctccacccacctgaatgacagctgcgagaccgctgccatcaagtcggtgttcggtgaccatgcctaccggctggccgtatcctccaccaaatccatgaccgggcatctgctgggcggtgccggcggtgtggagggtgttttcaccgcgttagccctgtacgatggctttttgccggccactgtaaacctgcagacgcccgaccctgcgctggatcttgattatatccccaacacgggccgaaatgtgcaggtggactacgccatcagtgacagccttggctttggcgggcataacgcctgcatcgtcttaaaacgctggggggataaccatgaagatcacccccaatgacccgccacgcacgctgacggcagcggaaatcgaagcgattctgccgcatcgctccccttttgcgctggtggataagatcaccgattacacccccggccagtgggcgcgcggcatcaaatgcgtgacgcgcaccgagccgttctttcaggggcatttccccggccggccgatcatgcccggcgtgctgatccttgaggctttagcccaaaccggtgccgtagcagctctgagcctgcccgaaaatcagggtaagcttgctttgttcggcggtgttaaaaacgcccggttccgccgtcaggtcgtgcccggcgatgtgctgacgctggaatgtgagctggtagagcagcatgggccgatcggcataggcaaggccaccgcatgggtaggcaatgagcgtgccgcgaatgcagagctgacttttgtgattgcagatgcctgaggactggttttgcgcggcgcattgtggtataataaagccattaaccaacaggaggatacgcgccatgctggatcaggctttcggtcaggtgtacacaaaattcaagctgcatttttataagcagatcttcagccggtttgaggaccgcgaggccacccttacgaccgtggagtccttttgcatggaggtcattacggctttgggggaaccgaccatcgcccagttcagccacatgatgaatctgtccacccccaacgccgcctataaaatcaattcccttgtcaaaaagggctatgtggagcgtatccgctccaccgccgacaagcgggaatatcacctgcggccgacccagaaatatctggattactacaatatcagctattcctacctgcatctcgtcatggcacgcgccaaaaagcgctttgcacccgaggatcttgcccggctggaggatatgctgcgcatcgtttctgatgagctgatgccggagatcccgctgcccgaactcaagacctgaagcatcgcgggccgtttattaccacggcttgacagacattttataattaaaaaagagctttttccgtttctttatcaaacggaaaaggctcatttttgtttgggaggttcttatgaagaagaaattcagcaccgagcttgcctatgttctgggcattgtattggtagcgtggggcgttgttttgatggagaaggctgatttcggtgtctctatggtagttgcacccgcctacctgctgtaccgctggctgtcgccagcatggcactttttcacctttggcatggcagaatactgcctgcaagccgtgctgctgctcgccatgagtctattgctgcggcgttttcgcatatcatatctgttttcttttgttactgcggtcgtttacggcgttgtgctggacgtgcttatgtctcttggggcgatgctcccatccggcggcattgcactgcggggtatctactatgcgtcggggatgcttttctgcgccgcaggtgtttctgctatgttccacacctatatatcgccggaggtctatgagctgttcgtgaaggaggtatctgcccatttcggtgttgatattgcagaaagccgccccgcagcaccctgcgcacataagcacagatatagtttgcagtggcttctttcccggaaaaggcagcggacattcccgtttcctctccgtagtcatagtagccgaacgcatgtccgataccgtaaatttcttcctctgttatcgacttgacaagcatcgtgcgcttctcctatttattcttctttttgtatccgcagtcgcagtagggtccgccggaagcaagggtatactgccgcacaaaatttgtcacaccgcctgcttcgctcatggtgtagtccagatggcacaaagcaggggtcaggtcatacagccccagctccttcatcagcacacagatgccgcattttgtaaagcgtccctcgtagccgctgccgtcagggtattcgtaaaactccatgttccacgaataggggttgcggtcggcggctttcagggcagcggtagccttcatggcggcaatatcctttgcgctaaacttgctttttccgcttttgcggcagaaccactgcatgggctttgtcatcatggcctttgcgtaatactccgtcagcctgtccacctttgggcgctgcggcatggaaagaatgaacgccccaatcatcgcacagttgaccagattcattttgaaacggtcgcccttttcaaactccggcagcctacggatgatctccctgtatttcggctttgcctttttcgtgatggttcttgcagtgtctgcatcatagcccagcactgccgtcagctgcttttgaaaggagcctgcaaacagcacccacatccccatgggcatccctgtatatttcattgtctgtctccaaatccgatcttcacaatctgcattttcatcccgttgtcccctacctttgcaagaaaacgaaaaaatccgctgacggacgggtctttcaaatcgttgtagcccagcatatagccccggctcgaaactcgtaaacggctgtcccacgcaccgatctctttgggagcgtcggaaaccgcgaaatacgcgcccacatcttgaatctttgcacttttgagccacgttttggcaatcatcttcaccgccgtgcggttggcagcatcaaagacaagcaccccgccggggaaagcgtccgccatcccctgcaccagcgccctaacctgctccgtcaggaagtaatagaacaccccagaggcaaagaacaccgccccaccggaggcatcgatcttgtcaaaccatgcggggtctttcaggtcgcaggggatattttcctcccgctccccggcgggcaacagttcattccgcacggcaataacattgggaaagtctaggttataaattttgcagctgccgttgtcgcaggctctgccggtgttgtccagcccgcagcccagattgaccaccgccgcgcaggggttcgttttcagatactcccgcacctcccaagcaaggtcgcactgccgcatggcgacctccagcgcaccgaaccgctgcatcaggctgcgagaatttttctctgcctccgaaaagtcgtagtcgatttcatcgatcaggcgcaccgccgtttcgtcccggtaaaggttcggatacagctctgtgcacagcttccgggaatacagcggaagaatcagcgtttcctgcacggtgtttttctcaattttgtatttcatgggttcctccctagtgaataaaaaccatcataattgcggccagcaccgccgctatcgttttccgctttgttcattgcccacaccaaacggcacacagctttcccgctcagggtggaacaggtaatcatgccgtcataaaaattgttcccgcctgtcagatgatacgcgctgccaatagcttgtttccgatccatgctttttcctccaataccttctgcctttcgtaggaagcggtcattgagacttgtatttttgcccataagttagatatggctaacttatgggctttggaaaagccgcatctctgcggccttcttcaattttattatactgctctttcgtctgttttgcaatggtacagggtatattgttttgcgcttggatccgtaaccccggccgacccggtgaaggggtatatttacccatactattaaaaaagagcagcggtaagctgcctttattagtgaaagcgtcattgattcaaaagatatccgacgatactgcaagaaagccgcatcgccgccaacagctatctaacctcaggaggcgggcagcagctttcacgcggaatcagccggtgcggtacgatgatctttgttgccagaagatttgggttttcaatgtggttgatggtctggttggcggcttccatgccgagctggtagggatttacatccacggtggtcagctgcgggctggtaatgcgtgagaacagtgagttgttgaaggacacgatggaaagatccttcggaatatgcagccccagcttgccgcagaactgttccagcacaaccgccagaatatcatcgctgaccagcatggcagtaggatggcccggtgccgtgagaaggtctttcaaccgctcctcataagcatcgtttaaggtgttgatctccacacagtcaccttcccgcggggtgatgccgtgcttgagcagggacatctgatacccgcgcttgcgctctgcggagaacagcatagcattattgacaccaaaatacgcaatgcggcgatgtcccatctcatagagatggtcggtggcttcttccccggcgagggcattgtcgttatcaatgtagatggtctggtttgccgactgcgccgccttgcccacaatgacatggagcagcccttcgctgcgcagatacgccgccacagggcagtcctttttggaatagagcaggataaagccgtccgcctgtgcgttggcgaccatgctctggatggcgtccagcacttccgcatcgtcctgcccggtgatgactgtattcacataccgccgctggttgcagaactgcccgataccgcgaatgatttcaagatggaaggcgttctcataaacatcgcgctgtgaggatggcaaaataatgccgatggtcttggaaaaagcctctacaggctctgcctcaaagttcggctcatagcccagctgtgccataatgcggcgcacccgctctttggtatcccggctgatggaagggctgtccttacaggtgcgcgatacagttgacggcgaaacaccggctgctgcagcgacatccttgatcgtaactgccatgatctgttcctccctgatgtagtacctctattgtatagccgtttgcacgcaatgtcaacatttgcgcaagtgattgcgtaatttatgcaacgaatcttgaccggccctcgccaatttccacaaattattgtttgtcctgttgtgtaaatcgtagaaagtctgttttcttctcaaatttctcttgtaaaaagcgtgtgattgcgctattctagttgcgtaaggttacgcaaacgcaatgcaatgcttgcgcgcatcaatgcaaacaggaattgggaggaacaacatggcaaccacacaagcggctcctaagaaaaaggggttcatcaatttcgatttcctgcaaaagctgggcaaggtgctgatgaccgtcatcgcagtcatgcccgcggccggtctgatgatcagtctgggcaagctggtgcagatgggcggcggcgatattgcggcagtcatgaccatcggcaccaccatggaaaacatcggctgggcggtcatcaacaacctgcacattctgttcgccgttgccatcggcggcagctgggccaaggagcgcgccggcggtgcctttgcggccgtgctggccttcgcgctgatcaatgtcatcaccggcaacatcttcggcgtcaccagtgccatgctggaggatcccaatgccgtgacccacaccctgtttgggcaggagatcgccgtcaatggctacttcacctcggtgctgggtgctccggcgctgaacatgggcgtgttcgtaggcatcatcgccggctttgtgggcggtgttgcttacaataaatactataacttccgcaagctgcctgacgcgctggcgtttttcaatggcaagcggtttgttcccatggttgtcattgcctattcggtggtcatctctctggtgctggcgctgttctggcctgtggtccagaccggcatcaacagcttcggcatctggatcgcaaactcctctgaaacctctcctgttctggctccgttcgtctatggtacgctggaacgcctgctgctgccgtttggtctgcaccacatgctgaccatccccatgaactacacctccttcggcggcacctacacgattgccaccggtgtcaacgcgggcagtcaggtctttggtcaggatccgctgtggctggcttgggccaatgatcttatcaacttcaaaaaggccggtgacatggctgcctacaacgagctgctgaccaccgttacccccgcccgctttaaagtgggccagatgatcggtgcaaccggcctgctgctgggcatcgcgctggcaatgtaccgccgcgttgataccgacaagcgcgccaaatacaagtccatgttcatctccaccgcgctggccgtctttcttaccggcgttaccgagccgctggaatttatgttcatgttctgcgccatgccgctgtacatcgtgtacgccctgctgcagggctgtgccttcgccatggcaggcatcatccacctgcgcctgcactccttcggcaatctggaatttatcacccgcatccccatgtccctgcaggccggtttgggcggcgacatcatcaactttgtgatctgtgtgatcgccttctttatcatcggttatttcgtagcctacttcatgatcggcaagctgaagctggcaaccccgggccgccttggcaactataccgatgacaatgcggacgattctgccgctgacactaaagcggaaaagagcgccgacaagaagaccgacagccaggccgagcgcatcattgccctgctgggcggccgcgagaacattgtgctggtcgatgcctgcatgacccgcctgcgtgtcaccgtgaaggatcctgccaaggttgcagagcttgcagcgtggaaggctgagggcgcactgagcctgatggtcaagggcgacggcattcaggcggtatacggtcccaaggccgatgtgttgaaatctgacatcaatgatattttgtaaaatactatgaaactgctgacattgaatacccacagcctcatcgagccggactatgaggcaaagcgggagatttttgtaaacttcatcgcaaaggagcagccggaggtgtttgccttacaggaggtgaaccagactgcctgtgcgccgctgctcgaggatattccggcggggtatctcccctgccccggcaacaccgtggctttgaaaacggacaatcacgccgcagctgtggcccggatgctggaagaaaagggcgtgcattaccattggtgctggttcgcggtaaagatcggctacgacaaatacgatgagggcatggcggtattcagccgtgcccccatcaccgccgccgaaaacacgctgctgagcagggccgacaactacagctgctggaaaacgcgccgcgcactgggcgtatgtgctgataatgtctggtattatgccgtacatatgggctggtggaacgacagagaggagcctttcccctaccagtgggagaagctgtcccagacggccggcgcaaagcagaccgcgtttctgctgggggattttaacagcgaagccgatgtgcgcggcgaggggtatgatctcatcctccgcagcggttggcaggacacctatcgtctggcgcagcagaaggacgaaggctgcaccgttgtacaggccattgatggctggcgggacgccccgaatgcagcggccaaaaagcgcatcgaccagatttggtgttctaaaccggtggctgtaaaaagcagccgggtcgtgttcaatggcctgcgggagccgcaggtatccgaccatgccggtattttgatcgagttataaaggaaggcgtaggaaatgcagagaagcgcaggcattttactgcccatcagcagtctgccgtccccttacggcatcggctgcttttcgcaggaggcatacgactttgtagactggctgaaagaagccggacagacctactggcagatcctgccgctgggggtaaccagctatggtgacagcccgtatcagagcttttccgcctttgcgggcaacccgtatttcatcagccttgatgcactggtggaggacggcgttctgactgctgccgaatgcaaaaaggcaaatttcggacgcaaggcggacgacattgattacagccgcctgtataccgagcgcggccgtctgctgcggctgg

SEQ ID NO: 857 - DNA, 7966 bp, unidentified
  source 1..7966: mol_type = unassigned DNA
tcagtcctcaaacaggggcttgaggaagggcagaaagtccagcgttgcaaagtaatcgcggggggtctgggcgcggcggatcagccggtgagagccgtcctcgcacagcagcacctcggcgcagtgcagcttgccgttgtagttgtagcccatagcagagccgtgggcaccggtatcgtggatgtaaaggatatccccgatgtcgatcttgggcagcatccggtcaacggcaaacttgtcgttattctcgcacagaccgcccaccacgtcgtacttgtggtcgcagggggcgttctccttgcccagcacggtgatgtggtggtaagcgccgtacatggcggggcgcatcaggtttgcggcgcaggcatccagaccgatgtactccttatagatgtgcttttcgtggatgacggtggacaccagcgcgccgtaggggccggtagtaaagcggcccatctcgctgaagatggctacatcccccatgccggcaggcacaaggatctcttcaaacttctggcgcacaccctcgccgatggccatgatgtcgttctcggtctgctccgggcggtaagggatgcccacgccgccggacaggttgatgtagctgatatgcgcaccggtagcctgctgcacccggacagccagccggaacaggattgctgccagctccgggtagtaggcatccgagatggtgttggaggcaaggaacgcgtggatgccgaactgctttgcgcccttctgcatcagctttttgtagctgtcgatcatctgctgctcggtcatgccgtacttggcatcgccgggcttgtccatgacctgaaagccctcttcgctctcgcccagctggaaggtcccgccggggttatagcggcagaagatctcctgtggcacaccagccacccgctccagaaactccaccatggtggcatcgtccagattgatgtaggcgcccagctcgtaagccttcttcatatcctccacgggggtctggttggaggagaacatgatgtcgtggccggtaaagccgcagacctcgctgagcatcagctcggtcagggaagagcagtccacgccgcagccctcctccttgaggatctgcaggatgacggggttgggcagtgccttgaccgcaaaatattccttgaagcccttgttccagctgaaggctttgttgatgcggcggacattctcccggatgcccttttcgtcgtagatgtggaacggcgtgggcacatcctcgatgatctgctgtgccatcgcctcggtcagaaacggtttcttttccataataacatccctctcgttttgcgcagcccggcattttccggcctgcggtctatcccatgcggcccagtgccgcagttcaagctgttacagtttcaggttctcccgggtgggggtaaaggtggggatcatggctgccagctggcgcaccacgccctcatcgttgtgggcggcagcggcttccagcgcctgcagctgcccgtagaactcggcaagatcaatggtgcgggggcttgccacaaagatcttgttgtgctgggtgcggcgcatcttgtcctgctcctcgtccatcatcagctcttcgtaaagcttctcgccggggcgcagacccacgatcctgatctccatattcacgcccggctcgtagccgtaaaagcggatgagctgcttggcaaggtccataatgcgcaccggctcgcccatatccagcacatagatgttgccgctttccgccagcgcacccgcctgcagcaccagctgggctgcctccgggatggtcataaagtagcgcacgatgttggggtcggtcagggtgaccggcccgccctttttgatctgggcttcaaacagcgggataacgctgccgtggctgcccagcacgttgccgaaccgcactgccacacacttcatatccgtgttgcccgcaaaggtctggataagcatctcgcagatgcgcttggtgcagcccatgacgctggtgggattcacggccttatcggtggaaagctgcacaaagcgctccaccccgtgctcgctggcgctgaccaacaggtttttggtgcccagcacgttgttctttacggcttcggcagggctcacctccatcagcggcacgtgcttgtgcgccgcagcatggaacaccaccgtggggtggtaggtatcaaatacctcgtccagacgctttttatcccggatagagccgataagcaccgtgaccgggatatcgcggccgtacttctgctgcaattccatcagcagctcgtaggcgcagttttcgtagatatcaaagatgagcagcttgccgggcttaaagcgcatgacctgacggcacagctcgctgccgatagagccgccgccgcccgttaccagcaccgttttgccggtaaggtagccggaaattttgtcggtatccagcgtgacctcctcgcgggagaggaagtcggcagggttcagctcgcggaacacctcctgctggggtgcaccgctgcccaccagctgcggatcgctgagcacctgcaccgcgcaatgggtgctgacgcacaggtcgataacgtggctcaggcggctgccctttaaggtggggatggcaatgatgatgctgtggatgccgtagcgtgtgcacagctccgggatgtcctccagcgtgcccttcaccggcacaccgtggatggtctggttcagctttgcagggtcatcgtccaccgccaccacggcgtggccgtattccttgttggatttgcacacgttgatggcccatgcaccggcttcgcccgcgcctacgatcatcaccggacggttggggtctttcgcaggcactctgcgcagctgctcgcccagcgggtggttcaaaaacagtcgccatgccagacggctgccgccgatgaacaaaaagatgagcacggatgccatgcagttggcggaattaaacagcacaccgtggataaagtggcggttcaccacatacaccacagcggtgggcacggcgatcatcccggcaagacggatcagatcccgctcaccggcgtacttccacagcaccgagtacagcccgcccgccagaaagcagacgatatacaccgccacgatccacggcagattttcgtacagcaaagcgcggttgtgcggccaccacacggcatctaccgcaccgtctgcccgcagcagcagggcaaaataaaagctgaatgccacaatggcagcatccatcagcaccagcagcgcacggcgcagcagcacctgcggggtattcttggttttatctttcacttacgatcctcttttttcctctcagcgccaaaggcttttgcccagcgctgctttttcggcagtgttccccggcaggccggaaggatacaactacacgtttgtattatactcacaatccccgcctgtgtccagaaaatttacgtttttatcactttcccctgtttttcccggtctttgcctgccgcagcaccgcccgcacttcctcccaaagccccagcggcagcgccgccagtaaaaacacgatggccgtcaccgtgccgcccgccgtcagcactgccagctgccccgccaattcctgtgccggaaagctcgccagcgcacggcgcacgccccgccctgccgccccggcggcggcagcagccagcagcggtgcacccagccagcgccggaaggcgtgccctgtgccgctggaaagcagcagccgcccggtgttggccgcgcaggtgtagaagctggaaagcaggatcaccgccagaaagccccgcattccgtaccggggcagcagcagcgccaccccgccaatgcgcagcacggcgtcccacacgctgtaccggaaagcggctttctgctccccgatgcccttcatggcaccgtccaccatgctttccaagtacatcagcggcatagccggggcaaggatctccagatagaacccggcctccgggctatggtagagcagctgcgccagcggcctgccccacacccagaacagcgtgcccgccagcgcggagaaataccccgtgagccgcagcatccggtccagcagtgcgttcagccgggcggtctgtccctcgatatgcgcctgtgtgatctccggcatcagcaaaaccgccagactgcccagcagcccaaaggggaaattgagcagcggcagcgccatgccttttaaggtgccgtactgctccagtgcggcggtgcgcccgccggaagccgccagatataccgcaagacaggcgggcaccagcatattctcggccgtgtgcagcgcgctggaaagcgccctgccgccctccaccggccaaaggatgtcccacagccgccgggacacctcccttggcgggcgcggtgctgtgctgccgaagcagcgtgccgcctcccgccggtaaaacaatgccatcagggcggtggatacggcctcgctcagggcggtagccgccagcaccagcgcgcagcgactgccgtccggccagccctgcgtgcgggaaagcgcccacaccaccgcggcaatgcgcaccgtctgctctgccagctggctgagcacgttcggctccacccgccgccgcgccagaaaaaagccgcgcagcaccgccgagatcgccatccacggcagccccagcgccgaggtgcgcagcgcggcagcagcgcggacatcccccagccaccattttgccgcaaggcctgcggtggcaagctgggcgaccatggcaagcccgcccagcgtaagccctgccaacaccagccgcaccagcatcccgcgcgcagcggccttgtcccggctgagctcctcggtcagcagccgggtagccgccaccgagatgcccgccgtggccagcgtaacgaacagtccgtacaccgccagcaccagctggtacagccccatacccgccccgcccaaagcgtttgccagccagatgcgcagccccatgcctgccagccgcagcaccacgtccgagccggtaagcagcgccgcatttttaaagtagttctgccgcaccctgcacctccccctgccccggaacgggcgttcacggttcagcctatgcggcagctttgcaaaacatgagcggcgctatgggttgtttctgcgcactttttatggtatagttaacagtggtcaggcagggcgcaagcccgcgcctgtattttgagcaaggaggaagcgcaccgcccgggtcctgcccctgccgtgcgcgacaaagagaatgagcgaagaatgtacccatgactgctctaattgcagtgcagcctgttcttcccgcgatgccgctccgcagcacgatgcccccaaccctaatagcagtgtgaaaaaggtcatcggcgttgtttccggcaagggcggcgtgggcaagagcatgaccagcgccctgctggcctgtgccatggcccgccgcggctaccactgcggcattctggatgccgatatcaccggcccgtccatccccaagctgttcggcattcacggccgtgccatggcggacgacaagggctgctggcctatccagagccgcatgggcattgatgtgatgagcatcaacctgctggtggagaacgaggaggatcccgttgtgtggcgcggcccggtcatcgccggtgccgtcaagcagttctggaccgatgtggtctggaaggacgtggatttcctgttcgtggatatgcccccgggcaccggtgatgtgcccctgaccgtgttccagagcctgccggtggacggcatcgttgtggtggcaagcccgcaggagctggtaagcatgatcgtggcaaaggccgtgaacatggctgagatgatgaaggtgcccatgctgggcatcgtggagaacatgagctacatcgtctgcccggactgcggcaagcacatcaatgtgtttggcaacagtcatgtggacgaggttgccgcaaagcacaacctgcccgtgctggccaagtgccccatcgaccccaaactggccgagctttccgacgccggcatgatcgagacctacggcggcgaattcttggaaggcgcagcagacgcctgcgaaaagctgctgaaatgatccgaccctctggctgctgcacaaactgctgtgcagcagccttttctatatgttcttgttttagcaagctcgccctctcagtcacctacggtgacagctctcccaaagggagagcccttggcagtccacgctaacttcatctttttgccaaggcctctccccttgggagaggtggatgcgaccagcgggagcagacggagagggcgaggatgctaaccttgtgacacagggctttttgcttagatatgcctgccgcggtgcaaaagacattcttttccgtacggctttggggcggcagcgcactttaaaaaacaaggttcgcggcgcattcctgcttttaattttcgttttgtgaagcagctgttactttttatctgtttttttaaacaaattctgctttttgctattgtaaaacccaccgcaaagctttataatagtaaagtaagcattgcccgcttatgcgggcgtgccatgcaagcatggagaaccggaagcgcccggcatctgcaaggataccccgctgtgcggcgggcaaaggcatttccgctttttcaaatttatagagtaattgggaaaaggagtattctattatgctgacgaatgaatacctgaagcgcgtttacgaaggtctggagaagcgcaatgccaacgagcccgagttcctgcaggccgtgcgcgaggtgctggagagcatccagcccgttgtggaaaagcaccccgagtacgagaaggccggtctgatcgagcgcctggtggagccggagcgcatcatcaccttccgtgtgccctgggtggacgatgccggtaaggtgcaggtgaaccgcggctaccgcgtgcagttcaacagcgccatcggcccctacaagggcggtctgcgcttccatccctctgtcaatcagggcatcctgaagttcctgggcttcgagcagaccttcaagaacagcctgaccaccctgcccatgggcggcggcaagggcggctctgactttgacccccacggcaagagcgacatggaagtgatgcgcttctgccagagctttatgaccgagctgtaccgccacatcggccagttcgtggactgccctgccggtgatatcggtgtcggcggccgcgaggtcggctatatgttcggccagtacaagcgcctgaccaacagcttccagggcggtatgctcaccggcaagggcctgaccttcggcggttctctggctcgtaccgaggctaccggctacggcctgtgctactttaccgctgaggcgctgaagtgtatgcgcaacgacagcttcgagggcaagaccgtggtcatctccggttccggcaacgtggctatctacgcctgcgagaaggctacccagctgggtgccaaggtggttaccatgtccgactccaacggctacgtctacgaccccaacggtatcgatctggcttatgtcaaggatctgaaggaagtgcgccgcggccgtatcaaggagtacgccgagacccacgagggtgtaacctatgtggctgattgcagcaaggtttggactgtcccctgcgacatcgccctgccctgcgctacccagaacgagatcaacaaggagtccgcagaggctctggtgaagggcggctgcaccgtggtctgcgagggcgctaatatgcccagcactcccgaggccatcgaggtctacctgtccaacggcatcctgtacggacccgcaaaggcttccaacgccggcggcgtggccacctccggtctggagatgagccagaactccgagcgcctgagctggagctttgaggaagtggatgccaagctgaagggcatcatggagggcatcttccacgcttcctacgacgcttctgtggctgccggttctgagggcaacctgatggtcggtgcaaactgcgccggcttcctgaaggttgctaccgccatgatggcacagggcatcacctactaa

SEQ ID NO: 858 - DNA, 11344 bp, unidentified
  source 1..11344: mol_type = unassigned DNA
ttacttattgcctccttttttgatttcgccaagatagaaggccttggccagactcatcatctgggtgaccgggcgctttgccgggcagacgaaggagcagctgccgcagttgaagcagtagtcagcgtgcagcttgcccagctcctgcacatcgcgggcggcgtaggcctgattgacctccacgggttccagacccatggggcagtactccacgcagcggccgcagcggatgcaggggttgacctgtgcgggctgtgcagctgccttgctcagcaggatcagaccggaagtggtcttggtggtggggtaggaaaggttctccacagcggggcccatcatggcaccgccggcaaccaccttgcccagttcgcccttcacgcccacatagtccagaatgtcctgataagcggtgcccacgggcacaacaacgttctggggctttgcgcaggcatcgccgtccacggtgatggtacgctggaccaccggcataccggtagccagatacttgcccagcgtggaaacgctggtcacgttcatcacgatggcgcctgcatcggcgggcagaccgccgtggggcacctcgcggccgaggcacttctcaatgaggatcagctctgcgccggtgccgtagacactgggcaggggcttgacctcgatggtgctgtcgtccttggtctttttgcacagcaggtcgatgcactcgggcttgttgttctcaataccaatgatgcacttcgggatgccggtatactgcagcacagccttgatgccgcggatgatatcatcgctgcactccagcatctcctgcgtgtcgctggtcagccacacctcgcactcggaggcgttgatcagtagggtatccaccttctgcttgggctgcagtttcacatcggtggggaagcctgcgccgcccagaccgaccagaccgcactcgcgcacggcggcaaggaagctggccttatcggtgacttccggtgccttgacagccgggtctacggtctgcttgccatcggtcttgatgacaacagaatcgcacatacggccattggacagacggaaagcttccactgcagctaccgtaccggaaacgctggagtggatgtttgcggagacaaagccgcccgcctcaccgatcttggtgccgacgaacacttcatcgccttttttcaccagtgccttggcgggtgcgccaatgtgctggctcataaggatgcgtacctgcgcgggcagagacatcgggacaggtttgcttgcagcagttgccttgtcatgcggcgtatgcgcgccaagcgccgcacgtttcagcttgttcaacatggatttcaaatcccccattctgcttgaattgccatcccctcgcccatgcaggcgcactggtacagggacagcagctgcttaacacacctattgtatcattttggcgcgggaagtcaacgacatcacggctcaaatgatgaattttcctgaactttcttattcgttttcgccaattagttttaactaaccaccgtatttttctttttgttctcccctctctgccgtttgcctttactgcgggaatatgctatactatacctaacatgacaggcggaacgtcccccgctccgctcccgaacttcacaaggaggcaccaaaccatgaaagttctcaaagctctgctcgccgtcctcaccactctggctgtcgccctgaccgctattctgctgttctggcaggataaaagcgctccgcgctatatcaagatctacgaaaacgagcagtaatatttttcttgcaaaaataacaccccggtcaggcggtaaaaccgcccggccggggtgtttttgcgttgtcttgcagaccacacaaaaacgccgccgacttttcgtcagcggcgtttgccaaatatgcttagtaatcggtttcgcagccaagcaggaatttgatgtaggcaaaggtgcgctcccgcccgaggtcccgcaccatgcgcagcagcttttccagcagtgcccgggtctccgggtgcatcaggtagtgatccttgctgcgctggtagtactcccacgcggaagcatcggtgtatttgtcgcccagatagatctggcttgccgctacccggtcgcacaccatctcgcagacgtaccgcagggggatcttcatgccggtcaggccggtcttggtggtgctgtaatcgatccagtattccagatgatgcttgttgcgccccttgtggtgcagccacgccgaggtgtagcccttggctgcgcgctcggcctcgttggggctgtggtcaccctgataatagatgcacccggggatgaactcggtggggctgtacttgctcaggtcgtgggcaaggccctgctcatacagtccgcattcaaagcagtatttcatcaccagcagcttgtgccgggtgatggtctcgaaatgacccttgatgttcatgctgttattccctccactgcaccgtgatgcgtccctctttcagcccgcgcagatcatcgctttcggaaaaatcctcccggtccatagtcagattggggttgtagtaggggtcatgcaggatgttcgccttgccgtgcacctcgtacaggcgctgctgctcggcggcaaagcgccgtgcctttaccgggtctttttcgtccccgccgcggctcttgctctcgtagtgggtcagctgggcgtagggcgtccacgcaatgcgatagcccgcatcccgcacccgcagacagaagtccacatcgttgaaggccaccgcaaaggcttcgtccagcccctttacctcgtcccacacgctggtctttaccagcaggcaggcaccggtaacggcagaaaagtcctgcaccgtggcggtgcggaacagatagccgctgccgccggcctttttgtacttgtggctgtgccccgcgtagccccccagcccggtaataacgcccgcgtgctggatggtctcgtccgggtaccagagcatggcaccgcacactgccgccccgccggggtgggcgcattggcgcagaagttcagtgagccattcgccgttacgcacctccacatcgttgttcagcagcagcagatactcgccggtggcgtatttgcggccaaagttgttgatgccggaaaagttgaagccctttttcgggtaggtgaccacccgcaagccgtcgtagcgctgctgcgcctttttatagtaggcaaaggtggcggggtcggtggagttgttctccactacgatgacctcaaagtgctcccattcggtctttgtccagatgctgtgcaggcacttttccaagtcctcggtgtggtccttattggggatgaggatgctcaccttcggttcgcccacgatgtcccacttcacccggtaggtgctggggaacagaccgtcctccaccgtgccggtgcgcccggtgcgggtcaggtggtctgccagcgcctttttagccgctgccgccacatagggcttggcatcggcaccaccggaggtagaccccgcgtgcacccgccagtagtagagcacctgcggcacatgggcggcaccgccggtcttttccagcagccgcaggaacaggtcatgatcctgactgccgtcgcattccgggcgctcaccgcccagctgctcccacagcgcttttttaaacaccgccagatggcagatgtagttgcagcacagcaggtagtccggggcgtagtccggcttgaagtgcgccaccatggggcggcggatgctcttggcgaacagcgcttcgtcgctgtacagaaaaccgtccggttctccgcactgccgcagctgcaggatggccttgcccatggtatacagagcatggggtgccagaatgtcgtcgtggtctgccagcgccagatattcccctgttgccagctgtgcggcagcgttggtgttggcggcaatgcccttattttcgatctttttgtatacgatccgttgatttttttgctgatattcctttacgatccgctccacgtccccgtgggcggcgtccgaagcatcggcaaggcagagctgcccgttgggcgcggtctgccccacaaaggattccagaaactcccgcaggtatttttcaggggtattatacagcggggtcagcaccgagatggtgggcagaccgcagtctgccgccgttttgcctgccatctctgcacgctgcgcttccagcacctttttggcgggcaggtagcgcgcacgcttgccgaagcagcggcgcttgacaaagcccgcaccgcgcatgaccatggtggacagaccctcgtcctttgtcagctgcacggcatagccgacaagctccttggcgcgtttcaaccgtacgttcatatcagacctcgccgcgctgagtcgccttgtaggcggcgcagactgttgcggtgtccccgttcattttcaggtggccgtggctcagccatgccaccttggtgcacatccgctcgatctgctcgatggagtgggacaccagaatgaccgtggtgccgcccgccatcagctcctgcatccgcttttcgcacttctgctggaacaggaaatcgcccaccgacagcacctcgtccgcaataaggatatcgggcttggtgatggtggcaatggcaaagccgatgcgcgccaccatgccggaggagtagtttttcagcggcacgtccagaaagttttccagctcgctgaattccacgatctcgtcaaatttttcgtccagatacttgggcgaaaagcccagcaccgtgccgttgagatagatgttctcgcgggcggtcaggtccatatcaaagcccgcgcccagctcgatgagcggggcgatggtgccgtttacggtcaccttgcccttgctgggcttgtacacccctgcaatggtcttgagcagggtggatttgcccgagccgttcaagcccacaaggccgtaaaaatcgccgggcataatgtccagactgacgtcctttaaagcgtagaactcgtcgtactgcagccgtccctgcaccatggccagaaagtattccttcaggctctcatgcttttccttggaaaggttgaagcacatggaaacattgtccactttgatgatcggttccattgttcacccctccttaaatgtgcagcacaaagcggtcctgcgttttgcggaacatccacagccccgccaccatggacactacggcgcagatgccgcagacaaggaacatattcccgtccagcgggataccccacatcaccgtgcggcggaagcccgtgatataccagtacatggggttcagcttgatgatctgctgcatattgaacccgccgatggaaaaggtcatctgggtggggtcgtagaagatggcggaaaaatacagcagcgcggtgacgaacacgctccagatgtgcatgatatcccggaagaacacggtagccgccgctaagaacatactgaccccgagactgaagaagaacaaggtcaccagcgggtacagcgcttcaaaaatagtcagatggaagggcgcgccggtaaagatcatgaccagcagcagcgccacaaagctgaacacgcagttcaccatggcaaaacagcatttttccagcgggaagatatacttggggatatacacctttttcagcagcggggcggcgctgagcacgctgctcatgctggtggaggtagcttcgttgaagaagttgaacagcagctgaccgcacatcagaaagacggcaaagttgtcgatgccgctgccccgcatatccatcaggctgctgaacaccgcccagtacacaaggcacatcagcagcgggttcaaaacgctccacaccacgcccagcacgctgcggcgatatttcagcttgaaatcacggcttacaaggttccacagcagatagcggtagcgccagaagccgttccacatccctttgagttttgccacgggcgatcaccacttttcaaaatactcgaacttctgggcggcaaagggctcgtgcagcttgtcctttgcgctggtcttgtgctcgcagccgcagtccggccactgcacgttgacggtggggtcgtcgtaggggatgccgccctcgctggtggggtcgtagacatcggtgcacttgtagcagaactctgccacatcgctcagcaccagaaaaccatgggcaaagccctccgggatatagaacatcttcttgttgtcctcggagagggtcacgcccacccacttgccaaaggtggcgctgtggggacggcagtccacggctacgtcatacacctcacccttggtcacgcgcaccagcttgccctgggtatggttcttctggaagtgcagcccgcgcagcacgccccgggtggagcggctctggttgtcctgcacgaattccttgtcgatgccggcctctgcgaactggtccttctggtaggtctccataaaatagccgcggtcgtcgccgaacacctgcggctcaatgaccaccacgccggggatctcggtctgcgtaaaaataaacttacccatgatattgtacctctcttttttctggaagttttttctttatctggaaaagtctggttttaaacaggcttttacgctttgttatggtgctttgccgttttgcggcgctttttcaggcgggcgtgcagccgcagcaccagcaccgtgaccacggctgcgcctatggtacaccccaccgagatgcccgccagcagccatgcgctgctgcccggctccacgtccttggcagtatccagctttttgccggcactctgttccagcagctcggcaagaccggtgatctcggccttcacccgcacgctggtactctcctgctttgcgccgccgttcagggtatacaccgcatacacggcgggttctgcgcccagcagatactgctccggcagttccaaatccacggtcacatcctgcgcggataagccctcggccagcagcagcttcaccccggggtcgaccaccgtgaccgtaccaaggctctgcccgccgcccgccactgccagctgtgcggtgaccgtgccgccgggcagctgggtgtagtttttgtaggtggcaaaggcgtagtccagcagggtgcgcacatcattatatttgtcggtgctcagctggctttgcatcgtcacacagatcaggcgcaccccgtcctgctccgccagacagacatagctgtaccgggcggtgttggtgtagcccagcttagagcccagcacgctgccgatgtggtagcggctggagccgatgcggatcttatcctgctgggagaagtaacggatcaccggctggatgttggtggactgcatggtgtacatcttgttgcgggtgaacacatcctcaaaccccggctgctgcagcgcccagcgcaaaatctgcgccatatcgtagcagctggtgtagtgatcctcatcgctgatgccgtgggggtttgaaaagtgggtgtgggcaagccccagctcctccacctgtgcattcatggccgccacgccgtccgcgatggtgccgccgccaaaatactctgccagcaggttggcaccatcgttggcgcttgccatctgggtagcgtacagcgcatccaccaaggggacttcctccccttcccgcagggcgatatggctggaatccgtgcccgccagtgagtagacatcctcgtgggtcacggtcagctttacgtcatcccagtccccctgtgccttttcgcaggcaagcccaagggtcatcaccttggtaatggaggccgggtgcagctcttcgtccatattctgctgcgccagcacaaggccggtgtctgcgtccataatgcagtatgcccgggtattggccagcgccgggccggctgctgccgcgccgggcaccagcacagtgcctatcaaaagcagcacagtgcacagtgctgcggtaaattttttcatctggtatactccgcttatcagttttatgccggtaaggcatcatttggagtataccacattttttccccgctgaaaagggatttacgcattcctttgccccagcagcaccggctgcagctgctcaccccgcaaagcagcgtccacggcggcgggcagcagggcaagatctgccttcaggctctggggcttggcaaaggggtcatcctgcccgtagggcacaaaataatagtgcttgcgctggcacagccgcgccatgttttcgccggaagcgccaaggccgtcgttggtggagactgccagcaccaccgggctgcccacccgcagcaggcttttggcagcaagggtcaccggcgtatccgaaagccctgccgccagccgcgccagcgttgcgccggtgcagggggcgaccaccagtgcctgtgccagccgccggggacccagcggctccaccgcctgcaaggtgtccagcaccggctgcccggtaacagcctgcaggcgctgccgccagctttccccggtgccgaaccgggtatcctgctgcgcggcaaagctcataatgggcagcagcgtccagccctgtgccgtcagtgcctgcgccgcacccaaggcgtcctccagcgtacaaaagctgccgcacaccgcaaacgcaagacagccctttttctctgtggtcataccgttccctcccgctcctgcaaaatggcttgcaccgtgcgtgccagcgcctcccctgccgtttccggtgcccagaccgtcggcaggctcagcgcgtgcagcgccgtgtgtcccagccgccgggcggcggcaaagtctgtgccgccgggcttggaagccagatctacgatcagacttttctttggcagcgctgccagcacctgtgccgtcagcaccggcgcggggatggtgttcaccaccgtatcaaaggcggcagcttctgcggcaagctctgtcagcggcaccgcccgcagacccagctcctctgccattgcccgctgcaccgggcggcgtgccgccacggtcacccgcgcacccagtgccgccagacgcaccgccagcgcccgccccaccgggccaaagcccagcaccagcaccgccgcgccccacagggtgcggctgcgccgctccagcaaaatgccgatgcagccctcggcggtggggatggcgttatacacggtcagctccgggcgggcaaaataatccaccagctccacccccgccgcccgggcgatggacaacgcactctccgtcaccttaccgcccagcgccagcgcaccgggctttgccgtgcccagcagctgcgccagcggcagatcagcctgttccagcgggagcggcagcaggatgcagtctgcctgcggcagctgctgcacgccgcccaccgtataccctgcccgcgccagtgcacgccctgccgccgcctgccgggcatcgctgcccaccaccgcaaaccgctttgtctgtctcatgccgtcatctccccttttccgctgtgcgccatcctatgcaggaagatgaaaatgcgtgagggggacaattttgaatgcgctccgcgttgcggggcaccccttccgtcatcgcctgcggcgatgccacactcccccttttgtcacctacggtgacaaaaaggggaatctggcgaacgcagtgagcctgagggggttctttctaagtctaccaacaaaaaactcccccggcgggttgccggaggagcattcatttttctattctaaacacggatacgccgccctgacatggtgcgcagccggtcttacttcaggaactttgccacggcgcgggcgacgatgccgcccagaatgccggacaccagaaattcggctacgccctgcacgccaaccagcagcacaacgaacatgaaggggttggcagcgcccttgacggacaccagattctgcacatagtcgcagccgtagaaggccagcacgatgtagcccatgaagaacagggtgttcagggcgggtgcggtcatggcgctgaggatgtagctccaggtgcgggacttgtccagcttctgcagacccttgaagatcaggccgcagcacagacccatgagcacacgcatacccacgcacaggataaaggtgttcagcgggctgacctgaaacagtgcaccggtcatggcagatgcgccggtgatggcatcatagaagctcacagcgccgaacacgccgcccagcagggcacccacggcggggcccatggtgatggcgcccacggcaatgggaagggtgaggaagctcatgtacagcggacccatgggcacactgcccagaccgacaagcttcatcaccagttcaatggccaccagcagggccacacgagtcagcgtcttagtattggtattgttcataattcagttttcctcctgctgccgttccgccctttttgtcggatacggcgcaaacctgcccgctctgtgcgggttttaggtgaatattcaaatctcttggaagcgcgttattgtgtcagggcgtgttccagagaaaaatgcgttagaatctgtcaccggggaagcgcaccccggcgctgcggcgcgccaccgtgagcacccggctcaccgcgatgctggtgtccagcatccgggcgcacagctcttggtctccggcggtcatggcgcggtaaaaggcctcgaactctgccgcctgccggggacggtccccgttcaggttatagtgctcctccttgccctcgttgggatggaaggtcacgccgccgcagtagttcggggtggatttttgcaggatatagccctttgtgccctgaatgatgcagcgggcaggggctgcgcagtccttggcggcaaggcttaccgccttgaagccgctgtaatccatcatcagcacaccgctggtgtcgatgttgcgctccatgttggcggcatataccgccttattcggctcaccaaacagacccacgatgtagctgacgttgtacacgcccaagtccatcagtgcgccgcccgcgcacagcgggtcgaacaccggcggggtctgcccggcacaaaaggcgtcgtaccggctggaatactggctgaagctgcactgcaccatacgcaccgtgcccacccggggcagcagttcccggagctttgcgtagttgggctggtactgggtggtcatcgcctcaaagaggaacagccgcttgcgctgtgccaacgctgccagttcctcggtctcggcggcggtcaccgccatgggcttttccacaatgacgtgcttgcccgcctccagcgccacccgggcgtagcgggcgtgctgcaaattgggcacggcaatgtagaccacgtctacccattgcagcagctcaaaataattggtggtgtgctgtgggatctgatattgcgcacacagctctgcggcttttgccgccgagcgtggggtgctgcacaccgcctgcacagtaaacggcgtgtgctccacaagccatggcaaaaattcctgcacgatcttacccgtgccaagaatgcccagtttcat

SEQ ID NO: 859 - DNA, 7979 bp, unidentified
  source 1..7979: mol_type = unassigned DNA
tcagccattgtatgcctcctttatcttctcttcaaatttatcaagtcccactctctcgagtgtcatgcggaaacgctctcccggattggcattgtcatcaaagaactggattgccgcatcggtaatgcggaataactgttcctcggatgtcacaagcggaagatacttctcgcccttgtatacgcggtttccaaacagtccaccgaaagatacctcaaatgcaggtgtcgctttccatgcatcggtcggacaggcctttacacagcgtccgcagttgttacatttttcctcattgagaacgatttttccgtccacggtactgattgcatccacgcggcaggtcttctcacagatcccacagttgatgcaggctgcttcctcccattccacaatggatgcacccttgattccgacatcattttcttctgcctttaagcagttgttctggcatccggttacaccaaatttaaacttatgcggaagttctcttgcaaaataacgctcatccagtttttttgcaatatcataactgtcaatatttccactagggcataccgccgatccctgacaggctgtaatcgtacggacacgcggtccacacacgcccggcttacatcccccggttgccagcacttccttaacctcttctacatcgtcaagtttgataaatgggatttccacactctgacgggaagtcagatgtacgtgtccgtctccgtatttttctgcaacctttgcgataatctgtaaattctctgctgtaagatttccacctaccacagccagccgcagggaaaaattatttttttgtttctggcgcataaatccgccttttttcaatgtagcataatcaacagccattactctctcctttaaaccttgtgtatttttctttgtttatccggcggtattttggattgctgctgtaaaatcctgcttcagatcttcgatatcctcaataccgacacttattcttatcatatcatcaaatacggcagcgtcaatcttttcctgctcggttgagtgtgccgccagtgtggattccggatgcacgatcagtgtcttggtatctccgatattggatacgatctgtggaatcgtcagcgcattcatgattgcaaaagcgcgttccttgcttcccacgcgaatggttaaaattgctccaaatcttccatccagcaactgctttgccacgccgttccacggactcgatgcaagtcccggatagtttacgctgattcccggaatggtttccagataagccgcaagctgcattgcgttgtcacacgcccgctccatacgaagccccagtgtctccataccaagcagattatagtatgcagtctgcggcgccatacaggctcccatgttgcggaacaatccgtttctcagttttgcagtaaaggcaaattttgcaaactttttatagtccttcatacccggataccgctccagatcccatttgaatcttcccgcatcggtgatcacaccactgatggcactgctgttgccgttgatgtatttggatgtggaattgattacgatgtctgcgccaagttcgagcggacgaacgagaaacgcggtagctaccgtattgtcgatcatgagcggaagattgtgccgctttgcgatctctgcaagtgccgggatgtcggtcacatccagctttggatttccaatcgtctccgcgaagatgactctcgtcttatccgtgatcttggattcgagatcttccagatcattcgtatctgcaaaaattgttgtaatcccaaacgcttccagatcgtggtaaagatcaatcgttcctccatacaggctggtgcttgtgatgatctcatcaccacttcctacgatattcagaagggcattggtaattgccgccatgccggatgcacaggcaacggatgccacgcctttttccagaaccgtcatgcgttcttcaaatgctgcgatggtcgggttattgattcttgtgtaagaatatccagcagctttgttgtgaaacagcttctcatgctgctctgccgatggctgaaagaaagcactggactggtacaccggggtaagtgtggctccggtcaccggatctccggtttttgtaccatgtagtagttctgtgttgaatcccatttcatttcccctaattcatacttatctaataggtttaatatgttatagttaatataccgcaatcataccctattgtcaaccttttatttccacttatttttccagcaaaaaaatccccactggttaaaaccagcagggattccattctcaataataaaattattattctgtccagtgctcatccttaaatacgatgcggcggtaagtctcaaaatcaacccacttattaaagaagttctcagagatctccctgccctctgcggaaagctccttcttgaacgcatccacatctgcggcacttgttacatgaaccgcaaatccacggccgttgatgacaggcacatcgttgtatgcaaagtcagcaagcggaataatggcagtaaccttctggtcacggatggataccgctacctgctcacgcagaacaaccacatcaaagctgtccggatactgatacgtctcacccttgaccggaatcacatcaccgatcgtgtaagttttatcggaaggctgtaccttaaagacgttcatcgcctcaaggtcatagtaatattcctcgaagatatctccgtttgccttgagatttccgtgggcaaatgcgcattttaagtctttcgtctcatcgagcgttggattttccacaacaccacatgcggaggtcatgttggaaatacggtcgatcaggatcagttctcccaatgtcttatgctttgcaaaagcatcaatgacgatctcttcctgcaataccagatcgcagaccgcaatctcgttcttgcgcaggcggccaaccggaataaattcaccggtgttgacatcaatcttgtactggatattctttaagatacccggaatcgtacgtgtaccgagttttacgagataatctttgccgacggtcagttcctcatcgtccatccagaggattgttgcggtaaatttcttgctgaccggaagcttcgtatcttttgcgagaacacatccgcgggatacatccacttccttgtcaagctggatggtaactggacggcctgcatctgcagtctgtgcatctttatctccgactaaaatgctctttacttttgcatgctcattgcttggcagagtcacgattgtatcaccgaccgatacagcgccactctcgatctgtccctggaaaccacggaacgtgtgatccggacggcagacacgctgtaccggcatgtagaagccttcttcctgcttcttttcgctcacatcgatattctctaagtaagcaagcagtggctcctgcgtgtaccatggcatattgtcggaatgggtggtgacattgtcaccctcggttgcagaaaccggaatgatcttgacacttgctaaatgcagttccttggaaagttcctgaatctggtcaacgatctccttgaaacgctcctcactgtaatcgacaagatccatcttatttacagcaaatacaaagtaacggattcccatcagtgcacagattctggcatgtcttctggtctgtacgagcacgccctgctttgcatctacaaggataacggcaaggtctgcaaaggatgcaccgactgccatgtttcttgtgtactcctcatgtcccggagtatctgccacgataaagcttctcttttcggttgtaaagtaacggtatgccacatcaatggtgataccctgttcacgctctgccatcagtccgtccagaaggagggagtaatcgattgcgccgccgcggcttcctactttggaatccagctccaacgctttctcctgatctgcgtaaagcagtttggaatcgtataaaatatgtccgatcagtgtggactttccatcgtctacactaccgcaggtaataaatttcaataatccgctcattttagaaataaccctccctctttcttcgttccatgctgccggctgcctcgttgtcaatgacacgggtggtccgctcagactctacagcactcaaggtctcgtcaataatctcatctaatgtggtcgcgttggattcgattccaccggtcaatggatagcatcccaaggtacggaaacgcacattcttgtattcaattttctcacccggacgaagtttcagacgatcatcatccaccatgataatctgtccgtcacgctcaatcaccggacgctttgctgcaaaatacagcggcacgatatcgatgttttctctctttatgtactcccagatatccgtctccgtccagttggaaatcgggaacacacgaatactctcacccttgttgatcttggagttataaagtttccacatctccggtctctggttcttcggatcccatgcatgattctcattacggaaagagaaaattctctcttttgcacgggatttttcctcatcacgacgtccgccgccgaatgctgcagtaaatccgtatttattcagcgcctgttttaatgcctgtgtcttcatgatgtcggtgtactggctgccgtaatcaaacggattgatgccacgctttacaccgtcctcgttgatatactcgatcatgttaatccccaatttctttgccgtctcatcacggaactgaatcatttccttgaatttccatgtcgtgttcacatgtaaaaatggaaatggcggcttctccggataaaatgctttcatggcaagatgaagcattaccgaactgtcctttcctatggaataaagcattactggtttttcacactctgccgctacctcacggataatgtagattgcttccgcttcgagtgcatcaagatgagataattgactcatgatcttcctccttaatatttattcgaatcctttttattcacaacaattgtttctattgtaccatctgtttttttaattcgccagtgtaacagatctccttccgtatggacggtcatctggcttcccatgccaccgatgtcggcacccaggtaataggaaattgcctcaaacggacactccttgatacaggaggcgcatccccagcagtccttcggataccggatcacggcttttttgtcttcgccgcgcacgatcaggcttccgggacagacatccagacattttccacacgccctgcatttcatggaatcaatcgcgatgctcataggtttctcctcctttcaccagatctctacggatcatcgtaatctggtccccgttctttttcgagtttacatagcagagccatgcatcactcttctccggataatccagattctccgcgaaactgtgccagcgtgtctccttgcgtgcacgcagatgtgcgatcacagtcaggcacacggtcaagcgttctttcagctcatagataaacatcagctcatgcatatcggctgccgcaagtccttttgcaaggatctgcagtttctttattttttcttccgccatggcaagctgcttttcgttgaactggtaatgggttccgattccgcctgcatactggtccatgactttctgcatggcttcctcgagttcctcaacggtaaatgccgggtcctgctttgtgagaaatgcatcatactcggcaattttattttcaagaaccgcttcttcatcagaagccgccgtatctgccacctgttcttcgtttaatttctgcacgatggaatgggctgcgatctcgccctccaccagtgcgccggttacatatttctgtggacagccgcctgccacatctccggcagcatagagtccgtggatcgttgtctctcgttcggtgtctacccagtaaccgctggcggtatgaccacctacgatatacggctcggttccctcaatttccacgttctgttcgcttggatttttcccggattccacccacttgagcgtctgtcccggtgccatgtttaagtatgcttttaagagcgattcatcctgctctgcggagatgccttcggtgcgaagataacatggtccgcgtccttttacgttttcttcaacagttccgtacacacgctgggaagtagtcagaccgtattttgtctcatacacttctccgtgtgcgttgatctgctttgctccgacaccctgtgcaatcgttccggtcggagcgatcgtatctttacagcgcagggcgataaagcgcatctcaaatgtggtcatctcggctccggcttccattcccatggcatatccggctccggtgttaaacggcggataccacattttatgacgggaaaagcccggattgttcggacggtaaagtcctgctgctcctccggttgcgatcagcactttttttgcgcggatctcgtaggccgtaccgtctgcaatggaaaaaccgacggctccttcgatcttattattgtttaccagataatcggtaatgtttaactggttgatgacggtcacatcgtctaatttgctgacagcatctgcaagaagcggcttgaagttttcgccgttgatcttgatattgcggtttcctcttgccacatactcgccgttttcgtcttttaagatgaccagaccaagctgttccattttggcggtcacacggttgagtccttcggacatggtcaaaagcagatccggacggacgatgccgtcggcatcttttgtggcgtagtccacgtaatcctgcggaacatgacctttggtgatataggcattgagcgcgttgactccggctgccagacagccgctgcgcttgatgttggctttttctgctatgattatggaataatcggattgttcacggatggtcattgccgcgtagcagcctgctgtgccgccgccgatgatgaggacatccgtatggagtattttttttccctcgattttcataagtaatccttccttgtgattaaatgtagaagacctcgccttcctgcatttccttattttctacaagataggtctggttttcatcaaatatgtaaagccggtagattaagacatacactttttcaccgatctctaccggatctttttcaagtgagcgctcggtgacgatcgggatacctcccacatcaacgacaacatccagatgatttcctcggaatatcacatcttttacgattccacgctcggcggcactcatgtgctgtggcggtgcacttctggacatgcggacaaattccggacggataactgcgtgggttgcgccctcgaccggatcaaatccaagcagacgctcataatgctctacgatcgaggaacggccgataaactgtgccacgaacggggtgtccggtgatttataaatttccatcggtgttcccatctgctcgatatgtccatggtttgtgatgataatctcatcggccacctcgacggcttcatcctgatcatgggtgacaaaaatgcttgtaatgccaagctttacaaccatctcgcgaagccagttgcgaagttcagtgcggacttttgcatcgattgccgcaaacggctcatcgagaagaagtacctgcggattcggtgccaatgcgcgggcaaatgccactcgctgacgctgcccgccggacaactggttcggataacgcttttccattccgcttaatccggtcagttccagcagttcggtcacgcgcttcttgatctcttttttcggcaccttggcaagttcaagaccaaaggctacgttgtcgtagacggtcatataacgaaacaatgcatagttctgaaatacaaaaccaatgccacgttttgccgccggcacatcgttgacacgctgcccgttaatatagatatcaccgctgtttggtgtctcaagccctgcaatcatgcgaagcagagtggtctttccgcttccggaaggtccaagcagtgcgactaattttcctttttcaatgccaaagctgacatggtcggaagcccggaagtttccgtaatttttacaaatatctctcatttccacgtacat

SEQ ID NO: 860 - DNA, 18108 bp, unidentified
  source 1..18108: mol_type = unassigned DNA
ttactgatctatattattggcaggcttatagagcctgtcagtgatcttgctctgtatctgtttcggcacaaagcctgtgatatctccgccgaagcttgcgatctcctttacaacgcttgacgaaaggaacatattctctcccgtagtggtgagaaacaccgtttcagcgtcattgtaaagctttttatttgcaagagccatctggaactcatactcaaagtcagacacagccctaagtccctttacgatagcattagctcctgttttttgcagataatccgccagcagaccgttataacaatccaccaccacattatcaaggtgcttcgtggcttcaattatcatttccattctttctgtaggtgtgaaagcagcccttgatttattagcattaaaggacaccagtactatcaccttatcgaaaagctttgaagctctgtcgattatatccagatgacccagcgtaacagggtcaaagcttcccgggcaaacagcgatacgcatcaatagtccacttctttcattggtatcttatagaccgtcaaagcagtcttaccgtatttatatctcttatgaagcttaagtctgccgtagctttctccaagctcaagttccttttcatgctcgcacacaatgatagcaccatcattgagcttgctctccacaagctccaaagccttttcaactatgcccattctgtaaggcgggtcgataaaaactatatcaagcccggctttggcaactttaagatattccagactatccatgcaaagcacacgggattccttattgaaaccgcatgaatccacattatccttgacgatagccacagcctcaggattgctgtccacgaaaacgcagtgactagccccacggctgagagcctctatacccatttgaccgctgcctgcaaaaaggtcaagcaccgagcttgctggtacatcaaactgaataatggaaaaaacagcctcttttaccatatctgtagttggtcttgtatccaacgactccaaagttttaagcttttttcctctgcatgaacctgtaataactctcataaaaaataactccaaaataaaagtatacaatcattatactatattaattaccatttgtctagactattcgccgatatttttttattttttataccacacacaaaaagggacttcacagtggaagtccctttagttattttaattacgtactctaagaaacaagtcctcagttaagattactttctcttagaaactacgatagctgcacctgcgagagcgatacctgcaagagcgatacctgctgttgcgcctgtagctgctgttttgtcagaagctgcatttgaagatgtagcagttgttgtgcctgttgtaccagtctttgaagaagttgttgcggctgtgctgttagcctttgaatcagtcttgctgtcagacttagaatctgtcttggaatcatcctttttgctgtttgaatctgtgccagaagtagcaggagcaacaggaacagcgttagcagcccatatccagccctcgtttgttgagccgtcatcgaacttctgagcctcagcgtttacagtacctgactgagcgatagaaattgtgtaagagccgtcgccgttgatagcagtatcctggcagtcaacgtttgtgtcgaatccacctgcgccacctgcgatacctacgcacttgttagggaagtaagctggctgtgcaaccttatccttttctttgtcatctggatttctgaaatcccaagtgccgtcagcttggaaagatacaccagcattgcctgttgtgtcaccaagaccttcaattgtgaagtcaatagtgatgtactcaccagcgcctgctacagtgtagtcagtgatctctgatgtgaacttgctgttccacttgttgatgatctggaagcagagcttgtctgaatcagacttgccaggagcagcacttacgttaaactcctgtgaaccgatctttaccttaagatccttacaagtaacgacctgaccatttacaagagcctcatcgttatcgttgtactcacatgggatatctgtagcgatgaacagatagttgtaagctgttgaatcagcagcgaaagctgttactgccatagctgttgtagctatagctgctgcagccatgcctgcgaaaatctttgtaagtttcatttctaaaacttcctttcttaaataactttaagtatattgtactttattttccgaaaaatttcaatcggctgatttaacaaatatgataacgttttcttatgcaatcacaacaatttgtactattgatttttagaagtatagcccaatttccgcactttgcaaaacttttttatcttatgtaaaaatactaaaccgtcatttatcaagctttttcttctgcacctttccagtcactttcagcaccatacctctaggagcaaatttagcccctgcataaagtgcctttatagacttctcagggataatgatgagttttctgccgaacattcccacaagagccttttttgcacaaaactgtggtgttatggagcttacgccgaacttgcagtttgcaacgtcattgaactccgtatccacaggacccgggcataccgcacaaacgtgtaccctgctgtttctcgccctcaactcctcatatattgcgctggtaaggctcacaacataagtctttgaagcatagtatgttgccatcatagggccgccgtacataagccctgccgaggaagctatattcattatataacccctgtcagcggcaacaaagtctttcaaaaacagctttgtgagcatatgcaccgctgtaacgttggtgtctatcattttaagctcagtgtccagaggaagctcgtcaaagctgcccactgcaccgaaacctgcgcagttcacaagcactgatatcttctcgttctttgtttcctcataaagccgcagacattcttccctgtcggaaacatcgcaaactatcacccttgtattgtcaccaagctccttcgcaagctctctgagcctttcctcacgtcttgcgctgattataacacgaaagccccttgcagatagatctctcgctatctctctgccaattcccgagcttgcgcctgttaccaaagccgtcttagccatttatatcatcctccacccttttcagggatattatttgatttttgtcatatcagtatatcacattagtatcaccctgtcaagtgtaagaaagatgtaaaatacgcagaaaagcatcgcaaaaaactgaataaaaatgtcaaaatctcttgacatttactttaaagtatggcataatgttaatataattttaagaaatagaataaaattaaactgagaaatcaaagaacaaagaacaaggagataaaaaattatgagttgtaccctttgcatacttgccgcaggtcttggaagtcgcttcaaaggcggcataaaacagcttgaacctttcggaccaaacggcgagataataatggattattctatctatgacgccgttgaggcaggctttgacaaggtcgtattcattataagaaaggatatccgtgatgcctttgataaaatgataggcgaccgtatctcaaaatacgtcaagatagattacgtttatcaggagcttgactgtcttccggagggctattccgtacctgagggacgtgttaagccgtggggtcacggtcacgcagtctgctgttgcaagggcgttataaatgagcctttcgcagtaataaacgctgatgatttttacggtaaggaagcttttgtgaagctccacgattttctctgcaatgaaaactcagatcgcaaaaagcttcatctcggcatggcaggcttcatactgaaaaacactctaagcgacttcggtgcagtgaacagaggtgtctgtgaagttaaagactctatgctcacagacgttgttgaaacctacaatatccgccgtgagaatgacggcaaggtctattcaggcaaggaagaaacagccgagcttgacgagaactgctatgtgtcaatgaatatgtgggcttgccctgacggctttatagataagctcaatggtatgttcacagactttatgaaagaaaataaagccagcctgacagcggagtttctcctccctgcgggtatcgatacaatgataaaaacaggcgttgcagactgcaagcttctggaaactcacgataagtggttcggcgttacatataaagaggataagccaaccgttaaagccgatatcgcaaagcttatagaggctggcgtttatcctgaaaagctttggaaataaaactcaaacaaacaaataatacagaataaattgtcaacaataagtcgggcagaacaaattctcccgacttttttgcgtctgtttgtaaaaagtgaagaaaatccttaattcgactaaaaagcacttgaaaaaggctgtaaaatgtgttatgataatctttgaaacggatctgcatttttgcaggtcaggagagataatataagaggtagtataatggagagccaacacggtagcaatttgaaaaatataagaaaaaaaagagccacagcacagcaaagcatagtgtcattgagctgtcttgtgtgcatagcatttgcggcaatatggggcttccatgcaggaagcggcaacagcagggctgtggaagcaaagaagatgtcagcttcaagctctgtggcagagaacgaaagctccgagatcaatgcagacagctcttctcaggcagaaagcatgatcgatgagagtggcatagatgaaagccttactgacagctcggttacccatgatgacgccgacgacctttccgacgcagttttcataggcgactcacgaacagttggtctgcaaaacaactgcgataaaccaaaagcaacgttcctttgctctgtgggaatgcacatcgacaccgttatgacagaccagaacatcaccctctcaaacggcaatacaggcactgttatcgacgctcttggagaaagacaatatggcagagtgtatataaacctcggcactaacgagcttggctggccttatatagacaccttcaaggattattatacacagcttatcacaaaaattcaggagatacagcctgacgctgttatctatgctgaatctatcctccctgtaacagcttcaagaagcttgcagggcgacgccataaataacacaaatgtagccacattcaatcaggctatctcagaggtggcacagcagacaggtataaattatcttgactgtacctccgctgtagcaggcgcagacggcactcttccggaggaagcctcctcagacggaatacaccttatgagcgaatactgcgacaagtggctcaactatataatcgacaacacataagaaaggaaagaaaaattatgaaaacaaagaagatactctgcactcttatggcagttatgtgcattggcacagcagcacttacaggctgcggttcagactctgacagcagcacagcaaactccgcaaattcagcggcagccgcccagacaaacgaaagcgttgacgtaacagccgttgcggacaagctcaaggacggcatagagttcaaggacgagcttgcagagcttgacgaagcaaagatagaaaagataatcggcatatcagcagacagctatacaaaggctaaggtctatgtaagctcatcaggaggaacagccgaggagatagactgctttgaagccaaagacgcagacagtgcaaaggctatcgcagatacacttacagcaagagttgaaagtcagaaaaaggtttttgaaaactatgtccctgaggaaatgacaaagcttaatgaccctgttcttgtaaccaacggcaattatgtttacctctgtctttcaaacgataacgataaagcaaaagagataataggctaggagtaataaatatatgcttttttcaagtacaacatttctgttcgctttcctgcctattgtactgataacgtattatatcgtcccacgcataacacgcaatctggtgctgtttattttcagccttgtgttttacgcatggggcgaacctgtttatatcgtcctcatgatagcttccactatcgttgcgtatataacaggactattggcagacaaacagcgtaaaaacgcaaaaaaatacactccgctcatcgcaatgataggagcggttgtgtggaacattgggcttcttctgttttttaaatataccgactttttcatcggtgcggcaaacagcattttcggcacgcagataaaaacgctgggacttgccctccctatcggtatctcattctacagcttccagaccctttcatacgttatcgacgtttataagggcgaagtaagaagtcagaagaacttccttgaccttgccacctatgttgcccttttcccacagcttatcgcaggtcctatagtaagatacatcgacgttgcggaacagctcaaaaagcgtaacgagagcatagagcattttgcacagggcgtgtggagattttccataggtcttggcaaaaaagtcattctcgcaaatactatcggcgagcttttcgacactatctcaaactcagcacaatctgaactgagcgttgccgcaagctggctgggcataatagcctataccttccaaatatactttgacttctcaggctattccgatatggcgataggtcttggcaaaatgttcggcttcgactttctcgagaacttcaactacccttacatctccacctctatcacagacttctggagacgctggcatatgtcactttcaagctggttcagagattatgtctatatcccacttggcggtaaccgcaagggcaaagcaagacagtgccttaacatcatgatagtatggtttctcacaggcttctggcacggtgcaaactggaactttatgctatggggtgtgtacttcggtgtgatactcctatgtgaaaagcttttcttgggcaaagccctgaaaaagatacctgcatttttccagcacctctatgcacttctttttatagtcataggctggggaatattctcctacgaagacttcggcaagctcacacagaacttcaaaaatatgttcggcgcagggggacttcctctcataaatcaccaaacagtgttctggctcgcacagtatgcagtaacaatagtgatacttgtgatagcttcaacacagcttccaaaaaagctctgccttaagcttcagatcaagtgtcctgagatatgcggctgtatactccaaccgctgtttgcattaacacttttggcagtttccaccgcctaccttgcaggtaattcattcaatccgttcctgtatttcagattttaaaggaggacggcagatatgaaaaaacaacttaaaaactatattatgatagtgtgctttctgctgttcatattcggctttgcagtggcaagttttatttccgaggaccgtgaattctccgaaaatgagaaccgctatctacagcaagcccctgagttttcgtggaaaaagcttgaaaaaggcgagttcacatcggatatcgaaagctatatgtccgatcagatatttatgaaagaccagcttgtgagtcttaaaacagtcaccgaccgcacgcttctgaaaaactatcagaacggcgtatatttcggcaaggacggctattatctccaagactatcaggaaaacagacctcttatcgagaaaaatataagctgtcttaacgattttgctgacaaccttgataaatccgtcgacgtaagctttcttcttgtgccgaatgcagtttccgttatgtcagacaagctccctgcggtcacacagaccgacgatcagcttgaaagcgaaaagtatataagctctatcctcagcgacaggataaacctctgcttcccatatgagcagctcaaagacgccgcaaagtccacgcaggttttttataagaccgaccaccactggacagccgagggcgcaaaagtgggatttgacgcacttatgacagccatgaatgaagatatcccacaggtatcctacaatatagaaactgtaaaggactttcatggcacactttattcaaaagccccaacagacttctccgctgctgacgaaatgcacttctacacaaaccctgacaacagcgtaaaggtaaattatattgaagaaaacaaacaaacagacaccctttttgacgattcattcaataccaaaaaggataaatactccacattcatgggcggaaactttgccctcacggaaatagaaacaaacggtgaaagcgatgaacacgtccttattataaaggacagctacgcaaacacagttatgccatactttgccgacaagtataagcacatcacaatgatagatatgcgttattaccacatcatggataagacagtcagcgagtatgtaaaagacaatggtataacaaaggtcattttcctttataatatggactttgtgaacaccgataacaacttcatatggcttgaataactcagcaacaattaggggcggccattggtcgcccgctatttttatcacacccatatataacgtcaacgtcaaacccacagaaagaaggacataaaatgacacttaccccctacaaaagaaaagccttttattatgaaacagaccgcatggatataatccaccattcaaattacgtccgttggcttgaggaagcccgtgttgaccttatggaacagcttggctgcccattccacgagatagaggcaagagggatagtttcccctgtcctctctgttgaaacacactataaatatcccgtccgtttcggtgatgagtttgaagtgcgctgtaagctgtcaaagttcaacggctgtgcctacgagcttgactacgaggtctttgaccttaccactcagaaaacagcctgccttgcccacacctcccactgcttcaccagccccgaccttaagcctgtaagactaaaaaaacattatcccgatatctacgagaaattcctgtccgcatatcaggcaagtgaagaataagcaaaaaaaatgtacagctcccgagtttcttctcaggagctgtacttttgtgtaaaaaaaatgacagacgtgacctgtcacgaagaaagcaatccatcaacgccctcacgccacttttcaaagctgcacaaaccaagctttgcccagcggcattccgaacatagtatatcaaatgcctttttatccattttgcttctcagccttgtgagcgcactgcgataattctccactgagtgacattctatctcagaaagtctgcaaacctcgctgtctttctgtgccaccgttccgccacagccgtcaagcaaacaaccgtcctccgtcctgtttgggcagtgctgacatatcatatctccgctgcacacaaaccgcaccgcagtgtcctcgctctccaatctgtctttcacagactgcatattcaccgaaaaaccgtcactgtagccttttccctgaaaaagcggcaggcacagcagatgatgaaatctaagctcaggctctcttgtaagcatagcaacctgtctttgcaagtctgcttacaagctcgatgctgataaggtaagcagcaacaacagagataacgtcctttacaagataaggaacagaaacaagaaggattgacttgccaatagagatattagcaacgatagcgtactggatagcaccgagcaggtggtcgcaagcaagacctgcgataccaagcacgatagcgatgaccttaccgcttatcttgtcagagcagaactttgcgccaagaccgcaaagaagagccataacgataaatccgtagatgaatccacctgtataccctacgataacggagaaaccgcctgaccagcctgcaaacacgggcacgccgatagcgcccagcagaccatagaccagagcagacacagctccgcccttccagccaaggaaatatcctgccagagccacagcaaaagtctggagcgtaacaggaacgtgagtaggaagcggaatagttatctgcgaaagcacagcgattatagccgtcataactccgataccgactatttgttttgttttgtttttagcattgttattcattgtaaacctatcctttactttttatttgacaactaatattgtatcacataccaatcctattgtcaaccaaaaatatttatttcggtatacaattataaggtgtcggtaaacgatacttttatacaaatttaataacaaacagtaaaaacacggcattgcccttccgaactgtacaccgagggcatcgtcccctacaatatttcgggcaacttcctaccaccgcaaaatcgctacgctcggtgctgtcttttacttcgtacttgagcacaactctgttcagctttgccaattcctcactcctcatttctcacttccccttgtgcattttgcccttaaatcctactaaattgatagaattaatatcagttttcacaaaaatgcgaaaaatcatcttaaacctattgacattcctctatgggtgtggtatagtatagatacgctaaaacatactaaacgactaggattaatatgaatttgaaatgaggcgttgaaaatgagtgtaaaaatactgaaactgaaaacagcgtacgattcacgaatgtgtatgtgctgtatgtgttgctgttaaaatcagcataaagttcagtaacaaaaatttttatcggatttaaaaaacatcaatttaatgaaagaggtaatttaaaatgagcgcaataaacgaaagaaatcttaaatttgaaacactccagctccacgttggtcaggaaacagcagactctgtaacagacgcaagagctgttcctatttatcagacatcatcatacgttttccataactcacagcatgccgctgacagatttgctcttaaggacgcaggtaacatctatggcagacttacaaacccaactgaggacgtttttgaaagacgtatcgcagctctcgagggcggcacagcagctcttgcagttgcatcaggcgcagcagcagtaacatacgctattgagaacgtagcccttgcaggcgatcatatcgtagccgcaaagaacatctatggcggcacatataacctgcttgcacacactcttgttgattacggcatcacaacaacatttgtcgatccgcttgatccagctaactttgaaaaggccatcaaggagaacacaaaggctctctatatcgaaactcttggcaaccctaactcagacgtagttgatatcgaagctatcgcaaatattgcacacgcacacaatatcccacttctcgttgacagcacattcgctactccatatctcgtaagacctatcgagtacggcgcagatatcgttatccattctgcaacaaagtttatcggcggtcacggcacaacaatcggcggagttatcgttgaaagcggcaagtttgactggaagaagtcaggcaagttcccacagctcacagaaccaaacccaagctaccacggtgtaagctttgcagacgcagcccctggcgcagcatttgtaactcgtatccgtgcgatccttctccgtgatacaggtgcaacactttcacctatccacgcattcatcttcctgcagggtcttgaaacactgtctctgagagttgagcgtcatgttgagaacgcacttaaggtagttgacttccttaacaagcacccaaaggtagaaaaggtaaatcacccttcagtatcagacgatccaagccagcaggcactttacaagaagtatttccctaacggcggcggttctatcttcacattcgagataaagggcgacgcaaagacagctcagaacttcatcgaccacctgaaactcttctcactccttgcaaacgtagcagacgttaagtcactggttatccacccagcatcaacaacacacgcagagcttaacgaagcagagcttgcagatcagggtatcaagccaaatactatcagactttctatcggcacagagcatatcgacgatatcatctacgatctcagcgaagcattcgacgctatctaataaaaaccttgccattacggtttttacctaaaaatacaaacctcaatatagaaacggctgacaggcgaaaagcttgtcagccgtttttgtacccataaaaaaagcagggcaacaacaagccgccctgctccataaagcaaaaagtcagaaaaaaatccttcgccacaaggcgataccttaattcctcactcctaactcctcactacttctccagctcagagatcttatccactctcctctgatgtctgccaccctcaaactccgtttcaaggaaaacgtccaccagctcgatagccaagcctgcacccagcactctcgcaccaatgcaaagcacgtttgcgtcattatgcgctcttgtatacttagcagagaaataatccgaacagcaagccgctcttattccctttatcttgtttgcgctcattgacattccaataccagttccgcatatgagtattcccatttcgtattcgcccgaagccactttctcgcaaacttcctttgccttgtcaggatagtctactttctctcctgcctgaataccaaaatcagtgtattccgcacccttttcgtccaaatgtgccaatatctccgccttaagctcaggacctgcatggtcacatccaatagcaattttcatattaatttcctcctatttatccctatgtgccttatccttttccgcctttgtagcctgcaaatatgatacctccagcctgtcagccgaaaccattatctcaggctgagcctccaccacaagacacagcgacgaagccctctgcagcctgttcacatagcttgcaagctgaacattttcgttgtcagcgaaatatttcgcctttatctctgccgcacagtcacccacaagcattgtcttttcagtaaactctcccgaaaaaacttcctcctcagggcaaactctgtcagcggatatcctcgtgacaacgccgtttttgcactgaaactcgcctgcgtaaactatcttaggccttgccctcataacagaaattatcctgccctcaaaatctatgcagttgtacgccagcgaaagcagagtggaaactcctgcgctttttaagctctcacagccaaagcacattccctttacagccgccacgcctattctaagcccagtgtaagaccccggaccctttgcaatagccgcacaatcaaggtcagtataagtaagccctgtttcctctagtgcctgcttcaccataggcaatatcacctgggagtgagtgagctttgtgtatacagatttctcccaaagaagcttctctccgtccgtcaccgccaccgaagcgacctttccgcttgtgtcaatagctaatatcttcaaatctatcatctccctcaggtgcagttatgcttatctccctgctgtcctcgtcaatgcgctgaatatctatcctcaaagcgtcctcaggaagctcctcagcaatattctccgaccattccaccgcaagcacagtgtcttcgtccatgtagtcaaaaaagcctgtagtttccagatcgtccgcagaatttatgcggtacatatcaaagtgtacaaggctgagcctgtccccacggtattcgttcaccagtgcgaacgtgggcgaagtcacctcgtcaccaagtcccatgccaatggagatacccctggtaatagtagtctttcctgcaccaagaccgccgctgtaagcgataagatcgccgcctttcagccgtctgcctatctcctcacccaaagcgatagtttccgccgcagatgatgttttgtatacctttgtcaacctatcacctcatttgaccgtcatcttccgtgtagcccacaataaaaaggctgtttttattcataagctgataaatgctctccacctctgtcttgtccgccgctgaattgtagcagttgtaaacatacagcctgccctcctctttaacagcgaaaaccgtgtggataccgctgaaaatattcaacccgatatggtaagaaactatcacaggcttgcccttttcaacagccgcctgagcctcatcaaccttataaaatcttttgtatcccactcccattgccttaaaaagtccgcttattttcctaggattagaccccagcgaaccgtccgccgcaataagagcattcttttcaaaatcataagcaagctttgccatgtcaggctcaaagccctcgtatgtgagataattataagccgcaatgacctcacagcctacccctgcgaacctggtttcgccaagcatcagatcgcacacagggggattttcctgcccgtatttcacaaagccctctatctttatgcccttgttgtgagcataattttccgcagccctgccgctgtccgtttccttataagtgtcctcaaaaagccgccacttcatatcgtcctccgagctgtcgccctgaatatcgctctcatcaccgacctgcgagctttcgtcaacttccacgctgccactatccaccacagggctttccacagtagtggtaaaagccgaatcattgagcctttcactgtccgccctgtttccgcatgaactgagcattatcccgagaaacagaatgaccgcaagaattttcatcacagctcacccttgtccttgaagtagtttagcataagatccaccattctgccataggactgcttgccatcctcaacgccattgagcttcagagatttttccattgccttgtcagatatctcccccactgcctcgctgtcgaaaacagtgtccttagcctcgtcaacgctccgccagtagtcccagtttgcttccatatcagcccacacctcgtcgcagatagagctgtcaaattctatcttcttatcgtcagaagcgtagtcaaaaatcttgtttctaacctcgccaagcgccgccagatagcccgaatagcggtaatcagcattgtccgatctgtcgcacgccataaaggcgataaagttcgcctcatcctcctgaatgtagcctttcgtatgagcaagctcatgacaaatggtgtcaggaagcttcgccttatacatatcctgattgtagttagcctccatagagaatgggaaatagatgcccataaggtccatttggctcataaagaacgagcattttatagctttcggagtgacataaaatcccccgaggtttttaaattcgctcccaagcccacgcatggcctcctgagccgtcttatcaaggtcagcggtcagcacgaattttccctcgttgtcacgctccacctctttgctaagcacatttatctccgtaacaagcttgttgccaagtgcttcaagctccgtcctggtgtgctgttcagtgggtatgccattaagctctgcaaagcttgaacaatgataaagaacaaagcagttaaaggtctgcaccgtcaccacaaaagtgactatccacatataaacaagcccgaaaattttcgcagttttctttctcttgccttttatgactatcacaagcaccagcatagccaccagcgaaagcggaataccgaaaactgctaccgcaataagcagttcgccaaaagagaacggcaacagcgaagtgagcctgccatatgtattttcccaaattggaaaaacgtgagccgtataccagtcgcagaacgccgtacttttccaggcgatcacgttcagcacaacgctgactgccacaaggcaaacgcaggcaatgacctgccaggagagatgttttttcttgccgttctcaggcattttcacactttccgcactctttttcaccgctgtatctgtcactgccgctcacctcggttcgtatattttcacttgctatcaaaacacatttgcttgcccgccgaagtaacaagccaacggtaacaacatggttagaataaccataaaaactatcctatcacatctgtaggggacgacgccctcggcgtcccgttatttctcgtccgttgaattaacggagaatatcacaacaatgtcgcccgaataattcgacatcaagaatatgacaatcacggcattacccctccgaacgggctgtcgcatttctgaatatcacgccactctgcacacacgggcgaacgctgttcgcccctacaatgtttcaggatagtttgctccgccgcaaaatcgctacgctctttgcggggttacatttgctaagggagagggtaggcggtgcagatttttcactccgatattactttgtgataaggcacaacttttgcgtgctttttttcattaaatctgcacatagtcggcttacgccgaatgaggctctgcctcatactccgcttagggctttgccctaagaacccacaagccctctaacgccgggcttgagcctgcgttttagtgctcgctacgctcggttctgaatgatcggctcggttcagctatgccaattcctcattcctcattccttatttaaccccctgctcctcacttaaacggcttagaacaatccgtagatattgccctcattatcgcaatcgatattataagccgcaggcttcttaggcagaccaggcattgtcataatatcgcccgtatatgctaccacaaatcctgcaccggctgaaagccttacatctcttactgttatctcataattctcaggcttgccaagctttgtcggatcgtcagacagtgaatactgcgtcttagccacgcaaacagggatatccccgaatccaaggtcagtgatctcctttatagccttttcagcctgctttgtatagatcacgccgtttgcacggtatatctcctttgcaagtatatcaagcttatccttgatagggagcttctcgtcataaagtggcttgaactcagacggctttgtttcgatagtcttgcaaaccttttccgcaaggtcgataccgccctcagagccttttgcaaaaatctcagcaagtgagaactcaacacccatttcaccgcaaactctctcgataacagccagctcagcctcagtatcagtatggaatctatttatagccaccactacaggcacaccgaacttgtgcatattctcaatatgagttttcaggtttacgatacccttttcgagagcctcaacattttcgttagtaagctcagttttcggaacaccgccattgtatttcaatgcccttacagtagccaccagaactacgcaacttggtttaagaccagcgtatctgcacttgatatcaaagaatttctcagcgccaaggtcagagccgaagccagcctcagtgatagtgtagtcagcaagcttcaaagcaagctttgtggctcttactgagttacagccgtgagcgatattagcgaatggaccgccatggataagagcaggattgttctcaagtgtctgaacaaggttaggtttcaaagcgtctttcagcaaagcagtcatagcaccgcaaccgcctatatccttagcataaacaggctttccgtcagttgtgtaagcaacgagtatcttctcaattctagccttaaggtcagccagatcggaagcgagacaaagaatagccattatctcagaagcgacagttatctggaaagaatcctctctaggaataccattcacctttgagccaagaccgataacgatgtctctcagagctctgtcattcatgtcaaggcaacgcttgaaaagtatccttctctggtcaatgtgaagctcatttccctgctgcatatggttgtcgataagtgcgcagagcaggttgttagccgcagttatagcgtgcatatctcctgtgaagtgcaaattgatgtcttccataggaacgacctgagcgtatccgccgccagccgcaccgcccttgataccaaaaacaggaccaagtgaaggctctctcagagcgagtatagctttcttgcctatcttgttcatagactcagccaatccaacggaaatagtggtcttgccctctcctgcaggcgtagggtttatagcggtaacaagaataagcttaccatctggatcatttttagttttagcataaagcgactcagaaagcttagccttgtagtgaccataaggctcatattcatcttctgagatgccgagcttagcagcgacctccccaattttgagcattttcgcctgctttgcgatttcgatatctgacagcat

SEQ ID NO: 861 - DNA, 23885 bp, unidentified
  source 1..23885: mol_type = unassigned DNA
aaagttgtcccccgcctttgcgtccaccagaatggtgtactgcggcgactcggtggaagcgtgctccagcagcttcaggccggtgtcaaagccgctggtcagctccgtttcggcgggcagggtgtagatcagctgtgctgtctccgcctgcgcaatattcaccgtgcagctggcgctcttgccgcctgccgtagctgtcaccgtgcagatgccggccttcacggcagtcaccgtgccgcctgccaccgtagcaagaccggcgggcgaaacgctccaccacaccaatttgttggcagcgttcgcgggcagcaccatggcggtcagggtctggctctcgccctcgctcaggttcaggatcgcggcgctcaggctcacgctctgcaccggaatgtcctgtgcactgccgccccactctgcgcgcagggcattcagggcagactgtgcatcgccggtcttgtaggccgcgttttcaaacagggtcagcagcagttcctttgcacctgcggtaaagccgccggctgctgcaatgccctcctccatgtggttcaggtgggcagccgtcagggtctggccgtccacaaagttttgtttttcgtagctcattcgttcctccctaagctcatttttccaaggatcgcccgtcccagcacggcaaaaacgttctccttcggcggctgcggggcgctccacagcgcttccagacgggcataggccgtcatggctgcgtcattgcccgccgccagaagccgcagcactgccagcagcgcctgtttttcctctgcggaaatgccgcccgcgcccagcagccttaccagcgcctcccatgcagaggtagccggtgcgggcagtgtaccctctgccgtgccgctgttggcacacactttgcaccgcacatcggcgctggtcacggtgcggctgccgtccgacccctcaaaggtgatgcagcccgcaccgggcacggccgtcaccgccgccggaacctccagaacgccgttttccacaagctgggctgcacttgcaccgggggtgtgccaatgggcgcacacggtcagtcccttccactcgccccgctgctcgatacgcagccggtagttgccccggttgcccgcataccccagcagcagctgcccgccgggcacggctgccgcgccgtttttgtccagccggatggtcatctcgttcatgccgcaccacccttacacatactggtagccctctacgttaaagggatactcaaagctgagactcgtgtccgttctcacaacgcctatgctcagcacgccgctgtctgcaaagctgatccttacaggcgctgcgccgctgcacttgacgccgttgctcagatcagagcttgtgccgcccaccatggccaccgctgtgccgccccgcacgatgcgggtgctgccgtagtccgcagcagcggcgaccgggtttgcgccgttttctgccgtgggtgccaccatccgcaccacaatgtaattcaccgtgcccggcacggtcaggctcgtggcagatttgcccgcaacgcctgcgccggtgtagaccagttttccatccatatttatcatcctttccagtcgttccagtttttctgtcaggctaaagcccagtaccgcgttcaggttttctctggtcacctccaatgttccgtctgcgcccacagtcactccccgcccggcctttacgccgcccagcacggcggcggtggcacacggcagcgtgtaggccgtgccgaatttccggtcagcttcggccttggagtagaaccggtcatctgcgcccagctgcagcagcgctgccgccttttcctgcgccgaccagcccgccgccccggcggcgctggtcagcgctttttttacgccgtagggcagcagcgccggggtcaggggcgcataggcttcggtcatgcggtccagctgtgccgctgtggcgggcacggtggtcagggtggcgtctgcccgcaccgcaacaccgtactgcccgtctgcacgcactgcgccggacgttttcgctgtgggcacggtctcgctgcgcacataggggcgcagatccggcagcggggtcgtgtccgtctgcaccgcaccggtggcactattcacgctgaggatgcgcaccaccgcgccgggcaaaggctgtgccgggcgcggcaccgccgccacatcctgtgcggtcagccgcactgcgccgcccttgccgttcacgctcagcacccgtccatcggcaggggcatagctctcggcccgcagcgcagcggcctccgcccgctttgcgcaggcgtcggcatcggtgcggtcggcaaggatcttgtccgcagccttttgcgccagcgccgcctgcacggccgtgtctgccgcaccgttctcggcgcggcgggcgctctccgctgcggcgcgggcgctttccagcacgcgcgccacgaactgctcgtacaccgagggcggcagctcctcactgccgccgtccgtgggcagggtggcgtacacgtcgtagctgccggggcgggtgtaggcggtgtagccgccgctgcccatggcggccagcatccactgtccccgcacactgccggtcaggcggcggtccaccgtcacgctgccgtcggtgtccagcggaatggcggccagctgcaccccgtcgctgcggcgcaggtacagcgccagcgtgcactccgcccacgctgcgggcaggatgaactgcagccggtccaccccctcggcgttctgtgcgccaaggtgcagccggtgcgggctgggcacaaattcggtgccgccgcactgctgttcaaggatctcgatctccatgcaaaacctccttttctgtttgctgtcccgattgtaccgccgggggcgcaaaactatccagtgtgtacagaaaatgtgaaattttctgttcttcggcattttgctaaacggggtttttgcgccgcaaatacaggccgttttcccctgccggagcagggtaattcccccgcaggttttccatgcaaaacccgcgatgtggggcagcttgttttgggcgcagcggcagtatctgcggccttatttgcaggaaaaaaagccggcgcaaatgttaaaaattcatgaacaaatcatgcgcagaaaaaaggcaaaaatcagaaggaaaccacctaaaaaccaaaatataaaagaaaacactgtgaaaattgcacaaaaaactatgttacaaatctaacaaaatgcgagacacagatttgacagatgctttacggtctggtaaaataccgtttgtgcaacgaacgttgcagcgtttaaattctatctggatgaagtaaaaagccgtcctgcgtacggcacggcatgggcagatgcggcccgtgccggggcagttttgtggtctgcccaaagcggattccaacctgtaatacgatgcttcttcttttacccaaagagagcatcgtatttgactgtgcggcgcttatatccccagccgccgcagtccgggcggccggggtgccgatgcaatacccgcggccgcgccaaatacgacaaagagaggagttgtctcgtatcgcttccgttaaattgaagaaagcagttactgccgcaaagcaggcagtatctccccgtgtgctggcattttgtgtcatggtggtatgccttgtggctacccttggcgtcaccgctgcaaatctgcggctgacctacgtcaccgactccaatggtgcgcggcaggttcttgtgaccgatgccgctgcttcccccgcacaggtcatgcacctttccggcatccgctctgaagagggcgatgaggtctactacaccgcgttcagcggcaatcttgcatccctgaatatcgagcgcgcattctccgtcagcatcaccgccgacgggcaggagtacccggtcaagctggtgtacggcaccgtagccgatgcgctggagcgcgccggcatcacccttgaaggggacgactacaccgagccggcgctggatcacatcgtgacagccggcagcaagatcgtggtccaccgcgtggactacgaagagcgtgtggagacgcaggctatcccctacgacacccagtatgtctacaccagcctgtacttccgcaacaccggccgcaccactactatgcagcacggcgcagccggtcagcagaccgtgaccacccgcgaccgctatgtggacggcgagctggagaacagcaccgttgtggataccaccactacggtggagcccaccgaccacgtcatcaagacctacggcgcaggcgcaccggtgtcccccctgaccggcgcggacggcaccaccaacgcccctacctcttatagcaaggtgctcaccggcaaggccaccggctactattcccgtggcggcaagggttcttccggtctgggactgggctacggcaccgtggctgtggatccggacgtgatcccctacggcaccaagctctacatcacttccaccgacggcaagttcgtctacggctacgccgtagccaccgataccggcatcgccgtccagaaagggcagatccttgtagacctgttctacgagacctacgccgaaagcgttatcaacggcgccattcaggtcaacgtctacgttgtggactgagaaacgaaaaacaataaccactaaaaaatcggagcacctgcgggtgctccgatttttttattttcacgggaatttaaactccctcagtcaaaacccaccggttttgacagctccctcggagagggagcctttggcaatgcgggacagttttccattcaacggaaaagccaccggttacgccagaggccccatcccagtggccgacttcccccggccgggggaagatgtcaccgtaggtgacaaaaaggggaatctggcatcgcgcagcgatgcctgggggagtttgctttaccgttatgagcaccttcttattcacaaaaatgtcgcatccgaaactctttcttcttttttcgcaacgctttcgccggaaccgtttgtcaaatgagcagtttacacgatgtcgagctgcaaattttggatggtatgcccacaacatacagagaatgccagaaaatttgtgttaattgtatttgattttcggacaaaaagtcttgcaaaaatggtaaaaaccttttaatataaaagagtacaaagctgcgaaagccgctttcggcttccgcacggggaggagcagtctatgaaaccgaccgaagaaaagattcagagcaatacatcggatctgccggtgtacctgttcaagcagggcaataactgcgaggcttaccgctacttcggcgcacatctggaaacacgggtcggggagtccggcgttgtgttccgtgtatgggcaccgcacgccgcagccatcagcgttgtgggcgacttcaacagctggaagcccggcagccatcccatgcgcaaggtggatggcgattccgtgtgggaattgttcattcccggcatgaaggaatacgatgtttataaatattgcgtgaccacccgcgcaggcgaccttgtctacaaggccgatccttacgctttccacgccgagacccgtccgtccaacggcagcaaggtctacgacctgtccggctttgcatggcacgacgccgcatggcaggccgcacagaaaaaggcggatgtgatcaacggcccgatgaatatctacgagatgcacgccggcagctggaagctgaaggagggcggcaagccctacaactactccgagctggcggacgagctgatcccgtacatcaaggatatgggctacacccatgtagagctgctgccggtgatggaatatccgtttgacggcagctggggctatcaggtcaccggctattttgctcccaccagccgctacggcacccccaaggactttatggcctttgtggataagatgcacgccgcaggcattggcgtcatcatggactgggtgcccgcccacttccccaaggatcagttcggactgtacaattttgacggcgaggcctgctacgaggaccccaaccccaagcgcggtgagcacaaggagtggggcaccatggtgttcgactttggccgcaacgaggtgcagagcttcctcatttccagcgcactgtactggctggagcagtaccacatcgacggtctgcgggtggacgccgtggcttccatgctctatctggactacaaccgcaagcagggcgaatgggagcccaataaggacggcggcaaggagaaccttgaagccatcgccttcctgcgcaagctgaacaacaccgtgctgggccgtcacccccacaagtacatgatcgccgaggagtccaccgcgtggcccatggtcacaaagcccgcttcggacgggggtttaggcttcaacttcaagtggaacatgggctggatgaacgatatgctcagctacatgaagaccgacccgctgttccgcgccggcaaccacaacaaggtgactttcagcttcttctacgctttcagcgagaacttcgtcctgcccatcagccacgatgaggtggtgcatggcaagggcagcctgctgaacaagatgcccggcgagtacgacgacaagtttgccaatctgcgcaccttcttcggctacatgatggcgcaccccggcaagaaactgctgttcatgggacaggagttcggccagttcgccgagtggaacgagacaaagcagctggactggatgctgctggactacgacaagcacgccgagctgcagaactacgtccgcaccctgaacgccttctataaagagcaccctgccctctggcagatcgattacagctgggagggcttccagtggatcgtgccggacgactcgcagcagagcgtcatcgccttcctgcgcaaggatgccgccggtaagcagatccttgtcatctgcaacttcaaccccgtcctgcgcgagggctacaccctcggcgcaccggtgtccggcacttacaaggaaattctgaacagcgatgatgccgctttcggcggctccggcactgtgcacaacaagccggtgcgcacccacaaaaagccgcagcacggctttgagcagagcatcaccgttaccctgccgcccatgagcaccctgtactttgaggtgcccacaaagcgcacccgcaaggcagcagaggacagcacggacaaaccggcaaaaaagaccgccaaaaaagccaccgtcaagggcgccgtggaaaaggcggtaaaaaagacgacccgcaaggccaaagccgagccggacgccgacaagccggtaaaaaagacccgcaccaccaaggccaaggccgctgaaacggcggatgaaaaaccggaaaaagcaaaaaagaccgctgccaagtccaaagcaaagcccgagacggcagcggaaaagccggtaaagaaaaccgccgccaaggcaaagaccgcggcaaaagcaaagcctgagaccgaagcagaaaccaaacccgcaaagcgcacccgcaaagcaaaagcacccaaggaataaggatgcccacacggatgcacgcacgaacattctgatctgttgactatcatttccaaaacggaaatgctaaaggggagaataaagctatggcaaaagaaatcgtggcaatgatccttgccggtggacgtggctcgcgcttatacgcgctgacacaaaagacggcaaaacctgcggtgtccttcggcggtaagtaccgcatcgtggacttcccgctgtccaactgcgtcaactccgatatcgacaccgttggtatcgcaacgcagtaccagccccagaagctgaacgagtacatcggtaacggtcagccttgggatctggaccgtctgcacggcggtgtgcacaccctgcccccttacgagcaggcaaacggcaccgactggtacaagggcactgcaaacgccatctaccagaacatcggcttcatcgacagctatgatcccgaatacgtcatcatcctgtccggcgaccagatctgcaagcaggactacgccgacttcctgcgcttccacaaggaaaagggcgcagagttctctgtggccgttatggaagtggactggaaggaagcttcccgcttcggcctgatggtggcggacgagaccgaccgcatcaccgagttccaggagaagcccccggtgcccaagtccaatctggcatccatgggcatctacatcttcaactgggatgtgctcaagaagtatctgatcgaggacgaggccgaccccaactccaagaacgacttcggcatgaacatcatccccgccctgctgcgtgacggccgcaagatgtacgcctaccgctttgccggttactggcgcgacgtgggcaccatcgacagcctgtgggaagccaacatggaagtgctggaccccgagaactccggcatcgatatctttgataagacctggaagatctacagccgcaaccccgtgctgcccgcccagaagatcggcgagcgcgccgttgtgcaggactccctcatcaccgagggctgcaagatctacggcaatgtcaagcactctgtgctgagcgcaggcgttgttgtggaagagggcgctaccgttgaggacgccgtgctgatggacggtgtcgtagtcaaggcaggtgccgtggtcaagcgctgcatccttgctgaggacgttgttgtgggcgcaggtgcaaaggtcggcggcgagggcgctattgcccacgttggcaccggtctgaccatcggtgcaggcgctaccgtcaaggagggcgcaaaagtgtttgaatccgtcaaggagggtgtggaagtatgctgagacagaacaccaatgcgttgggtatcattttccccaacagctatgacaataccgttcccgagctggtgaccgagcgcgcaatggcctcgatcccctttgcgggccgttaccgcatggtagactttgtgctgtccagcatggccaactgcggcatttccaacgtttccatcgtggtgcgtaaaaactaccattccctgatggatcatctgggcaccggccgcgagtgggatatggcacgccgtcacggcggtctgaacatcgtacctccctttgcagaaaagggcgtgcgcatctactccggccgtgtggaggctctgggctccattctgagcttcctcgagcaccagaaggagaagtatgtggtcatgagcgatgccaacatcgccgtcaactacgacttcaacgccctgctggctgcccatcaggccagcggtgccgacgtgactgtggcctatcaaaagaccgagatccccgagggccgcaagaacgacaactacaccctgaccattgattccgatggccgcgtgaccgagctgctgttcaacgactaccgctccggcgtgcagaatctggatctgaacatctatgtgctggagcgcgagaccctgatcaagctggtcaaggacgccaccgcccgcggtctgatctacttcgagcgcgatattctggcacacaacgtcaacatcctgaacatccatgcgctggagtacaccggctatgtggctcatgtctgcgacatgaagagctactttgacgagaacctgaagctgatcaaggacgagaatctggaggcactgttccccaagggctgccccatctacaccaagatccgcgacgataaccccacccgttacgtcaccggctccaaggtttcgaattccattctggccgacggctgcgtcatcgagggcactgtggagaactgcgtgctcttccgcggcgtcaaggtcaagaagggtgctgtggtcaagaactgtgtcctgatgcaggataccgtggtcgagcccaacgtggagctggactgcgttgtcaccgataagaacgtgaagatcaccgccggcaaaaagctgtccggcaccgagagcttcccggtctacgtccagaagaaccacaccgtctgatcgatgcaatatccataggggcggcttcctccccggtagcccctcttgagaggggcgggggcacctgtgtgcccccgcctgctcttttgtatgcaaggttcgcgccgcttttcatggcggcggggagcgcgaacatctgtctgtatcatggaaggagcgaatcctatgaagatcctgtatgctgcttcggaagccaatccctttgccaaatccggcggtctggccgatgtggcaggtgccctgcccaaggcgctggtcaaggacggtgtggacgcccgcgtcatcatgcccctgtacggcgatttgaagtaccgcgataagctggaatacgtcaccaactactccgtgcctgtgggctggcgcagccagtattgcggcctgttcaaggccgatgtggacggcgtgacctactacttcttggacaacgagtattacttcaagcgccgcggcttgtacggcttctacgatgacggcgagcgcttcgccttcttctcccgcgccgtgctggagaccttgttctacatcgacttcacccccgatatcatcaactgcaacgactggcagaccgctctggtgccggtgtacctgaacctgtactatcgtcatctggacaagttcaaccgcatcaagaccgtgttcaccatccacaacattgcctatcagggcaagtatggcaccgatattctggaggacacctgcggcatcggccaccgggaccagcatatcgtggagtacgacggctgcgccaacttcatgaagggcgctttcgagactgccgacaagatcaccaccgtcagccccacctacgcacaggagatcttggacccgtggttcagctacggtctggacgctctgctgcgtgaaaaacagtacaagctgtgcggcatcctgaacggcatcgatatggacgccaacgaccccgctaccgacaaaaacatccccttcaattacagcatcaagacctttgagaccggcaaggccaagtgcaaggaagctttgcaggacagatttggtctgaacaaagacggcagccccgtctttggcatggtcagccgcatggtgggcatgaagggctttgaccttgtgcagagcattgctgacggtctggtggaccgcggcatccagctggtcattctgggcaacggcgagagccagtacgagaacttcttctccgacctgtgcgcccgtcacccgggccgcgtaggcacctatatcggctttgagcccaagctctcgcaggagatctacgccggtgcagatgccttcatcatgccctccaagagcgagccctgcggtctggcacagatggtggcctgccgctacggcacacctcccatcgtccgcgagaccggcggtctgcgcgactccatccacgacagcaccatgggtgacggcaacggctttacctttgccggttacaacgcccacgagctgtatgtggcctgctgcaacgcacaggatgcctacaacaacaaggaaaactggaagaacctcgtgcgtcactgcatggagtgcgatttcagctgggacgtttctgccaagagctacgagggtctgtacaacgagaccgcaaacctctggtaagcgcctgaaccccaaagcacccgccggggctgccgcacaaacgtgcggcagccccttttgcataagacgatttaaaatggcttccgcttcgctctagccatattcagcggaaaaattattttaaatttcgcgtttgtcgcgctctgcggagcgctccaaacgcattttcacagatggggtcacaagggcaaactgcatttgcagtgcccgcttcctacggaagcggcggcactgcgggcagaatcctctctcgcccaaacgccgctgcacaaatgtggacacagatccacagaagtctgccataccgcgcgactgtttccgtaggaaacgagcgcggcagctgccgttttttgttacgacccctcccgtgaaaaagtagtttcgaaacgcccgcaggcgtttcgaaactacaaataaaaataatccttccttaaactatgcgcagagcaacgcggagcgcatttaaaattgtcaccccgccggagagccgacctttcacttttttacactctgcacaaacttttctgcaaagtttgtgcaatgatgtgcccgcaggcgcacaatgtgtgttttcggcgcacatttatggaatcagtcttaacaaactatgaaattttactatatttcggtggagaattgattgcaatatccaacgttttgaagtatactgagggcatagactttttggctgcctgtccatctctggcaagacttccagatactggaacacaggcagcacccgcagaaaggagcggcgcaggacttgaagggctggtataaagctttagaggatctggtctggctgacccagctggggctgaatatgctgctgccgctggtgctctgccttgccgggtgctggtgggctgtggagcactggggctggccggaatggctgtttttgcccgctgtgggtctggggcttgccgccggggcgcagaacttctgggtgttctgcaaggaacggctggagcgctccaaacacgaaaaaaatcatcgggtgggctttaactcccaccagtaatggaggtccgtttttatgaaattgcagccggaatccaaaaaggagctgctgcgtatcgcctgcggcgtgtccttatgcaccgccgtgatgtgggtggtgtttgcagcgctgcatctggtgggctgggtggtctttgactaccgggtgctgctgggcggcatcatcggtgcgctggtggctatcggcaactttgccggcatctgctttgtggtgcagaaggtcattgacgagccggacgaaaaaaagcgtaaagcgcagctgcagatatcctataatacaaggatgctgctgcaggcgttgtggatcatcatagccattgcggctccctgtttccaggcgtttgcaggcgttctgccgctgctgttccccagagttacgatctattatctccagataaccgggaagtacaagccgctcacacccccgcaggagccggtggacatcgctgtggaagatgaccccgcccccgccaaggcgtctgcggtgcagccccgtgacgaagggggtgaacaagaataaatggaactgaacggcgcaaagatcctgtataccatccacaccaatatccccctgctgggtgattttaaaattacccagaccttggtaaccacgtggatcgtcatggcgctgctctcgggttttgccatctggctggggcacgacctcaagctggaaaatgtgtccaaacgacaggccgcagccgagttcatcgtaacacggctggagcagttcgtgcacgacaacatgggcttccacttcgatcagtatatccccctcatcggtgccatctttgcactgagcatcgggtgcaacctgatcagcgtcgtcggcctgtggagtcccacagccgacctgaataccgaggcagcgtgggccatcgtggtgtttgttctgatcatgtactacaagatcaaaacgaacggcattctggcctatatcaaggggctgctcgatccgatctttatcatggcacccatcaatgtgctgtcggagatctctacccctgtcagcatggcgttccgtcacttcggcaacatcctgtccggtacggtcatctccacactgctgtactgggcactggcaagcctgagccacgtcatctttggctggctgccgggcttcctgagtcagatccagctgttccagatcggcatcccggcctttaccggcttgtatttcgactggttcggcggctgcattcaggcgttcatcttctgtaccctgaccgcaatcttcatcaaacgtgctgccggtgaggattaacccttccggcatcccccaaaacacaaacacattttaggaggacaaatcttatgactgatttccagtatctggctcgtggtatcgctctggcaggctgcggcatcggcgcaggctgcgcactgatcgcaggtatcggccccggtatcggcgaaggcaacgctgctgccgctgcctgtgaggccgttggccgtcagcccgagtgcaagagcgacgttaccagcaccctgatcctcggcgtcgccctttccgagaccaccggtatctacggctttgttaccggcctgctgctgatcttcctggctcccggtatgttcatgaagtatctggcataagcctcccgatccgaaaaaataacgaaaggagacgcttatggaactgtatcaggcgttgatcacgctggatggctggacctttctggcccagatctgcaacctgatgatccagctggtcatcttcaaaaagttcctgctgaagccgatcagacaggtgatcgccgaccgcaaggccaaggccgacagcgagatcgcagatgcgcagaagctgcgcaccgaggccgaagccatgaaggcggagtacgagcagaacctgcagaacgcccgcaccgaggccaaccagatcgtggctgcggcacaaaagaccgccaccgcccgctcggaagagatcgtgggcgaggcccgcgcacaggccgctgcgctgaagcagaaggccgaagctgacattgcgcaggagcgcaagaaggctgtgaacgaggtcaaggacgagatcggcggcatcgccatggagatcgcatccaaggtggtggagcgcgagatcagcgaaaaggaccacaaggacctgatcgacgaatttatcaaaaacgtgggtgaagcatcatgaccgaaactgcaaagatgtacggcggcagtctgtacgatctggcggcagaggaagggctggagacccgcattctgggcgagcttgacgaggtgcaacagcttctgaagcaaaacccggactacctgcggctgctcagcacccccagcatccccaaaaaggagcgctgcggcctgctggacgaagccctgcgcgggcaggtccacctctatgtgctgaactttttaaagatcctgtgcgaaaagggcaccctgcgggagctgtccggctgcgcacgggcttaccgcatccgctacaatcaggcgcacggcattctggaagctacggccatctcggctgtcccgctgacagagcagcagcgcgcggcgctgcacgccaagctggaaagcctgaccggcaagaccatcgaccttaaaaccaaggtggatgccaaggtgctgggcggtatccggctggatatcgagggcaccgagctggacggcaccgtccagaaccgccttgtctccctgcgccgggatattgcggcggtcactctgtaactttttccctgccctttgcaaacggggcagagcacagaacgaatttccacccgaaatgactattatgaattgagtggtgaacaaacaaagatgcaactgaaacctgaagagatctccaagatcatccgtgcgcagatcaagcattacgaaaatgccatcgagcagagcgagaccggcacggtcattatggtgggcgacggcatcgcccgggccagcggtctggaaaagtgcatggcaggcgagctgctccagtttgacaacggcgaatacggtatggcccagaaccttgaggaaaataccgtttccatcgtgctgctgggctcggatgccggcatcaaagaaggcagcatcgtcaagcgcaccggcaaggtagtctccgtgccggtgggcgatgccatgatcggccgcgtggtcaacgcactgggtcagcccatcgacggcgcaggccccattgagaccaccgaataccgcgccatcgagagccgcgcgcccggcatcatcgagcgccagcccgtcaaggagccgctgcagaccggtatcaaggccatcgactccatgattcccatcggacgcggtcagcgcgagctgatcatcggtgaccgccagaccggcaagaccaccatcgcttccgataccatcatcaaccagaagggcaaggacgtcatctgcatttacgttgccatcggtcagaagcgctctaccgtggccaaccttgtgcagagcctgaccgaagccggtgccatgggctacaccatcgtggtgtccgccaccgcatctgagctgtctcccctgcagtatatcgccccctactccggctgcgccatgggcgaatacttcatgcagcagggcaagcacgtcctcatcatctacgatgacctttccaagcacgctgtggcctaccgtgccctgtcgctgctgatccgccgtcccccgggacgcgaggcttaccccggcgacgttttctatctgcactcccgtctgctggagcgcgctgccaagctttccaatgagctgggcggcggcagcctgacggctcttcccatcatcgagacgcaggcgggcgacgtttccgcctacattcccaccaacgtcatctccatcaccgatggtcagatcttcctggagaccgagttgttccactccggcgttatgccggcagtcaaccccggtatctcggtgtcccgtgtcggcggcaatgctcagatcaaggccatgaagaaggtggcaggcaccctgaagctgatctactcccagtaccgcgaactgcaatcctttgcacagttcggctctgatctggacgccgacaccaaggcacgtctggcacagggcgagcgcatcgtggaggtgctcaagcagaaccgctccgcgcccgtacctgtggaaaagcaggttgccatcctgtacgccaccatccacgactaccttgtcaacgtcaaggtgccggatgtggccgagtacgagaagagcctgtacgagtatctggacagcgatgccgccggggctgccgtgatggacaccatccgcaccaccggtaatctggataaggacaccgaggagcagctcaaagccgtgctgacccggtacaccgaaagctttgtcaaggcgcattaaagggaaggaggcgtaacgcatggctggttccatgaaggacatcaagctgcgcatcaaaagcgtagagagcaccatgcagatcaccaaggccatggagctggtggcttcctccaaaatgcgccgtgccaaggagcgggtcgagcacagccgaccctattttgaaacgctgtacaagaccctgaccgagatcgcggcagcggacccccgggcccgcaacccctacctgcgccgcagcgagatcaagcgcacgctgctggtggtcattgccggtgaccgcggccttgccggcggttacaacgccaacgtgctcaagctggccgcacaggaaagcggcaacgtggaggtgctgcccatcggcaagcgctcggcagagtactttgcccaccacgaagccgaactgttcacgcaggaggtgctgctggccgccgatatttcggtgggacagtgcttccagctggcgcgccagatcaccgaagggtaccgcaagggcgagtttgacgccgtaaagctctgctacacccggttcgattccatgatgacccagacggctgtctccatcgaggtgctgccgctggccatggagcccactgagcagcaaaaagccgaggcacgccgcagtcagatcctgtacaaacccagcagcgaggaagtattcagcgcgatcatcccggagtatgtggccggtgtcgtctacggtgccgtgtgcgagagcgtagccagcgagctggctgcccgccgcaccgccatggacgctgccaccaagaacgccggcgagatgatcgaccatctcaacctgtattataaccgtgcccgtcaggctgctatcacgcaggagatcaccgagatcgtggccggcgcggagaactaagactatcaagaaggagttgtagcctatgtccgaaaaacatatcggcaaggtgatccaggtcattggcccggtgctggacatccagttcaaggatggcgagctgccggagctgctcaacgccattgagatcgacaaccacggccagaagctggtggtggaggttgctcagctgaccggcgacaatgtggcacgctgcattgccatgagcagcaccgatggtctggtgcgcggcacagatgccgtggacaccggcgagtccatcaaggtgcccgtaggcgaccagtgtctggggcgcgtgttcaacctgctgggcgagccggtggataacaagcccgcccccaccccggatgcctactggcccatccaccgtcccgctcccagctacgaggagcagcagtccaccaccgagatccttgagaccggcatcaaggtggttgacctgatctgcccctacgccaagggcggcaagatcggcctgttcggcggcgccggtgtcggcaagaccgttctgattcaggaactgatctataacatcgccaccgagcacaacggttactcggtatttaccggcgttggcgagcgcacccgtgagggcaacgacctgtacggcgaaatgaccgagagcggcgttatcaacaagaccgcgctggtctacggccagatgaacgagcccccgggagcccgtatgcgcgtggcactgtccggcctgaccatggcggagtacttccgcgatgtgaagaatcaggacgtgctgctgttcattgataacatcttccgcttcacgcaggccggctccgaggtgtccgcactgctgggccgtatgccctctgccgttggttaccagcccacgctggccaccgagatgggcgctctgcaggagcgcatcacctccacccgcaagggctctatcacctcggtgcaggccgtctacgtgcccgccgacgacctgaccgaccccgcccctgccaccacctttacccatctggatgccaccacggttctgagccgtgacattgcatcgcagggcatctaccccgctgtggacccgctggactccaccagccgcatcctcagcccggaggtcgtgggtcaggagcactacgagatcgcccgtgccgtccagaaggtgctgcagcgctacaaggaactgcaggacatcattgccatcatgggcatggacgagctgagcgaggaggacaagcgtaccgtcagccgcgcccgcaaggtgcagcgcttcctgagccagagcttccatgtggcagagcagttcaccggtatgcccggtcagtatgtgccgctgaaggagaccctgcggggcttcaagatgatcctgagcggcgagtgcgacgagctgcccgagagtgcattcctgttcgcgggcaccatcgacgacgtgttcgcaaaagcgaagaaggggtaagccatgacgacctttcatctgacggtggtcacgccggacggctgcgcctttgaaggtcaggctgagcgcatcgtctgccgcgccattgacggcgatattgccattctggcaaagcacggcgactactgcacggcactgggcatgggcgaggcgcacattgtggatgccgacggtcagcgccgccgcgcagcctgcatgggcggcctgctcagcgtgctggacggggacgtgcgtctggtggctaccacttgggaatgggcggaggacatcgatcaggcgcgtgcggaagcttccaagaagcgcgccgaggagatccttgcccgcaagaacctgaacgaccgtgagtacgagctggcacaggcgcgcctgaagcgtgcgctggtgcgcacctctgtccgttaaaccctgtatgcaaaaagcacccgcagccattcggctacgggtgctttttttgcgcggaacaatttcaaatgcgctccgcaggagaagttactacctgccgtcagcgtgcagggacgctccgctgggccagaggcagggaggggtgttccgactcccccctccctacctctggactccacccaccccgcaacgggccaagggctgctcgcccttgacaatcctaaagaagaagtcgaagcacaaaaaagctagcgctgcgccagtcggcgctatcgctttaacgcttttttcgcttctccatttatagcccctcagtcgctgcgcgacagctccccccgggggagcaagcgcttgcccgcagcgccgcgctttcgcaaaaagcggcgctgcaaatgccgttttcctctacgaccccacccgtggaaatggggttctgaaaagcccgcaggcttttcagaaccccaaaattaaaaatattctttccgctgaacatggctagagcgcagcggaagccattctaaatcgtcttacccccggttcgcccgctcgatcagggtgcggatgtggtgcgccagcatctccacggcggtgctgttctcgccgccgttgggcacaatgatgtctgcattgcgcttgctgggctctacaaaggcttcgtgcatcggcttgaccgtggtaaggtactggtttatcacgctatccaggctgcgcccgcgctcctttacgtcccgcagaatgcgccgcaggatgcgctcgtccgcgtccgtgtccacgaagatcttgtagtcgaacagggcgcacagctccggctctacaaagggcagaatgccctccacgatcagcaccggggcgggctcgatgtgctgcacctcgttgctgcggttgtggttggtatagtcgtacaccgggcagtcgatggcgcgaccggccttcagctcctgcaaatggtagatgagcagggcgttgtcgaaggcgtccgggtggtcgtaattcagcttgcagcgctcttcaaagggcagctcatcgtgacgcttgtagtagctgtcgtgggagatcagccgcacctcatcctctccaaagcgctccttcagccgcagtgcaagggtggtcttgccgctgcccgagccgcccgcgatgccaatgatcaggttgttcatgatgcaaactccttctgcacaaaatctgccggtttctgtggaaaaaccggtcggaatggattataatagatttgtatatattctgctgccccggggctgttgccgcccggcagcagttcttcccttttatcatagcacaaaatgtgtcatttggacagggcttgcaggctatcctccgacacattccaaaaaaaggacggtcaaaatgtcaaaagaaacattgcagcacaccatgagaagcaaggtccgggtatttgaggacggcggcatccgtctgctccgtaaaggccagaaagggctcatccatgccatcttcagccgctttgggctggtgctggtgctgctggtgctgcaattcggggcgctcttcagcctgatgcgctggttcagtaacctgctgccccactacttgggcggcaccttgctggtcacggcggccatgatggtctacctgctcaatcaggacatgaacaacagcgtgcgcatcccgtggctggtggtcacggcgcttgccccggtgctgggcgtgctgctgttctgctacaccaaggaggatgtcggtcaccggatgctcaaaaagcgcctgctggagctggaggggcagacccgcagtcaactgccgcagaaccaaaagacgggcaaggcgctggatgccgactgccccggcgcggcctctctggcgcagtatctgcgcggacggggcggcggcttcccggtgtacgaaaacacgcaggtgacctatttccccagcggagaagccaagtttgctgcgctgctgccccagctggaaagcgccacccagtacatttttctggaatacttcatcatcgacgagggcctgatgtgggggcgcattctggaaattttggcacgcaaggccgcgcagggcgtggatgtgcgggtaatgtatgacggcacctgcgagttctccaccctgccccgggactaccccagacggctggaagcgctgggtatccgctgcaaggtgtttgcgccggtcacgccctttgtttccacccactacaactaccgcgaccaccgcaagatccttgtcgtggatggccgcgtaggctttaccggcggcgtgaatctggccgacgagtacatcaaccacgttgaaaaatatggccgctggaaggacgccgctgtcatgctggagggcgagggcgtgcgcaccatgaccgccctgtttttgcagatgtggagcatccagcgcgagccggagtttgcccagttcctcacccgccccctcccgcaaacgcaggcaaagggctttgtcatcccctacggcgactgcccgctggacggcgagcgggtaggcgagatggtgtacatcgacctgctcaaccgcgcccggcgcagcgtacatatcatcacgccctacctcattctggacggcgagctggagaccgccttgcgctttgccgccgaacgcggcgtggatgtgcacctaatcctgcccggcaagccggacaagtggtttgcttatgcgctggctaagacccattacctgccactgctgtcctctggtgtaaagatcagcgagtgggtgcccggcttcacccacgccaaggtgatgatcatggacgggcaggaagcggtcgtgggcaccatcaatctggattaccgcagcttgtaccaccactttgaaaacgcggtctggatgcgcggcgtggactgcctgccccgtattgaagctgattttcaggatacgctggcgcagtgccgcacagtagagcctacccgccagagcgtctggcagggcaaaaaactgctgcatctggtgggcatggtactcaagttcatcgccccgctgatctaaacgaaaaaacgccccggaaacgctttcaaacgtttccggggcgttctttgcttatgcttttgcgcctgccggcactttcttttttttcagggtggagggcatcgccttcagcgggtcgcccaccacatgatgatagacctcctcgtaacggtccagcatcacctcgtactcgaaatttgtatggatgtaccggatctgctgctgccgcattgcgtccgggtactcctgtgcgcattcccgctccagcgcccgtgcaaggtcgtccgtatcctccggcgtaaaggacgcaccgtaaatatcggccacgaccgtattctcagggatatcgctcaccagacaccgtgcaccgatggacagcgcctccagcaaagaaagggaaagtccctcggtgtggctgggcagaacaaacagtccgcagttgctgtaaagctccttcagcgggtcgcccaccacatagtctgtcatgatgatattggggtcattttgtgcctgctgctgtactgtcctgcaatattcgctgtcgtccagcgggccgaccagcacaagctttttccctgtcttggccttgcggtagccctccaccagatccatcgtgcccttttccggcgagatgcgtcccacatataggatgtactctccctgttccagcccatatttttcccggatcaaactgcaatcgtgcctttcataaaagcggatggcattggggatcagaatagacgcgcggtcatatttctgcaaaaaatagttccattccgtctccgaaagcaccaccagatcatccgcatattttgccgcaatcctctctcccagcttcatgtaacggcttgcaaagccgcgccacttgtccaccttccagttcaaaccgtgcaccgtacatacggtgtgcttaccgaacagtttagcgatcagcagcggtacgctgggtccgatggcgtggtaatggatcacatcgtagccccggaacagcgcgtcaaaggtagccagaaaggagtagatcgtggcattcagcgaaggcttttgcagggtaaatacccgccgtgcgtgaacgccgtccacatcgtacacattatggtgcttttccaagccgcggttatacacggtaacgtcatagccgcgttccaccagacttctggccagcccgccgaccatgacctctacaccgcccgagcgacttggaaaatccttgtgcccgatcatcgccaccttcaacgtaactacttccttccgttctgtaatacatctctatcaaatcccatttttcatcacagtatcatattattattgtatcataagcatcccttagctgcaactaattcctataaagtattttaacaaaatatgaattttcagttatatcttgctctatttgtaggaatttcatcttttacatactaaaaaacgcttcaggaaaactcctgaagcgtttctctaagtcggcgactacctattttcacaagccgtttccagctaactatcttcggcac

SEQ ID NO: 862 - DNA, 16796 bp, unidentified
  source 1..16796: mol_type = unassigned DNA
gtgagaaaaaagaaaaaaatcttaatggttcataatttttatcaaataggtggcggagaacatacggttttcaaaaacgaagtagaactgcttcgagataatggccatgaagtaatagagtatacgcgtagcaacgatgagctgaaatctgataaatggaaattgctctttttgccttttacaacagtgtggtctcttagaacctatatagaaatcagaaaactgataaagaacgaacaaatcgatgttgtacattgccataacacgtttccattgatttcgccatctgtgtattatgctgcaagaagtatgaaagttcctgtggttcagacaatccataatttcagacttctctgcccgaatgggtctttttactgcaaaggcaaggtgtgcgaaaagtgccgcgagaacggaaacttcaaagaagcaataaaaaacaaatgttatcgaaactctacacttggaacaataattgttgcagcaatgttaacggttaacagaaaactaggaatctataaaaaaatatcatatatctttttgaccgaattcaacaaaagtaaattcgataaactcatcgatataaattcaaatcaggtattcgtaaaacctaattttgtaagcagaaaaggggagccaagcaaaggagcacacaagcgagtgttcatttttgcaagtagacttgaagaaaataagggaataaaactccttttggaattgtggaagttgcttcctaaggattattacctgcacatttatggagatggaactctcaaaaatttcgttgaaaaaaatgtgaaagagaatatttccttttacggatttactccacagaaaactatttttgaagatttatcaactgcaacagcacttgtatttccaagtatctggtatgaaggcttcccaatgattcttgcagaggcaatggccattggttgccctgttgtatcgacaaatataggcaatgcaggagatattcttgtcaattcaaaaggtggaacaacatttgaacctgacaagcccgatacatttataaatgctattgaagatgttttgcagaacaacgaaatatatcagaaaaatgcactggcctattacagcgaaacactgtcaaaagataaaaattatgttctccaaaacgatatatatgaacatttgttcggggggggggtaagaacatatatttatgccggaagacttgataaaggaaaaggaatactaaaactgcttaatgaatggatcaatctgccgggcacctatgtacttgaagtttatggagagggtgagtgcgcagccgaggttcgaaagttagcagctaaatgtccgaacattcatttgaatggattctgtccacaaaaagaattattcaattccttaaaatccgcagtcgcattgattacgccctatatatggtatgagggctaccctatgaatattgcagaatgtttctctttgggagtaccggtcgtatcaacaagtattggaaatgctggcgacttagtttcaaaatcaaatgcaggaactctatttgattttgaagtcaagggctcttttaggaaagcgttggatgcagtttatgaacaacgaacgaaattttcgtttaatgcttataactattacttgtgcaaccagacacctgcttcaaactatgaaagactaaataaaatatatgatacattgtaacaaactaaagaatattcctacacgcgtaaatataatcggtgtgccgatttcagtagtgaatatggagagttgtatttcctttttattctccaattgggatgctgtacatggaaattacgtctgtgtttccaatgtgcatacgacagttatggcacatgatgatccacaatattataaggtgcaagcagagtctttgctgtctgtgccagacgggaaaccactttctgtaattggaagaaagaaatttccgcagatgaatcgtgtcaccggaccggatttgatgcgaaggctttttgaagagtcgaaagaaaagaaaattcggcattacttttatggaacaacgcaagaaaatataaatgcgcttcttgagaaaatcaaaaaggagtatccatgggttgaagtagttggatatgagccttccgtgtttcgtccgctcagtgaagaagaggagaatgcgctcatagctcgaataaatcaaaccaatccagatattgtctgggtcgctttgggtgctccacgccaagaagagttttgctataaaatgcaaggaaaaatcaacggcctcatgattggcgttggtggagcatttaatgtcgtctctggcgtaattgatgaagcacctcaatggatgcaggatattagcttggaatggttttatcgcttcatgaaggaacccaaaagattatttagaagatatttggtgactaattctaagtttatatggttatcgctactaaatgaacacacaaaaattcgatgattagaaatttctgtaaatatgaaacaacttaaagtgaaaatccatacacatccaatatatattttctggatgctaaaaataatatttgatatgttttatcagctaaaaatgctgactgttataataacggcttttgccattctattgcttataattgcaataacaaaaagattccctctgaaaccttgtatcagtgatacaatcgttattttgattgcgttgatgtttacgggatcatggcttaaatcaccagaactatatcttgattatttgaaaatcatttcttcgctgcttttatactttttaggcagattctatgtaaaagatattgatacggtttgggagagcttaacatcatcgcttctttttgctctagttataaatcttattgtttgcctcgccggaaaaggaacaatagtatgggggtcagctgtcacatatagaggaatgtattttttcaaaacggattttgctgtcatgctctgctactttctaatcacatggatttataacaaaaagatggaaaaaacagattttattcctcttgctatcgcagtggtactaattgtactttgtaacgcacgaattatttatctatgcactatcgttgccttatttattttctttcagtatagaaaaaataaaaaaatcatttcattcaaaaatgttttgatgcttgggtgtgcgtttttagtttgcatatatgctcttcgctttgtttcaaacaccaaattttttcaggatagaggactactcagcttgcatttcgataaattatcagatttgatgaatgcaagcaatactcagggcagaaatgaaatctggacattgttactaacagcatttaacagacaaaatatttttacgaaaatatttggagcagcaatgaacttcaatcaaatatttggatattcaggattgaacgagcataacacatatgtaaaagttcttataaatacgggatattgcggattggtattgtttgcattgcttttttttattgcaattaaagaaataaatgatacacctgatagaaaacttagctgctatacattatctgttttaatggtgtttttgatagtcggtttttcagttcctaccattctatatacaaactgttcttggataccattatttatgattggtggttgtatatcctccgcacaagaaaattataatgtagaggtagttgaaacgtgaaaagcaatgtaattaaaaatactataatgctctatggtatgtcaatcgccaaaatcgtatttccccttttgacattgccgtatctgacccgtgtgctttctgtagaaagctacggcgtggtttcgtatgtaaaagctgtaatgcagtatatgcagttggttgtagattttggctttatgctgtccggcacaaaggatattgtaaacgcgaagaacgaccacgaaaaattggaaaaagaagttggtgacattctccttgcccgcgttttgttggcggcggcggcttttgttgccctgctgggaatgattgcggtgattcccctgctgcgcgccaacatcggatatacgctgttggcatttgtgacagtgtttttgtcggtgtttttgtttgattatttcttccgaggtatcgaaaaaatgcaggtcatcacgctgcgctttgtcgctatgcgcggcatcgcaacagcattgacttttatttttgtccactcggataaggacattttgtttgttcccttactggatgcagttggttcgctggtggctgttatccttgtgtttgttgaactgaagaaagaaaacattaagattcacttttccagtgtaagcacagcgtggaaaaagctaaaaaattcgtttgtctattttgcttccaacatggcaacaactgcatttggtgcattgaatacgctgctgattggcgcattccttccagcaacggaagttgcatattggagtgtctgtatgcagctaattggcgcggtgcagacgatgtatacccctattacggatggcatttacccagagatgatcaagacaaaaagctggaagtttatcaagcggcttctgatgatttttatgcccattgtgttcgcaggcagcgcgttctcgattgcggtagcaccgtatgtacttcagattgttggtggtgagcagtatgttgcagcgacttctctgttccgcgcattggtgccagtactgattttcagttttccgggaatcgtgctgggctggccgacattgggcgcactggacaaggccgcacaggtgacaaaaacaacaattctgtctgccgttgttcaggtggcaagcctgctattgctgattgcaacggggcattttaccgtgatgtggatcgcggtattccgctgtgtaacggagcttgtccttatggcaagccgcggatggtattgttggaaatatagaaaagagttttactaagccaatatgggaagtaacaggaggatatcgtgacggaagtagaggaaaagaatgcaaaagaaaccgataaagtagaatcggcattacaaagagcgattcatataacaaaattgcttattatatgggcggctcgctcattcttgtattcaggatgcacattttgtgtgtttcttgtttttcattttgtttacggaaaagcttccagcaatgaacttgtcgaagttggagcacttgtatgtggaatagtatggccgacattgtttgaaaacaatcaggtcgataaaattcacggatttttgaaaggatggcttttggtttcattctttattttcgctataaattatatagtagtgtaccgtagtgcatttattggtgttcaattgtcagatagagaggaaacctcatgtgcttttttgcttcttgcatttgggatattatcctggattttatgtgcggcagtttcgatttataaggaggtgcgctccgtatgttgattgaaaaagttatcacaaacttttctgatgtaagcctctgggcaatagcacttgtagttgggtatgtcctaattggtgcgattttgctattaagattggcatggaaaagaaaacataccaagatggagaatgtcactcaaaacacacccattgaacaaagtaaagaaatatacagagagagtcaaaatgacacaaaatctgaaaattcagacgccacaaaatatctacctgtcccacaagaacacgttagcataattgagcaaaaagatttctcacatttttatatcactctcgagcatcatcttaaaactccgtcaaaatttctagataccctaaaagatttgtgggaagagccaaatatttctaccggtatggttgctacacctgaaatgtttttctccagtcaagaattttatggaagttgttatgacaatcttgcatatgtcgaaaagaagcaaaatagcgttgttaaactccgtgagggcacacttataaatttaaacggaaaaatctaccgagttcgaaaaattgagattcaaaataaggccacgtcatcaagcgttcgcttagatttagaaaaactatcggttagcaactattcgctagagaaaagagataaccattatgcaagacttagaaggtcaaatagttgattgcttattaaggagaatcatatgaaacaacttaacgaagaagaagtaaaaatctatcagcttggcattttaaataccgttgctgatttttgcgagaaaaaccaaattcggtattggctcgattctggaacattacttggcgcaattcgccacaaagggtatattccttgggatgatgatattgatattggaatgttgcggccagattttgaccgatttatgaatatttttaatcaagcgaatggtcgctataaatttatttgtcgggagcttggcaatagtttctattacccctatggaaaagtgctggacacggaaactgttttgtatgaaccagatgaaaacggcatgaagatcagtgtgaatattgacgtttttgtctatgacaatgctcctgaaagcaaccaaaaagttgcagaaatgtacaaactaagagattggtatacaaaattaaatgctgttcaaaatggtgttgttggaacgcatggaattataaaagacattgtaaaaacggttggctttgaagttttgaagattttcccgaaaggatacttttccaaaaagattgttgataattcaaagaaatatgctgatacgaatacatcggcagtcggaaacttcacttccgtttccaaaatcgtttgcgagaaggatattttttcttctttcataaaggtttcttttgagggaagagaatacaatgcaccggttggatatgataagtggttgaccgcattttacggcgattatatgcagcttcctcccgaagagaaaagagtatcccatcatatgtataaagcataccagaagtaaaagtgcagtgggtgtgagagaatgtcagactatatattcctattcgatatggattcaactattacacgcaaggaagttttaccggaggtctctaagagaattggaaaactagatgagatgcgccggttaacagaggcaaccatgcgtggcgaaattccatttcggacaagctttttaaaccgtgtaaaaatactgagtgatatttccgtgagcgaagtcaatcaggtcgtttcagaaattccgctgaatccatatatcgctgattttattgagaataatcgagatcgctgttatgttgttaccggaaatttggatgtttggatcagcggcttaatgaaaaagttgaaaatggaaaaccattgttactgctcaaaagcggatgtcaaaaatgaccgaatttctaaagttgtaagcgtggctgataaagaactgatggtacgacaatttgttcagccaatggttgttgtgggcgatggtgacaacgattccggtatggcgcgcatggccgatattgcggttggtttcggtggcgtaagacccattgcgcagtcgcttctcagaaactctgatttcgcattttacgatgataaaagatgtgcagattttctgtggcaactgttgtaaagggggatgaccatgattaaaaagacggatgttaccgttatcatctgctgtgcgggaatgggtacaagacttggcatcggaacaacaaaggctcttgttgacgttggtggtgagccgcttattatccgtcagctcaagcttctggatgcgtttgatgatataagagttgttgttggatttgatgcagagcgcgtcatcaacgtagtaaaagaatatcgtaaggatattatgtttgtctgcaactacgagtatgagcataacggtcctgctgacagcttaaaaaaagctcttcttggcgtccgtaaatatgttatcactttagatggtgacacaattatgaatccagaagatttcaagcgtttcgttgaatttcccaatgaatgtattgcggtgacagaaaacgcgtccggtgaaacaatcagtgcgatggcacaaaacggaatggttgaagttttgtctaaaaagccgggaaatatgcagtggtcaggcattacaaaagtgcaagcggataaattgagaggaacttcttcccatgtgtacgaggtacttacaccatatcttccaatgactgcttttccattgcgcttgaaagaaatcaacacgcctaaagactatgaaaacgcgatggaatggttcgttgctggaatgagtgaggagtaaaacgatgaaagatttggtaattggtgttttaggcggtatgggaacatatgccactatcaaccttttcaagcagtatgcagaggtttttccagcggagaaagaatgggagaggccgcgtattatcattgataacagatgcactatgccaagccgtgtgcgggcatttctttatcatgaaaatgtcgaaagattgattgacgaaatggctaactcgattgatgggcttttgaaaatcgggggggggtcagcaagaatcattcttgcttgcaatacatcgcatcttttcctgcctcaaatttataaaaaagttccggaagcaaaatccgctgttataaatattattcattcctgtgtagagcaaatcagcaaagataatgtaaaacaggttttcctgcttggttctgaagggacgattgaatccaaagtatatcaagaggcactttccgaaaagggaattatctgtaaagttcctcagaaagaacaatatgtgcttttgcgaaattgcattgaggctgtgaagcaaaataagtattcggacgaggtaaaaaagtcattccaagagcttatggatgaatatgatgtcccgattatcttgggctgcacagaactgccgattctttatgaaaaatataaagatggcatcgatataacagtatacgaccctttgctgatcgcattaaaaaagttgaaagaagaatacgaaaatgagtaaaattctaacctttggagtatatgattactttcatttaggacatttgagactgttcaagcagtgtaaagcatatgcagattatttaattgtggcggttcaagacggaaattatatcaaaaaattcaagccggacgcaaaggtgctttatacaaccgaagaacgggtcgaaatgctagaagcattacgaattgttgataaagttgtagtgtacgagtctgtcgattctaaatttttagggacaattgattttgatattcttgcgcttggtgaagatcaccgtggtggacgttttgacgcggtagagcagtggtgtgaagagcacaacaaaagagttgttcgtttaaagagaacaaagggaatttgttcttctgatataaagaaatcgcttgaagcaaagtaagagaggaaaattaaaatgtctgcatttgataacgcaacccttatgatcactggtggtactggttcttttggttctaccgttttgaagcacttcctggattccgatttaaaggaaatccgcatcttctcccgtgacgagaagaagcaggacgatatgcgccatgagcttcaggccaagcacccggagaacgccaaaaaggtgaagttctacatcggtgatgtccgcaacccccagtccatccgtgacgcaatgcccggtgttgactacatcttccacgccgccgccctgaagcaggtcccgtcctgcgagttcttccccatgcaggccgtccagaccaacatcatcggtactgataatgtgttgcacgccgctattgacgctggcgtcaagcgtgtcgtctgcctgtccaccgataaggcagcttatcccatcaacgccatgggcatctccaaggctatgatggaacacgtcatctacgccaacgcccgtgtggctgccgagcggggcggcacgaccatctgctgcactcgttacggcaacgttatgtgcagccgtggctctgtcatcccgctgtttatcgaccagatcaaggctggtaaccccatcactatcaccgaccccaacatgacccgctttctgatgaacctggacgaggctgtggatctggtcttgttcgctttccaacatgcaaatcccggtgatttgttcatccagaagtctgatgcttccaccatcggcgatctggctaaggctgtccagcaattgttcggcgataccggcacgaacatcatcggcacccgtcacggcgagaagctgttcgagactctgatgacccgtgaggagcgtctgcgcagccaggatatgggtcattacttccgtgttgctgctgacaaccgtgacctgaactacgacaagttcgtggtcaagggcgaggtacataccatggcggacgagtcctacaccagccacaataccgagcgtctggatgtggaaggcactgtcaagaagattctgaccaccgagtacgtccagaatgcactgaagggcatcccgaatgtctaaggaaaagctgctgctgattggtgccggcggctttgggcgcatggtggcggagcaggcgatgttccgatatgattgtgctttcatggatgacggacagcctgtgggtgccgagatttgtggtattccggtggttggcggtcttgctgatttgccggagctgcggaaggagtatggcctgttggtggtgggtatcggcaacaatcggttccgggcacaggtgtatgagaaggcgaaagcccttggctttgcttttcccaatatcgttgcgcccagcgcctacatcagtccatacgcaaagctgggctgtggctgcgtggtgctgcaaaatgcctgtgtccagaatggtacgtccgttggcgacggtgttttgctgaatgccggaacagaggtccactgtgatgcagcggtaggggactacgccctaatttacaccaacagcgttgttcgcaccggtgcgactgtgggaaactttactcgcatcggcagtaactgcaccatctgcaataatgcaaccgtgccggatggcgcggacattccggactgcaccgcagtacactaagaggtgagagaatgaacattctagtcacaggtgccaagggcatggtaggaaccgccctgtgcaacaacctgaaaaacatccgggatgggaaaaacaagactcgcccggcattggatattaaagaaatctacgagtatgatctggattccaccccggcggagctggacgagtactgccagaaagcagacttcgtgttcaatctggcaggcgtgaaccgcccggagaacccggaagacttcatgaagggcaacttcggctttgcatctgatctgctgaactgcctgaaaaagcacaacaacaaggcaaccatcatgctgtcctcttccattcaagccacgctggctggtcgcttcggcaacagcgagtacggacgcagcaaaaaggctggcgaggaactgttcttccagtatgctcaggagaccggggcaaaggtggccgtctaccgcttcgtgaatctaatgggacatagccgccccaagtacaacagtgccgtcagcaccttctgctgggcggttgccaatgacgagcctttcaccgtcaacgaccgcagtaccgagttagaactgctgtacatcgatgatctcgtagaaggaatgtttgacctgctggagggcaaggagcaacactgtgaatttgacggtgtggagaccgttctgaaagcagatggtcgctactgctgcgtccccgtgacccacaaggtcacgctgggcgagattgtagacttgctgcaggagttcaaagcacaacccaccaccctgatgatgccgaaaatgccggacggctcttttgccaagaagctgtactccttgtatttgacctatctgcccaccgacaagtttaagtacgccctcaagatgaatgcggacaaccgtggttcctttacagagctggtacacaccgccgattgcgggcaggtgagcatcaacatcagccgtccgggcatcaccaagggacagcactggcacaactccaagtgggagcttttcattgtggtcgcaggtcatggcttgattcaggaacggaacatcaacactggggaaacggtagagtttgaagtttccggggacaagattgaggctgtccatatgattcccggctggacccacaatatcatcaacctgtcggaaacggagaatctggtgacggtgatgacctgcaacgaaatttttaaccccaatcacccggatacattcttcgagccggtgtaagagaaaatactggttgacgttaggagaattttatggaacacaattttacatggaaaaacgatgggcgcacaaaggtcatgattggttgcggtacccgtccagagattatccgactggctgcggttatcaagcgctgccgggaatattttgactgctgcgtggtctattacaatcagaattgggacagaaacctttccaccgttttctgggaggattttgaactgaagaacaccttcggggaatatgggccggacattcttgtgcccgtggtgggcgagaatctgggtgtgacctgtggtaacattctgggacgcagctatgagcttctgtctgagctgcagccggagggctatctggtgctgggcgataccaactcctgcctgtctgccatctctgcgaagcggctgcacattcctctgtttcacatggaggccggcaaccgctgcaaggatgagtgcctgcctgaggagactaatcgccgcatcgtggatgtgatttctgacgtgaatatgtgctattccgagtttgcccggaagtatctggcggacaccggactgcccaaggaacgcacctaccagaccggttctcccatggcggaagtcctgcacatgaatctggagaagatccagaaaagcgacgtgctggagcgtctgggactggagaaggacaagtacattctgctgtctgcccaccgtgaggagaacatcgactcggaaaagaacttcctgagtctgttcactgccatcaatgcgctggcagaaaagtataatatgccgatcctgtactcctgccatccccgcagcaagcatcgtttggagaagagtggcttccagctggaccctcgcgtccgggtcaacgagccgctgggcttcaacgactataacaagctgcaaatgaacgctctggcaatcgtctccgactccggcactctgccagaggagagcagcttctatctgtccatcggtcaccccatcgccgccgtgtgcatccgtaccagtacggaacgtcccgaggcactggaagctggtgactttattctggctggcattaccacccgggaacttctcaacgccaccgatatggcgatcgagatgaagcagaagggtgttctgggcaagccctgccccgactatgtggacgagaccgtgtccatgaaggtggttcgcatcattcaggggtatgtgaatgtggtcaataagatggtgtggagaaaatactaattatccacacaacagtcatgtgaaagcatggctgtgctgctcaaatatgctacctctccgtggtgagcagcaggcaacggattataatccggctaaagcatatattcgttaaatcgctctttggatgaggaaacaattacataatgggaaagtattttggaaccgatggcttccgtggtgaagctggtattgatctgactgccgaccacgcctacaaggttggccgttttctgggctggtattataacgctctgcgcgagcgcaacggcaacaatgagcccgcccgtatcgttatcggcaaggacacccgccgcagctcctatatgttcgagtacagtctggttgcaggtctgaccgcctctggcgcagatgcctacctgctgcacgttaccactacgccctccgtggcttatattgcccgcgtggacgactttgactgcggcatcatgatctctgccagtcacaacccgtattatgataacggcatcaagctgatcgactgctacggtgagaagatgcccgaggagaccctgcttttggtggaagattacatcgacggcaaactccatgtattcgataaggaatggccggagctgccctttgcgcaccgtgaacacatcggctgcacggtggactatgtggcaggccgtaaccgttatatgggctatctgatctctctgggtatctattccttcaagggcgtgaaggttggtctggattgcgccaacggtgcaagctggaatatcgctaagtctgtttttgatgctctgggcgcagatacctacgtcattaacaacaagccgaacggtctgaacatcaacaacaacgctggctctactcatattgagggcctgcagaagttcgtggtggagaacggtctggatgttggctttgcctttgatggtgatgccgaccgctgcctgtgtgtggacgagaagggcaatgtcgtcaccggtgaccatatcctgtacatctacggctgctacatgaaggagcacggcgaactgatgaacaacaccgtggtcaccacggtcatgtccaactttggcctgtataaggcctttgacgagcagggcattggttacgctaagaccgccgtgggcgataagtacgtttacgagtacatggcaaaaaatggctgccgtatcggtggtgagcagagcggtcatatcattttctccaagtacgccagcaccggtgatggtatcctgaccagcctgaagatgatggaagttatgctggcgaagaagatgcctatgagcaagctggctgagcccctgaagatctacccgcaggttctggagaacgttcgtgtcactgataaaaaggccgcacagaacgacccggcggtgcaggaggcagtcaaggccgtagccgaagcgctgggcgataccggtcgtatccttgtccgcgagtccggtacggaacctgttgtccgtgtgatggtagaagcccctgaccatgatacctgccagaagtacgtctctcaggtcgtggaggtcatcaagaacaagggctacggagtttaaaattctgtacaggaattaattacagcagtgcaagcctgatgatagattacttaattcaatcgtaaggataggcagtggcgtctaacggtctatataagcgaaaaaactggtggatttcatgaaagagcagaatggaaaattatcaagggatgaattcatatcatttgttaaagcagtgctgaagaaaaaatcattggaagaaaacaagccactttattttgagtacagagtatctggaaatagcaagcttgcagaatctgcaagaagatttgatgcgtttgcgccagatggatttttcagatatcaagagcctgtgattttcgaatttatagatagcaaatcaaaacagctggaaaaacgaatccaaacaatcgcggatgattatagaaaaaattatgaggcggaaactatcttcattgtaaacgccagaacatctgctgaagaattagaccttacagtatgggatatcaatgagataaacaaatggattaaagagtatccagctgagtatggtcatgtgtgttcatggaatattgaccgtaaaagaactacacaagacaaagaaaagtttcaaatttccgaaaatctgtacagagatgacttatatcaaaaaaacaatgatatttatacaaatgcaatacgtacctgcatcgaagagaaaaagggcgttgcaattgtgctgggtgcgggtgtttcgaaggaacagggagcaaaaacttgggatgaattgctgagagagtttcagacggaaattgaaaggcaacatcttttggatgattccgaggcggtttttcaggaagttggcgggacgagtcttacaacagctcagttatgcaaagatgtctgggcagatgagaaaacctttgcttggcaaatccatcaaagcttatatgataaagcgagagagttggatgtgaataccgagttaggggagattgcgcagctggctcaaaaatgtcggaaagatcaaaatttcaggattttaacctataattacgatgacttccttgaacagtatttagagtggcgtggagtaaagtgttgttccatgttcacaacgaaggttagatactcaaatggtcaggcgagtgcggatttttatggcgtgaatggacaaccaaatcaaagtttacggctctatcatgtgcacggatttttaccaaaagttgcaacaaaaagtcaattggatacactccatataagatcaatctgcctgacagaagctgactataatatgctttataatcagccttatagttggccgattgcaagtcagctttctttcttcagagaaaatatatgtttgtttattggatgcagtttaagtgatcccaatatccgaaggcttttggaaatcacagcgtataatccaccgaagcattatgctattttacctatgatgtacaaaagtaccgatgcatctggtgctgtggtgccaaaacagttcacaacaaaagaccggcttcaaattgaaaatcatttttatcgcatcggaattaacattctgtgggtaagagattacagcgcaattcctgaatggttgcacaagttgaatcgatctattgtttaaatgaagatatattttcattctacaaaatacacctcttgcgaacataaaagacgagtgttatactgaagccatcaaaaaacattggaggtgtcccctatgccccgtcccaaaggaagcaagaacaagcccaagaccgcaaaagcaaccgttgactttgctgcacagattgccgaaaagcaggccgcaaaggaagctgctgccgccgaaattacatccatcactgcgaatatcgatgcgctgaaagccgacctgaaaaccaagaaggcagagctgaaatctatcgacaaggaaatcgccagaatcgaggctaaaaaggtcaaggctgaaaccaaagcagcggaatcggcaaagaaagccgaagcagaggacgtgctgaaaaagctgttggccagtggtgtgagcgcagacgatattctcgcaaagttgaagtga

SEQ ID NO: 863 - DNA, 22135 bp, unidentified
  source 1..22135: mol_type = unassigned DNA
acttgatcctgattgccgtcagcctctcgatggacgcatttgccgtttcgatctgcaaggggctgtctgtccgcagggtcagccttacccacgccctgacctgtgggctttggtttggcggttttcaggcgctgatgcccgcgctgggctatttcctcggtgaccggttttcggcgctgctgacaaagttcggtccctggatcgcctttgtgctgctggcgctcatcggtgccaacatggtcaaggaaagttttgccggagatgagcaactggacgacgactattccgccaaggcgatgctgccgctggcgatcgccaccagcattgatgcctttgctgtcggcgtcagctttgccgccatgcaggtagatattctgcccgctgccgggctgatcggcatcatcacctgcctgctgtccgctgtcggcgtcaaggtgggcgcgctgttcggcgacaaataccgcgcccccgccgaacgcatcggcggtatcgttctgattttgatcggcatcaaaacgctgctgaccgggctgggggtactgtaaaatcggtgttccctgcagaagcccggcctgccggacctgcgacttacccgcaaacgcccggacgatcgggcggatatggaatccgcccctacggcgtaggggtcgatgctcgtcatcgacccggaaacgcctgtctgccgggaacttgcgggccgcacatgtgcggcccctgccgtgctgcatacccaaacaaaaacgctccgggctgtatggaactccacacagcccggagcgttatttattgtgcgggtcgatgcaagcacccgcccctacagcctgtcggcttcagcgcagtacaagtttgccctcggcatctgcgtccacagtcagggtatcccctgccgcatgggagccgccgatgatctccttggcgatcatcgtctcgacatgggcctgaatataccgcttcagcgggcgggcgccgtagattgggtcatagccgccgtcaatgatggcgttcttcgccgcatcggtgacgaccagattcaactgcttgtcggccagacggcggcgcaggtcagccagcatcaaatccacgatggagccgatctcctgcttcgtcaggctcttgtagtatacgatgtcatccagacggttgaggaactccggacggaactgccgcttgagcagctggtcgatggcgttcttagcctcctcggacagctcattcttacccatcgcacggctcttttcaagatcctccagaatcaggtcggaaccgaggttggaggtaaggatgataacagtgttcttgaagtccaccgtgcggccctgactgtcggtaatacggccgtcatccagcacctgcagcaggatgttaaagacatcgggatgcgccttttcgacctcgtcgaaaagcacaacactgtagggatggcggcgcacagcctcggtcagctggccgccctcctcatagccgacatatcccggaggcgcaccgatcagacgagatacgctgaatttctccatatactcggtcatgtcgatacgaaccatgttcttctcatcgtcaaacagggcctgcgccagcgccttggccagctcggtcttgccgacacccgtggggccgaggaacaggaagctgccgatggggcggttggggttcgcgataccggcgcgggagcgcaggatcgcgtccgcgaccttctgcacggcctcgtcctgaccgatgacccgctgatgcagcgtgtccggcaggcgcagcagcttttcgcgttcgccctcgaccagcttggagactgggataccagtccagcgggccacaatgcgggcgatctcatcatccgtcacacggtcacgcagcaggctggattccttcttcgcctcggcgattttttcttcctcttccaactgcttctgcagggtgggcagcttgccgtactgcagctcgccggccttggcgtaatcaccggtgcgggtagctttctcgatttcagccttggtggactccacctcggcacgcaggctctgcaccttgttcacggcgttcttctcgttttcccactgggccttcttgctgttgaagctgtcgcgcagctcagccatctctttttcaagggtggccagacgctgcttggacagttcatcggtttccttctttaaggaggcctcctcgatctgcagctgggtgatgcggtggttcatctcatcgagttccgcaggcatcgaatccagctccgtcttgaccatggcgcaggcttcatccacaaggtcaatggccttgtcaggcaggaaacggtcggtaatatagcggtcggacagagtcgcggcggcgataagcgcagcgtcctgaattttgacgccgtggtagacctcataccgttccttcagaccacgcaggatcgagatagtatcctcgacggtcggctcgttgaccatgacaggctggaaacggcgttccagcgcggggtccttctcgatatattcgcggtactcgtcaagcgtagtcgcaccaatgcagtgcagctcgccgcgggccagcatcggcttgagcaggttgccggcatccatcgcgccatcagtcttgcccgcaccgacgatggtgtgcagctcatcaataaagaggatgatcttgccctcggacttcttgacctcgttcaagacgctcttcaagcgttcctcaaactcgccgcggtacttggcacccgcgaccagcgcgcccatatccagactgaacacggtacggtccttcagattttcgggcacatcaccgcgcacgatacgctgggcaaggccctcggcgatggcggtcttaccgacaccggcctcaccgatcagcacagggttgttcttgcgcttacgggaaaggatacggatcacattgcggatctcggagtcacggccgatgacagggtccagcttgttggcgcgggccatctcgacaagatcctgcccgtactttttcagggcgttataggtgtcctccgggttatcactcgtcacacgctggttgccgcgcaccgcactgagctgctgcataaatttctcattcgtaatgccgaacatcttgaaaatttcattagcagccttgcctgggcgctgcaaaataccaaggaatacatgctccacgctgatgtattcatccttcatctgcttggcctgttgttccgctgcgttgagggcgcggtcaagatcactcgagatataaattttctccgggtcacggccggagccggtcacacggggcagtgcctccaccttctgcaaagccgcctgtgcaaaggcattggcgtccacgccgagggtctgcagcatctgcgggataagcccgtcctgctgctgggccagcgcggcgagcagatgttcctgctccaccgcgttgttggaatattccaccgcgatgcgctgtgcagcctgcagagcctcacgggtcttttgtgtcatttgttcgatattcatagtgcgtacctccttcattgcagatatcgcattgcttggcagtcagatatttagattgctaatcagtttgtactttcagcgcatttgagccatttcctggaagatcgtttgtttttagcactctatctgtctgactgctaatattgtagcacatttccataccgtgtcaatagggaaattgaaaacaaattgtgaaatcacaagaaaaatcgttggtataaatcatagaagaaggcgaaggacggcagatagttagatatttttctaaatatctattgacaagagcaggcgcttagcgtatagtaggggcatggatagttagacggttatctaattatctatttattatgggtgattgcaccgtaggggcggggctctgctccgcccggaaaagccgcagccaccactatgttcccgggcggatatggaatccgcccctacggcgtaggggtcgatgcttgcatcgacccgcaaagctctcaccacgagagcgggcacgggcggagcagagccccgcccctacatatggtaaaggaggatgtcagcctgcatgggagacgcttttaaggcgctggccgacccgacacggcggcgcattttagaattgctggcacagggcgatctgactgccggggagatcgccgcacattttgagatgacgaaaccgtctgtcagccaccacctgaacattttaaagagtgccgagcttatcaccgatgagcggcgcggccagaacatcgtgtacagcgtgaatctgaccgtgtttcaggaattgatgaagtggttttacgactgcggtcttgtaggagggcacaacgatgaaaaagaataagctgttttggatcttaaccgtaggctgcgtgctgaattttgccgcgcacctgtacttctacccttccctgccggatattgtgcccatccactggggcgcaagcgggcaggtcaacggctgggggccgaagtccaccattttgattttggccgctcttccgtttgcaatgcttattatgtttgaggtcatccgcaaagtcgaccccaagcaccagaattttgagaaattcggcaaggtgtggaacctgtttgtggtgctgttcaccgtaatgatggccatgttcagctggctgagtgaactggctgtgttcggcaaactgccggacaacagcagccttatcggcattctcgtctgcggcggcatcggcgtactgttcattattttgggaaactttatgccgcagatcaagcagaactacaccttcggctgccgcacgccgtgggcgctgaacgatgagcacaactggcagcgtacccagcgcatgggcgggtatacctttgttatcatgggcatctcgcttttggtgattgcttttctgggcggtctgttgggtgacgccgggtgcatgattctgctgcttgtcgccgttttcggcggcagcgcatggatctatttgtattcgtatctggtgtatatcgggaagatgaagtgatttctaaaaacgccgtgtaggggccgggcatgcccggcccgcggctttcccgcaaaagggcgtttcccgtcaggttgcgggccgcacatgtgcggcccctacatcctgctttatggttcgcagaaaatagcaagcagcccgtgcttcgattgggaagcacgggctgttgttatgtcttattcaatcccttttcaataaactccgggtctttacttatatagctccaccagattcagcaggatctcaacgccctgatccatcttctcggcggcgatgcactcacacgggccgtggaagttaaatccgccggtgccgaggttcgggcagggcagccccatatagctcagggtcgcgccatcggtgccgccgcggacggggctttcgatcggtgcaaggcctgctgcgcagattgccttgcgggcgttttcgaccagatggaagtgcggctggatcttctccagcatattataatagctgtccttgatgtccagctccacggtaccggcgccgtagcgctcgttgaggcagtctgcaatatgctgcatctgggccttgcgggcggcaaacttggcggcatcgtggtcacgcacgatgtagcccagatgcgcggtggtcacatcgccctgcatgctggtcaggtggaagaagccctcgcggccctcggtatgctccgggcgggagaaggcgggcagtgcggcgtggaactccatagccacattctgggcgttgatcatcgtgttcttcgcgctgccggggtggacactgaagccgtggacggtcacgaccgcggcggcggcgttgaagttctcatagctgatctcaccgacatcctcgccgtcaacggtgtaggcgtaggctgcaccgaagccctctacatcaaacaggcttgcgccctcgccgatctcctcatcgggggtgaagccgatgcagagctttccgtgggggcggttttcagcgatgatacgctcaagcgaggtcataatttcggcaacaccggccttgtcatctgcacccagcagcgtggagccatcggtcgtgattagggtctggcccttcatctcgcgcaggaacgggaagacctccgggtcaagcaccgtgccggtagcgggcagcgtgacggcctcgccgtcgtaattctcgtgaatctgcggctgcacattttcaccgctggcatcgtccgccgtgtccatgtgggcgataaagccgaggggcttggcgctctcctgccccggggtggcgggcagagtggcataaacatagcaatgctcatctacatgggcatcggcaagaccaagctctttcagctcctcaacgaggatcttggccaaatcaaactggcgcagcgtgctggggtgggtgccgctggcagggtcagaggtcgtgtggacttttacatattttaacagtcgttcgtaggcgcgcatgggcgggtcctccttgtaaaaacattcggcatgacgccggacttttgatttcgtggccattataccacaaaaagcagcaatttccaaccccatgcccttttcaagcggggaattttgtgctagaataaataagattataaaggtaaactgcgcccatacgcggtcaaatataaggaggccatcatggcagacagcatttttaaggataagaccctactcatcaccggcggcaccggcagtttcggccataccgtgctcaaacattttctcaccaccgacatcggcgagatccgcatcttctcccgcgatgaaaaaaagcaggacgatatgcgccatgagctgcaggcccagtaccctgagtacgccaacaaggtcaagttctacatcggcgatgtgcgcaacccgcagtccatccgcgacgccatgcccggcgtgaattacatcttccacgcagctgcgctcaagcaggtgccctcctgcgagttcttcccgatgcaggccgtgcagacgaacatcattggcaccgacaatgtgctgcacgccgccattgacgccggcgttgagcgcgtggtctgcctgtccaccgataaggctgcctaccccatcaatgcgatgggcatctccaaggcgatgatggagcatgtcatctttgccaacgcccgcgtggcggccgagcgcggcggcacaaccatctgctgcacccgctacggcaatgtcatgtgcagccgcggcagcgtgatcccgctgtttatcgaccagatcaaggcgggcaaccccatcacgatcaccgatcctaacatgacccgtttcctgatgaatctggacgaggccgtggatctggtcatgttcgcgtttgagcatgccaacccgggcgacctgttcatccagaagagcgatgcctccaccatcggcgatctggccaaggctgtgcagcagctgttcggtgataccggcacgaacatcatcggcacccgccacggcgagaagctgtttgagacgctgatgacccgcgaggagcggctgcgcagtgaggatatgggcggctactaccgcgtggcggccgacaaccgcgacctgaattatgataagttcgttgtcaagggcgaggtccacacgatggccgatgactcctacacaagccacaacacgaaccgcctcgatgtcgagggcactgtcaagaagatcctgacgaccgagtatgtgcgcaacgcactgaaggagatggaggccgagaaaaaggcatgaaaattctcgtgaccggcgccaagggctttgtgggccgcaacctctgcgaaaatctgaagaacctccgcgacggcaaggaccgcacccgccctgccctgaccgtggatgaggtgtttgagtacgaccttgacacgccccccgcagagctggacaaattctgtgccgaggccgattttgtctttaaccttgcgggcgtcaaccgacccaaaagcaatgacgagttcatgcagggcaacttcggctttgcctccaccctgctggacacgctcaaatctcacggcaacacctgcccggtcatgctgtccagctcgattcaggcgaccctgatcggccgctacggtgagagtgactacggcaagagcaagcttgcgggcgaggaactgttcttcgactacggcaaggccaccggtgcgccggtgctggtctaccgcttcccgaatttgttcggcaagtggtgccgccccaactacaacagcgccgtggcgaccttctgcaataacattgccaacgacctgcccgtcacggtcaacgaccgcgcgaccgagctggagcttttgtacattgacgacctgatcaccgagatgctcgatgcgcttgaggggcatccccaccactgcgattacaacggacttacgcctgttttttgcgagacgggccgctattgcgctgcgaccgtgacccacagggtcacgctgggcgagatcgttgacctgctggagcagttcaaagcgcagcccgctacgctggtgatgccccgcatcccggcgggcagctttgccaagaagttgtactccacctatctttcctatctgcccaaggagaaggtctgctttgcactgaaaaagaacgaggatgcccgcggcagctttaccgagctgctgaaaaccgaaggctgcggccagttcagtgtgaatatctcaaagcccggcatcacgaagggccagcactggcacaataccaagtgggagtttttcattgttgttgcaggccacgccctgattcaggagcgccgcatcggcagcgatgaggtgctggaatttgaggtgcggggcgaggagccgcaggccgttcatatgctgccgggctgcacccacaatatcatcaatctgagcgagacggaggatcttgtcacgctgatgtgggcaaatgagtcgtttgatgcgaaccacccggatacgttttttgagaaagtctaaatgaggaggaacccatggctgattacagcagcgtttcttttaaaaataacggcaagctgaaattgcttatcatcgtcggcacgcgcccggagatcatccggcttgcagccgtcatcaataagacccgcaagtattttgatgtcattctggcccacaccggtcagaactacgactataacctgaacggcgtctttttccatgatctggagctggccgacccggaggtctatatggatgccgtgggcaccgacctcggcgagacgatgggcaacatcattgccgagagctacaagctgatggcggccatccgccctgatgccgtgctggtgctgggcgataccaacagctgcctctctgtcatcggtgccaagcggctgcatatccccatcttccacatggaggccggcaaccgctgcaaggatgaatgcctgccggaggaaacaaaccgccgtatcgtggacatcatctccgatgtaaacatggcctactctgagcatgcccgccgctatctggccgacaccggcctgccgaaggagcgcacctatgtgaccggctccccgatggccgaggtgctgcaccagaatctcgagaaaatcgaggcatcggacattcacgcgcgtctggggcttgagaaaggcaagtacatcctgctctccgcccaccgtgaggagaacatcgacaccgagaagaacttcacctcgctgttcaccgccatcaacaagatggccgaaaagtacgatatgccgatcctctactcctgccatccgcgcagccgcaagcggctggagcagagcggcttccagcttgacaagcgcgtcatccagcatgagcctttgggcttccacgactacaactgcctgcagatgaacgccttctgcgttgtgtccgactccggcacgctgcccgaggaatcgagcttttttaccagcgtcgggcaccccttccccgccgtctgcatccgcacctcgaccgagcggcccgaggcgcttgacaaggcctgcttcattctggctggcattgacggcgaccatctgctgcaggcggtggatgtagccgttgagatgaacaaaaacggcgatctcggcacccccgtgcccgactacaccgacgaaaatgtctccgacaaggtcgtcaaaattatccagagctacaccggcgttgtcaacaaaatggtgtggcgcaaatactaaacaggaacacgatagcttatgcgcatactggtagtgacccagcatttctggccggaaaattttcgcatcaacgatattgtcgagggctttgtgcaggacggtcttgccgtggatgtactgtgcggcctgcccaactatccgcatggggaatggtttgacggctacagcgccgacggcccttttgaggaaagctataagggtgcccgcgtattccgcgcaagagagatcccgcgcaagggcaacaccggcaagacgatctttttgaattatgtaagctggccgctgtacgcggcagcagccctgaagcgcctgcccggcgggtatgatgcggtgttctgcttcaacacaagccctgtgctgatgtgctggcctgcggtgctgtatgcaaaaaagcaccatgtaccgttcacaaattatgtgcttgacctctggccggagaatttgtacagtgtgctgcccgtcaaaaaccggtttatgcggtgggtggcacagtcggtcagcgacagcctgtacaagcgctgcgaccgactgatcgccatgagcgagccgctgcaggagcgtctgtgcgcccgcaccggcaagacagcggcgcaggttgcggtcattccgcagtactgtgaggatttctacgccgtgccgcagcatgatgctgcactggagcagcgctttgccgggcggttcaatctggtattcaccggcacctttacccccgcgcagagccttgacatggtgctgcgcgccgtgctggacgcccgcgccgccggggccgagcggctgcacctgctgctggtcggggacggcatgagccgcgaggccctgcaaagcctcgcccatgagctgcatgccggggatgccgtgaccttttacggcagtgtccccgccgccgatgtacccaagttcaccgcgctggccgatgccctgctgatttccctctccgactcgcccgatctgggcctgacggttcccggcaagcttgccagctacatggccgccggcaagccggtgctggcctcaatgaacggtgcaggctatacggctgtgcaggaaagcggcggcgggctggtcagcccggcctgcgaccaaaaggcactggcagagaatatgctggcgctgtacggcatgaccgatgccgagcgcgcggagctggggcgcaaagcctatgcgtattacgccgcacattaccggagagccgagctgttgaaacggttggaggaatttacggtggaagggaaatgaggaagcccacgcagcccattttcgagtggctttgtagggagaggttttgacccctccgcggggcgttgaggacgccgccccctacaagccgtcaggcagagttgtaggggccgcacatgtgcggcccgcagccttgccgttaccgcctctatcccccacaaaatgcaatacacccaaaattgagaggtatacccattttggataaaaaaattctggtgatcatcccctgctataatgaggaggataacatcgtcaatacggtggaaaacctgcgtgctacctgcccggaggtggactttcttgtcgtgaacgactgctcgaccgacagcagcgctgcgctgctgaaaagccatcattatccgtttctcgatctgcccgtcaatttgggcatcggcggcggcgtgcagtgcggctacctgtacgccgtgcgccacggctatgatgtcgccgtacagatggacggcgatggccagcacgaccccgcctacctgatggaggtcgtgcagccggtgctggacggcatctatgacatgtgcatcggcagccgctttattaaaaaagaaggcttccagacaagctttatgcgccgggtcggcatccgctggctgagcggtatgatccgtctgctctgcggcaagcgtgtgctggatgtcaccagcggcttccgcgccaccaatttggccatgaccgcttattttgcgcagcactacgccaccgattaccccgagccggaggccattctggcggcaagtctggccggcttccgcgtgggagaggcccccgtcatcatgcgggagcggcagggcggtgtgtccagcatccacagcttcaagagcgcttactacatgatcaaggtctcgctggcgctcatcatcgatcgcttatccatccgtaaagtaaaaggaggccgcgcatgactgcacacctgcagctgtttatgattttgggcgctattgtgctgctgctcatcatctttgcccttttaaagcgcggccttatgagcgtaaaatacagcctgctctggctggtgctggctgtcgggcttgtcattgccgctgccttcccctatgtggtgtatgtgctgcgcgacctgcttgacattgagatgccggtcaacctcgtctttctgctgatgttctgcttcgtgctggtggtgctgctgtccctgagcatcgccatcagccagctggcggacaaatgcaagcgattgacccaggccaacgccatactggaaaagcgtgtccgcgatttggaagaaaagcagtgaccctgcgcccgaacggagagaggaatcatgacaataacctgggagcagatcctcgctttcttgtgtgaggatcagacgatggcgatcacctcgctgttgtttcttgccttttttgcggcggtggcgctcatcaattatgccctgccccgcgtgctgcggccgtactttctgctgatcgcaagctacggctttttctgctatgatcccgtaaaccgcccgctggtctgggtcatggcggcggcaacgctcatcacatggctctgcgggctcatcatcggcaaggttcggtgcaagccggtgcgtattcttgcactgctggcctcggtcgggttcggcatcgggattctggtctactacaagtactggaaccttctggcagactcgctgggcggcagcctgctctcccgccgggaaaatctgctggcaccgctggggctgagttactttacctttgcggccatgagctacaccattgatgtctacaagcgccgctgccgggtcgagacgaacccgctgcactatgcgctgtttgtcagcttcttccccacgctgatcaacggcccgatcgagcgttacccccagctgcgcccgcagatccgcaaaagccgccgcttcagctaccagcgctgcgcgggcggtgctttccgcatgctgtggggctacaccaaaaagatggtccttgccgacaatctgcggcagtatgttgcagccgtctacggtgatatttccgccgtgggcgggccgaacctgacggcggccaccgtgctgttcgccgtacagctgtacatggatttctccggctgctgcgacattgcgctgggtgcagcccgcattttgggctatgacctgatcgagaacttcgagtccccgtttgaggcgcgcaccttcaacgatttctggcggcggtggcatatctcaatgaccagctggttccgggattatgtctacttcagcttgggcggcagccggtgcgccccgtggcggcactacttaaacatcgtcatcgtctttgtctgctccggcctgtggcacggcgcggactggcggtatctggcatggggccttgccaccggcctgtgcgccgccttcggcgtgatgacggccaaggcgcgcaaaaagctgaatcgcttcaacccgctctaccgtatgggctggttcaaggcgctgtggcaatgccttgtgaccaatgcgctgttctgcctgacgctggtcttttttgcttcggccatctacaacaccgacccgtttgcggtctatggctcgctgctgcagggctgggacggtttagccggatcgtgggcgcaggtgtcggggctgatctacagcagcggcattgacgggcgcctgccggtcgtgctgctgttcggctgctttgtcgtctttgcggcggagcacggcggccgcagcgtggcccgctggatacgccagcaggtctggccgctgcgctggacgctctactacggcgctgccgcagcgatccttttctttgccgcattcggtcagtcggcgttcatctaccagcaatactgagaaagggcggtgtaatccatggctaaatcccctaccccgatccccgcaccgccggtcaagatccaacgcggcgcacccacaaatacccccgtgaaaaaacgccgccggaaaaagcgggttaatccgtttgtgctgcttctgcgcgggctggcgcggcgcatctacttcggcgtaaaaaccgccttcaagtttttgctgctggtgccgattctcgtctttatggtagcattcagctacaatgtggaccgcagcggcctgtttcagggtgcgctggcgccccgccgtatcgtggatctgatgctgcagggctatgatgtgacaaattttgagcagatggacgagcgtcaggtggtacaattatttgcacaggatgtacccgaaacgcccgaggccatcggtattggctccagccgcgtgctgcagttcaaccgtgaaaacaccggcgttgagagcttcttcaacatgggcgtcaccggcgctgatgtgcgcgacaacatgaccagctactacaagatggtcacctacggcaaggccccccgcgtgcttttgtggagccttgacccatgggtgttctacggcagcgaggccgcgtttgacgcccgcgccgatgccgacctgtacaacgaatttttaaccaaggtcctgaatgttcccaccgattacgaggagcccgacaaggtcgagctgtggaaggcgttggctgacccggcctactttcagggcaatgtggactactatgtcaagaaccgcggtcagaccaccgtcaccgatgacgagggcaacaccatcgagttcaaccccgtgcagggcgacccctacgaccagcccaccaccatcaagcggtcggacggcagcgtgctgtacgatattgccttccgcagccagaccgaggatcagatccgcacgctggcagccgaggcctgcatgagcttcaacagcgtacatatggagggctttgacgagttgagtgacacccaaatccgggcgtttgactccttcatcaagtacgcgcagtctcagggcaccaccgtcattttggtgctgtcgccgtggcatccgtatctgtacgggtatctgctgaccgagccggaacagcacaagggctttttccttgtggaaaactggctgcggcagtattgcgccgacaacaatgtaccgctgtacggcagctatgaccctgcctgcatcgagggtctgcaggagactgacttttttgacggcctgcactgcggcggcaccggcattgagcggttcttccccggcataccgcaggccttggcggatcttgagaacggcacgctagccaatccgctggatgtccacccgcgcaccagccttgatgaccccaacgctgaaccggttgaccccgacacgaaccaacaggagggataacgatggctttccttgagatttcctttaacgcaaagcgcccgctgattttggggcgcggcggctttggcacccagctgaacgactggctccttgacgagggctggggcagcgcggattttctggacgacaatgcccccgatgccgtgggcggtctgcgcgattacccggacccggccatcctgcacccgggccgccctgcctttgtggcgctgggcgataacaagctgcgtgttgagctgctgcaaaagctgacggctgcgggatacgccacaccggtgttcatcagcgatgccgcctcggtcagccccagcgctgtgctggagccgggctgcatcatcatgccgcgcgcctatgtaggggccggtgtccatctgggcgtcggctgcattgtcaacgccggggccatcgttgatcacgatgccgcactcggccgcggtgtgcatgtggcacccggcggcatcgtcaaggcgggggccgtagttgctgagtacgccaaggtcgattccggcgaggttgtccgctccccgtgggagggccgttgatggccccccgccgtgattacattgacgagctgaagggtcttggcatcctgctggtggtgttcggccactttatggagcagtaccggatgaactattcgttcgtcagtgcgacctttttctgcatctatgccttccacatggcgctgttctgtgcctgcagcggtctggtggcgcggttcaacccgcgcaagctggtcacccagcagctttggctctatttccttgggcagagcctgatgcttgtctttcgcgcagtcgttctgcgggaggattttgccgagaacggcggtgtgctggccgccctgctgctgccatggcggcacatgtggtatctgtatgcgctgatcttctggcacttgacgctgccgctgctctgcctgctgcgcgaccggctggggctggccggctcctgtctgggcatggcgctggcggtggccgtggggctggccggcgggctgatagactggccattcatgcttgtgcgggtgttcgccttcttcccgttttatgcctttggcgtgctgttccgcccccagctggatacgctggccgcctttgccgcacaaaaccgtgccgcacggctgctggctgcagcaggtctggcggtcggctacggcctctattttatccgggtcttttgctcggagacgatcttggacaacagtgccgagctgttccacgatgtaagctatgcgggcggcgaccggccggaataccgcatcgtcttttatctggtcggcattgctaccacggcggcgcttgtggcagccttcagcagcgggtgccggctgaccggcttggggcggcgcacccttgctatctacctgctgcacctgccgatccttgcattgcttgtgcagctgcagctttttgagccgctgcgcggtgcgcccgtggcattgcccgtgctgtggtacacgctgctggccacagcagcattggccgtgctgaactggcagcccgtgcagaccctctttgattttgccgcaaactgctggtataagcgcggcaaatcgtaacagcgaacagcaagcctcgatctggttttgcacctccctttttaaaagggaggttttttattttctgcttgacagcagcgctactttgcattacaatatagtcaaggaacatggtaatacaaggtagtcaggagggtagacgatgtttgatcgcgcgcagctgcgcaagggaacgctggaggggtgcattttaaaaatcatctcgcgcgaggcgacctatggctatgccattgccgtcaccctgcgggagagcggctttaacgatttgaccgagggcacactctatcccctgctgctgcggctggagcgcaaggggctgatcgcggcggagtaccgcgccggctccggcgggccgagccgcaaatattaccggctgacgcctgaaggcgagcagtatctggcagaatttacagcggcatggcagaccactggtgccgccgtaaaccgcattatgcagaataaggagggctgaaccatgaaaacaatgcgcaacgaataccgcgacttgaaaaaagaaaacgacctcattttttcaacgctggcagagtacgaccgcgacaccatcacggaaatcatcagcgtagcggacaacacacgcggcatcgggtacgagatcgagctgatccgcaaggacctgattgcgatggcggcacaggccgaggcccggcgcgactatctgccgtcggtcatcggggacgtagatgtttttaagcggaatctgctggcaagcatgcccaagccgaagtttgcggattacatggcagacagccttgtgtggctgtgcacgtttgcgttggcctccgccgcgacctatacggtgttgggcctcccgtgggactgccattatgacgcggtctggcttgtgctctgcattgccattatgatgcccagtgcgtggctgctgcagcgcattgtccccgccgagtgggcggcctctaccgaaaaaggtgtgcggtacggcgccattacagccgccatgatgcttttgtggttcgtggagttttggttcgtcgacaaatggatcacgccgctgctgcccgcggtgggcctgcccaaccttgcggcagtcatcctgttcggcgcggcactggcagcgctgcttatctggcgcaaccatcgccgcaacgagcttgccgaaaaacggccctggcgggatgtgatagagaaataaaagtgtcccccgatggtgcggaaccatcgggggacgctttgccttcccctgcgggggaagccttttaaatatgctccaaaatcttgttgcccatctcggtgcagccaaccttggtgcagccgtctgccatcatgtcggcggtgcggtagccggcatcgagaaccgcgttcacggcagcctcgatttcatccgcctcggccggcatgtcaaagctgtagcgcagcatcatggcggcggagaggatgcaggcgatcgggttgacgacatcctgcccggcaatgtcgggcgcagagccgtggatcggctcatacagaccgcaggtgccctcgcccagagatgaggacggcaccatgccgatgctgccggtgatctcgctggcctcgtcggaaagaatgtcgccgaacatattttccgtcacaataacatcaaactgcgcggggtttttgcagatctgcatggcgcagttgtccacaaacatctcactgtattcgacctcggggtactcggcctgcaagcgctgcatgacggcgcgccacaggcggctggtgtccaacacattggccttgtccacacaggtcagctttttgcggcgcttcatggccgtctcaaagccgatgcggccgatgcgctcgatctcatgctccgcgtagggcatcgtgtcgatggcgaccttttcgccgttgcgctcgaccgtcttatgctctccgaagtagacgccgccgatcagctcacgcacgacgataaagtcaatgcccttatccacgatggactttttcagcggggaggcatcggccagctggggccagattttagccgggcggttgttggcgtacaggcccatgccagcgcgcagccggagcaggcccttttcggggcgcttttcgccgggcagtccctcccacttggggccgccgatggcacccagcaggacactgtcagcgtttttgcatttttccagttcggattccggcagcgggtcaccgaatttgtcgatggcctcgccgcccatgtaggcgcgggtataggtaaaggtatggccgtgtctggccgcgattttatccaggacacgcaccgcctgggtcacgatctccgggctggagcagtcgccgtagatcagagtgatgtttttctgcatagttctgttctccctctcgttgctattgtaggggcgggacatgtcccgccctcagcctttccagcacagcacttttgccgtaaagccgcgggccgggcatgcccggcccctacagggcatcagtccttcaagctgttcatcagcccgcccttggcaatgatgttctggataaacggcgggaacggcgcggcctgaaaggtctggccggtggtttcgtccgtaatgacgccggtgtcaaagtctatgctgaccgtgtcgccctcgctaattgcttcactggcggcgggacattcgaggatcggcaggccgatattgatggcattgcggtagaagatgcgggcaaagcttttggcgatgacgcagctgatgccggacgccttgatggcaacgggggcatgctcacgcgaggagccgcagccgaagttctcaccgcccaccatgatgtcaccggccttgactcgggcaacaaagctcttgtcgatgtcctccatgcagtggctcgccagctcggcggcgctctgggtgttcagatagcgggcggggataatgacatcggtatcaatgttatcgccgtatttaaaaacaggacctcttgcgttcatagctcaaacctccctggggtcggtgatgtagccggtcagtgcgctggccgccgccgtggcggggctggcaagatagacctcggagtccacatgccccatgcggccgacaaagttgcggttggtggtggagacacagcgctcccccgctgccaaaatgcccatgtagccgcccagacaggggccgcaggtgggcgtggagacgatgcagcctgcatcaataaacgcctcggtatagccgcgcaggatgcactccttgtagacggccatcgtggcggggataatgatgccgcgcacacccttggcaatgtgtctgcccttcaaaatctcgtaggcagcctgcatatcctcaatgcggccgttcgtgcaggagccgatgacgatctggtcgatcttgatgttcctgccctctctggccgggtgggtgttttcgggcaggtgcgggtagctgacggtaggctcgagcgtgtcaaggtcgatcgtgatggtctgttcgtactcggcatcggggtcagcctcgtacttcgtccacgggcgctggctccggcctttgagataggcctcggtcacttcatccacggggaagatgccgttcttggcaccggcttcgatggccatattgcagatgcagagcctgtcctccatcgtcaggctgctgacgccctcgccggtaaactcaaggctcttgtacagtgcgccggacacaccgattttgccgatgaggtgcaggatgacatccttgccggtgacaggcttgcgcagagcgcccctcagctccaccttgatcgcggcggggaccttaaaccatgccatgccctttgccatgccggcggccatatcggtggagccgacaccggtggagaacgcccccaccgcaccgtaggtgcaggtgtggctgtcggcaccgatgatgcagtcaccggcggtcacgatgcctttttcgggcagcagggcatgctcaacgcccatctggcccacatcgtagaagttgagaatgtcgtacttgtcggcaaattcgcggcactgcttggactgcgttgcgctcttgatgtccttattggggacaaagtgatccagcacaatattgacgcgggtcttatcaaacaccgagtcaaacccggctttttcaaattcattgatggcgaccggggtcgtgatgtcattgcccagcacgatgtcgagcttggcattgatgagctggcccgccgtcacggctgcctcgccgcagtgggccgctaagattttttgggtcatggtcatgcccatggtcgtgtacctccgttttaggattatctcaccgtaggggcggggcatgccccgccctcggccttacctttacgtgccgcctgcctttatgttgagggccggacatgtccggcccctacccggcagtgcgttgtagggtgtttacttattgttgatcgcactcaccaacgccttaatgcctgccacaataatatccgtgtgggtgccgcagccccaggtctcctcgccggaggcccatttcagcccgacataggagcaggcgcgggcgttcgtgtcggcgtccagcgcatgctcgctgtagtgtaccagcgtaaagtgcatcccggtctgctgctcgatggccgtggccacggcgtccagacgaccgttgccggtggctgtgcagggggtcgtgttgccgccgctggtgatcgtcaccttggcggtgatgctgccgttctcgttctggacgaagtgcgcctcggacacattcagcggcgcggtgtggttgagatagctcttttcaaagacggcgaggacctcctgcacgcccagctcacgatgctcatgatcgctgacctccttgacgcggtagccgagattctcccgcattttgggcggcgggttgtagccatagttctgctgcagcaggaaaccgatgccgcccttgccgctctgggagttgatgcggataacatcggcatcgtaggtacggccgatgtcatgcgggtcgatgggaatatacgggcaggtccactggtggagttgcttttccttgcgccaggtcatgcccttggcaatggcgtcctgatggctgccgctgaacgccgcaaagacaagggcgccggcgtagggggtgcgctcatacacatgcatccgggtaacgcgctcatacacctcgcagatggcgggcatattgctgaaatcaaggtgcgggtctacgccgtggctgtacatattcatggccagcgtgatggcgtccacattgccggtgcgctcaccgtttccgaaaaggca

SEQ ID NO: 864 - DNA, 19079 bp, unidentified
  source 1..19079: mol_type = unassigned DNA
  misc_difference 16669: note = a, c, g, or t
  misc_difference 16670: note = a, c, g, or t
  misc_difference 16671: note = a, c, g, or t
  misc_difference 16672: note = a, c, g, or t
  misc_difference 16673: note = a, c, g, or t
  misc_difference 16674: note = a, c, g, or t
  misc_difference 16675: note = a, c, g, or t
  misc_difference 16676: note = a, c, g, or t
  misc_difference 16677: note = a, c, g, or t
  misc_difference 16678: note = a, c, g, or t
atgaacgtggaaggacagtataatccaaaagatgtagagtgtatttcggtagaaaaccttgaagtgctgccgagtggagcggattggcagagccgacatctggaatctgaaaggcgaaaagcagagattcgtgacagaatccataagcaggcagaacagggccagaaaacggcaaaagactactttcgtccggcgaaaccgacaccgtcgatttacgacagcgacctgaagcgtgtagccgtttatgcccgtgtcagcacttccagcgaagaacagatttcttccattgaaaaccagactctatattacaccaaaaagattgcagaaacggaaaactggaatttgcaggacatttacagcgatgaaggaaaatccggcacatcgctgcggaaacgtgatgcgtttaaacgcatgatgcgagatgccaaagaccagaagatggatttgattatctgtgccagcatttcacgttttgcccggaatttttcggattgcatgacgcagatcgcggccctgaaaaccatgcacccagcacatcccattggcgtgtactttgaaacggaaaacatctacacgctgaatccaagcagtcaatacagtcttgacattcaggctcttttggcagactgggaatcgggcaacaagagccgccggatgatcctttcgtatgaccagcgcattatgacaggccagtacccggtggccgacctgatggggtatcggcataccaaagatggacagttggtaattgagccggaagaagcaaagacggtgcgttttatctttctggcgtttatctatggttataactgcgatcaaattgcggcagtgctgacgcagaagaagcgtagcaccctgcgtggcaagcaggagtggaatggcatgatggtggcaaacatcatgaaaaatgaacgccgctggggtgatctggaagcccggaagagcatcgtggtggactacaagctgggcaaggtcacaaagaataatgggaatcgctgctctgcctatgttccggaacaccatgaagcaatcgtttcgccggaaattgcacgggctgcacatctggtggcatccagcaggaagaagtgcggtgtgcaggatattgtggtgatccagcagggaacattgaaaggctttgttggcatccatccgaattggagcggcatcagtgttgaaagcatccgcagcctttgcctgagcacctatctgccggaagaggtgatgaaactgaacgatatagcagagatgagggctggggcaacactgggaaaggcacttcaatctgaatatatgacggcttcaggtgcttgctttatcaaccagagcagcccggttatgacgatttctaaaaatggaatccgtttcagcaaggcctgccatagccggttggacgactgcgagtatgtggaactgctctatcatccgattctgcaggtcgtgattttgcgaaagagcaatcatggcttttcaacgacgatgcgctggagagatgacaatgacgttcatagtgctttttcagccagatcattttctggactggtcttccaaacattgaactggagaaggaattgccgctatcagtgccgtggtatctgccggggtcagggaaatgcaaaatttctgatttttgaattagatgagtcccggattttgactgggaaaaatcagtatgaacaagaaaattgttcgatgaatctgaaatgccggctatatcggagtaaatgggttcagagcattacagttagtgatgtgatggaatctggccaagtcgtagaaaatcccatgattggtgcaattccaagcagaaatgaagttcaacgtgaactggatgatcttttgatgtcgatgtagggggaacttatagaatggaagaaaaaaacagggcgcaggaactgagcgttcgggaaatctccttgattcgtgagttaacgcagatacgaaaagaacataaaagagaactggagtacgaaaaattcgatggctatgaacttccaccgcgcacccagttttccatgctgaataaacctgcagtgagcataaaatatggtgttatgaaatttaatatggcgtgcattcggctttttgaaggaatcaagtatgtccttccgattttgcaccccaataagaagcggcttgcgttgattatgtgcccggaagaggacagtgcatctgttgaatgggcaagacagaaggacgaaaactgggtgaataaggatattacatcattggaatttgtggaaaatatcttcaggctcatgaactggaatcgggaatgccgttataaagtgcttggacgggtggctaattcagatcagggtctttgtatgttgtttgatttggaagaagcaatcatgttcaccccgaagccacaggaatatacagatccgcttactggtgaaatgaagaaaaagcagatgaaattcttcccggatgcctataagaaccgtatcggaaaatcttataatgactatattgcagaccatcagatgaacatgtttgaagacttcattgggtatcagggctctgcggtattggatgagcctgtgcaggaagagaatacagcgccgaagccaccaatgagacagaaaagcgaaccaccggaaaatacagcgctgccccatttgccggaacaatctgtgaatatgcagcaattgagttatgagtctgacgggagaggaatgccgacatgaattctggacgagttatgaacctgcgagtgacaattccggcggaaagccggagaatgaatgttgggaaagatgttatccgtattcttggaagtccggcctatatctgcgttttgcagaggaaagatcggaagtctattgcaatcacgccgtgtgctgcggagcatcccatgtcctttaaggtcccggacaggctgctgaccgatgggcagtgtcggatgatgattaacggaatacagttcattcaggtgttgctggaagcaaatggtctggcggcaggaaaagaccatcagtttaaaggacggtatgatgccgagaaaaatgcagttatcatttcgcttgaaaaagatgaacaaagtgccctctcgccttaaaagtgtacaacttgacatcacgtccatttgggcgtataatacgtccaaatggacgtgatgaagggagccgatattatgcgtgccggaattttagatggctttcaaacgataattccaacagcagcggctgtcttatcagaaagacgacaaatgttaaggatgacgcaacaagaggttgctaatcgggccaatataactttgcgtcaatatcaaaggctggaatctggggaaagaaacattttgacttcttcttttggcttggcgtgtcgggtaattgaagctcttgatatggatgtttctaaattctatcatggtgactattaccttgaagaattgaaaactattgaaggaaaatgatttggtgacaggggaaaacatcaatttaaatgacggcttgatgccgaaaaaagagcaatataaaaagaattatcccgtggaaacagggaagataatccgtgaaaagtatgaaaatggattgattcggaatgaacatgaatttgaggaggtgctgaataatgtgctatttagtagcaaaagatcgtaatgcacatggttgttttgctctaaaaacgacgcatgggaagcatctggtggaattaaaaagagaattgaacaaagaggttgaatataagggagtacagcttgtaacaatcagcaggccaacagcgtatggtgagtatgcgccttaccactttgtggatactgaacgagtaagaattgaagaaagcggtacaaaaacagatgtgacaagattgatttcggcacgaatggctaccgaatttgaaagggggctttattatggtaaaaacgagtgaaatgtctatggaactgaaacaggaacttgcatttacaaaagaagaactcgcagaactggaagcggcaaagaaaatgccaatcacgtttgatgcggattgccctgaaaccacacctgagcgggcggttaaatttagaagagttaatccgccgcgtaacagaatggatgcccatggagcataatcacaatcaagaaaagaacgtatagagcgcaagtaagccctacaaggctcagatcggttcggaaccgactgaaacccttgtagggcttatttttttgcaaatttttttgttccttgcttgacaaccgcatagggtcaaccaagaaaaactacgataactaaagggttttgacggcttgagttgtccttcaaaagtttatttgttgaaaagactgcaagaagcgggaaatcctgggggttatatgtaggaggcttttggaagctctgttttgacccacaaaaaggagcagcaaataaagattgaaggagagttcaagcctacggtggattgcctttgtgcgacccgccgtaggcttattgctgttttataaagagaaaaatgaggagaatgaaaatatgaaaaattataaaattgccgtagcaggcactggatacgtcggtctttcccttagcgttctgttagcacagcataatcaagtgatggctgttgacattgtgcaagcgaaagtggatatgattaacaatcataaatctccaattcaagatgattatatattgcacgagaagaagcaaagcgtcattagtagagaaagaaatccggagctcaaacaagctctgcaagacttggatgactacctgttcgggtggtgaaattatgcgccatttcccagttagggtacttttttctggaagttcacattaacattacgacttgcaaagcaacagcatgtgtgatatattgttttaatagatgcaattcacttataaggttaataagattaatcaattgtagaaaagttactggataattatctacacattcctatgtgccctgtagtgtgtctgctctctcaagtaattataaaaaattcaactatgctgcgtatagtgcgttctattatttgtttttgttttgtagcgcagcggaaaggcatggtcataaacatgaaagttgtaattctggccggtggtcttggcacgcgaattagtgaggaaagcgtttacaagcccaaaccgatgattgagattggaagcatgccgattttatggcatataatgaaggaatattcctattatggctttcatgatttcgtgatttgtgctggctacaagcagcatatgataaaggaatggtttgcagactacttcctgcataccagtgatattacatttgatttcacccatggcagaaacgagatgattgttcacaaccatcacgctgagccgtggaaagtgacggttgtggataccggactcaatacaatgacgggcggtcgcatcaagcgtatccagccgtacattggcaacgaagcgttcatgatgacctatggcgatggcgtctgcgatgttgatatttctaagttggtagaattccataaagaaaatggtaaaattgcaacgctgactgctgttatgcaggagcaacagaaaggcgtgctggatatcgcagaggataacagcgtatgttccttccgtgaaaagaaagcaagtgacggatctttgatcaacgctggctacatggtgctggaaccgcagatttttgattatctggatggagatacctgtgtgtttgagcaaatgcctctgcagaaattggcagaagaagggcaattgatgagttacacccataaggggttctggcagtgtatggatactgctcgggaaaaacagcttctggaaaaattgctggcgacaggcaacgctccctggaaaaagtgggaggattgatcatatggtacattacgatcctaaattttactgcggtaagcgtgtttttgtgacagggcataccggcttcaagggaagttggctgtgtaaaatgctacttatggcaggagccgaggttacaggctatagcctggagccgcctacacaacccaacctcttttcccttgcaggaatagaagatcagatgcacagcgtcatcggggatgttcgcaattttgatagtttgaaagcggcctttgacgatgcacagccggatattgtgctgcacttggctgcgcagcctattgtgcgtgacagctataaagatcctcgttatacttatgagacaaatgtgatgggaacggtcaatctgttggaatgtgttcgtctggcccagcagcagggcaatgcccctcgctctgtgttgaatgttacaacagataaggtgtatcataataacgaatgggcttggggttatcgagaaaacgagtccctggacggctttgacccctactccaatagcaaaagttgctcagagttggcaacacattcttatatcaacagtttctttgccgacaaggttgtagctatttctacagcgcgcgcgggcaatgtcatcggcggcggcgactttgccaatgaccgcatcatccccgactgtgtgcgcgccatggctgcgggccgtaagatcggcgtgcgcaacccctactcgacccgcccgtaccagcatgtgctggagccgctggcggcctacctgctgatcgcccagcgccagtatgaggacagccgctttgcgggctactataatgtaggccccgatgactgcgactgcgtcaccaccggcacgctggtggatctgttctgccgggcctggggcggagacgccgcctgggagaatcaggccgaggccaatgccccgcacgaggccaacttcctgaaactggactgcagcaagctgaaaacgactttcggctggacgccgcgctggcacatggccgagtgcatggaaaagaccgtcgccttcagcaagatctggcttgccaacggcgacgtcccggcggagatggaaaaggaaatcaacagcttcttaaaggggcagaaatgacaaaggaacagaggagcatagcaagcgcttatgtcatttcggctttggtaggcggagtctatctgatttcctggctgacgcatgtatggggcggccagctgtggcccatcaacagcaacatggtcaactatgccgtggttttggtgctgttcggcattgcgcttttgctgtttggcaatcttttcgcgcgtactctgccgcaggagaggggctttgtgcaagcctgtgatgcgcgcctgaaggaacgcagcgccgcggcagtcatgatcgtcacagcactggtgacagccgtctaccttatatattatgcctgtatcggtgttaataaggaatttgccggtcctacctgcgcagagtcctcactgacggcgccacagcttattccggtgtattacctgcttacggtgctcttttttgtggcgacaatctatctgctgctgacgggcagggactgcccacagtggatgacctggggcggctacggcctttcggcagtgatgtacttcctgggcgtatggatcgtcaatacgtttgagggagacccataccacggcgaggcctatctggaaagcatctataatgtggcggatggtgttccgtatgaggagctgacaaccggcatctacggccactatggcctgtttttcttgctgccgatgaagatcttcggtgcaaaggctgttgttattcaattcctgatcgcactggttggcgttgtgacgggtctggccatgctgtactgcatccatcacctgataaaaaagaactgggtacgcctgttgatggcactggttgtgccggtcattccgtttgcatacagacggacgaattactggcagctgcagcctcaccgtttggtattcccgatgctgttggcagcctatatgctgttctgtttgcggaaaaagcagtcgaaaaaaacggctcggttctggggcggttggcttctgtgcatgctggcagtgctgtggagcaccgagagcggtctgttctgtatcatcggctggtgcgcgggctgcatcgtccgctggtggcaacaggagccatggtacgcccgcggccagtgggaacgctatggtgcgctgctgctgggcgctgtgttggcagtgctgggggccattggcctgacaaatttgtataacctggcctgcggcggagcaccgatcttcaaggtgtttttctacccgctgtacagcagcaattatatggatggctccatcggctacccgctcgagctgggcgtgcgcccatgggtgtttgtgctgctgattatgctggccgtgctggcatggtcgctgtttcagacaaccgctatcggaagaatagccaaaacggagaacattgccccatttacggcctgcctgtcggtactggggctggtatcgttcagttactatgcaaaccgctccgcctggatgaatctggagatctgcctgccggaggcactgctttgtctgtgcttcccgttgcaggcgctgacggacggggaggggctacgcaagaagctgggcggcctgtactgcacggcggcacagtctgtgggactggctgtactgctggtgctctgcgtgcttacggcacagctgcccggcggcgtgatgaatacagtgattctgcaggagcgcggtgcgttcagcacccgcggcatctatgcggaggtggagaatttctctgccaatataccggacaacacctttgcggttggccgcgatgtgggaatcatctaccatgcagcaggctgggacaactacggacattatgtggatgctgcggattacggcgtggcagataccgaaaaattactccctcatattctggcagagttgaaggcccagccgagctttgtcgtggatgacatactgaggatctatctggggcagaatggctacacgcccgacatgctcggataccagctgcagacgaccttcacatcggctggcggtgtgaaaccaacgacctattactattatgaaaaacaataaaaggagagaaaaacctatggcatggaagaatgaggcagaagcccgcgagcagatcaaggcaatggtcgccgagtactatcacgacttcaaggagaaaaagacctcctatcaggagggcgaccgcatcacctacgctgcccgcgtctttgatgagaaggaaatgtgcgccctgaccgacgccacactggacttctggctgacgacgggccgctttgccgatcggttcgaaaaggaatttgccaagtggattggcgttaagttcgcccatctggtcaacagcggttcctccgccaatctgatcgccttcatggcgctgaccgcccccgagctgggtgaccgccagatcaggaagggcgacgagatcatcaccgtggcctgcggcttccccaccaccgtgaccccggccatccagtacggcgcggtgcccgtgtttgtggatgtgaccgtgccccagtacaacatcgacgtcaccaagctcgaggccgccctctcccccaagacgaaggctgtcatgatcgcccacacgctgggcaacccgtttgacctgtccgctgtcaaggcgttctgtgacgcccacaacctgtggctggtcgaggacaactgcgacgcgctgggcacccagtacaccatcaatggcgagacccgctttaccggtacatggggcgacatcggcacatccagtttctacccgccgcaccatatgacaatgggcgagggcggctgcgtttacaccaacaacccgctgctgaaccgcctgatcctctccttccgcgactggggccgcgactgcatctgcccctccggccaggataacttctgcggccaccgctttgacggccagttcggcgagttgcctaagggctacgaccacaagtacgtctacagccactttggctataacctcaaggtcaccgacatgcaggccgctatcggctgtgagcagctgaagaagttccccacctttatcgagcgtcgccgtcataactgggatcgcctgcgtgcggcactggagcctgctgcagataagctgatcctgccggagcccgctgccaacagccgcccgtcttggttcggcttcctgatctccgttaagccggagagcggcctggaccgcaacgccgtgacccgctatgtggagagccacaatgtgcagacccgtctgctgttcagcggcaacctcatcaagcacccttgctttgaccagatgcgtggcacggacgcataccgcgtggcgggtgagctgaccaatactgattttattatgaacaacaccttctgggttggcgtttaccccggtatgaccgatgaaatgattgactatatggcaaaaacaattattgaggcagttaatcagtaaaaacacatcgaagaggaatcatacatgaaacagcaaaaagcaagaccgactttctgcaaaaatttgcaaaaagcaagcaaaccaacgcccatgcaggtatactgcgcggcaacgattctttgcttagcggccttgctttttgctgttttggtaagtcatggtgatattgtaaaccagtacttcttctatgatacgctcgacacgggcatggatttctttcacagtattgaatatgtgaaaggccgtatgccgtatgggcagttcagtacactgtatccgccgcttgcaaatctgttcttttacggattgtatcagctggtgccaaaatccctttctgaagaatggcagcaatcgtttttggattctatcagccagcgcggcagccagcaggatttgcggctgcatcagggaacgatgatgcttttcatcctttttgtggtgctggccgtgctggggattgccgctatgacagagcgcttgacccggaactgcggcggcgagcgtaaattgctgtccctttgcgctgtgttcagctacggtgtgttgtatgggctggagcgcggcaaccttctgctgctttgctggccgttgatggcgttctttattgtaaaccgcaaatccaaaaatcctgttatacgggaactgtcctacatagcgcttgccattgcggccgggttcaagctgtatccggcgtttctgggcatattgcttttgcgcgataaaaactatatggcggccgttcgcacggtaatatacgggattgtctgcctttgcttcccgctgtttttcttcaacgagggtatgtttggtctgacgctttggttccgggtgctgtttgaattcaccggtgacagtggacacccgtggataggcaatggctttgccaacattgtggcggaatttgcacatggaatcgatatgctgctgggcacaagtctggcagatggcagctatgctttgctgggaattctgctggcggcggtgctgctggtatgtgcattgcgtatggaccgtgagtggaagcgcgttctggcgattgtgctggccatggtgatgttccaatcccagtatgattatgtgtggtgcttgtttttactgccgctgtgtgtcttttttgcacaggagaacgaactgaataaggaaaatatcgttccctatttgctgatggtcttgctggttataccactgccgcttttccgtgcggatgaattgacgccgacatttaccatacacaacactttggggcatattatgttgattatgctccttgtatggtgcatagctgaaacagcccgtagaggaaagaaaagtcctgctccgaaagcagttggaaacaatcgcagacagctatgcgcaacggctatattggcggtttgtatgctagcttgtggatttggtggtcaagcactttgggaaaatacgcataactggggctttgactacagctataatggacggattggagacgaaggcgtcctgatgcaagacatacaggacagcagcggcaataccgtaacggttcagtggagcgggcgcggggcttatgtcataatttataatcatgcaccgtttgcacaggagatgacaatcgagtttgaaacgggatacggaatggatttgcagcaagcacataccatgacattcacggtggaagaaaatacgcaagagagtatgctgcgtgaggaaaaaccagaaccgaaaagcgtaaaaattgaacgcgaaggacagaaagtgacctataccgtaagcgtggaccccggacaaaccaaggttgagctgagctatgacggccccatggctgtctacgatgagaacacgcgcaaaaacgggacattttccgttaaaaatctgacagtcaccagtgcgggtaaaccggaagagacagcgtaaggaaaggaaaaatatatgcagaaactgcttgccttgctgggcgcaaaaaataaagaggagtttatggcgctgctgatgcagtttatcaagttcgggctggtaggcgtgagcaacacagctgtgtctatggcggtctactatatctttttatggatcagcccggatttgtatatgctgggcagcattctgggcacaattttaagtattgcaaacgccttcttctggaatgacaagtttgtttttgccggcaatgcaaacgactggcgcagcaagctcaagcgtctgggaaaaacttatgtgagttacggcggaacgtcgattttgtccaatgttctgctctggattgaagtaactttctttgcagtcagcaaatctattgcaccgattgtaaacctgttggtgacaattccattgaattttatcatcaataagctgtggacatttaaggaaagtaagaaagatgcgactttcagtttggaaaggtaaaaaatgataaaacgcttgaatagtacggataaaagatattatatatttatgattctgactattgcagttgcagcattttatgctgcgctgatgtgtaacaaaacaatgcctttcgcggagggatggtatacatattatgcgcaacttataaacgaaaaaggtttgctgccttacagagattttgaatatcttttttcgccgctctacatttattttattgcgtttatcacgcgctttttcggatatgatattttgacactgcggtgtgttggcatcctaatgtttgtaataatcgctttaggggtatatttgtttattacagaaattgttggaagaaaaaaggcgtggattgctgcaattacttccgttacagcggttatgtatctacagtcagaagtagttcagattttttatgactacatccgacttatggacatttttgctgtttttaccgttttattcttgattcgcgctgtcaaagcaatgcagcacagcgaaaatcaaggcgtaaaagtaaatctttttctttgtggtcttttcaattccctcttcataaatgtaaaacaaaatgttggattgattttttgggcatttacaatagttctaattatttacttaggcgtgtattttcaacagtccataaaagcaattgtaaagaatttaatgcaatttttattgcctattgtagcagtaacatgtgcaatttatttgttgctggccgtaactgggggattgaaaggatatttgtccatgacgggcggaggcgcaattagcgcaaaaggcggtatgattgcgattctctttaactgggtgcccaataactggaacttattccaaaatgcgatgccagaggccagtgttgttttacttgttgtagtggctttgatggtggcccttgccatagcagaacataaaaacaagatggcacgacatgatgcaaatggcgcatggagtaagattgcggatatacacgggggggggggtacctgctggcgataggattgctattggttatggctgttcgccacaaagacatggcagtggcaatttcggattggaagtcagtaacaccgtatttcttttttgagattgtatttccagcttttttgttgtttggtttttggtttctctataatatcattaaaaaacagcaaaacgcagagacatttttgctgtggtttacactggcaggctcttatgtggcaatatcttggggctgtggaaattccggtggattagcagagggacaggcaacaacaggagtggcatttgttgtcgcatttattctgtatggactaagctatcagtggcttcagatattacaggtggtagcggtagtcgcttgcatcggcttaacgattcaatcttgcaccaaaaagatggtgaatacctataattggtggggagcagatgaagcagatttttgggcaagtgagaacaatataggagatgttccgctgctgagcaaaattcgggcatctacagatacaaaggctgtgtatgaggaaatctgcaaggaaataacagagggagtgcaggaagatgaaaccatctactgcttcccgcaaattcccatattttatagtttatgtgaccgctgggatccgggggtacgctctaaagtagaatggtttgatgtgtctacggatgaagcagtagaagcagacattgatattctaaaagaatcaccacccaaggcaatccttatgtacaatgtgggtgatgatgtctatgaggctcatgaaagcgcatttcgcaaggggcaagcatccggaaccagaaagatgagagactttttgtatgattttgcgtatgctaatgggtatgaatttatcggcaattacactacaggaaataatgaacttacactttggattcagaaagacaatcgtaatgtgaatctgattgatgcgtttgatggtggtgatggcacaattgataacccctataaattacatactgctgaacaattgcgcttgtttagtaagatggtaaatgaggggagaacttttggcggtcaatatatcgaacaaacagcggacatagacctcgccaatcaagattttacgccaatcggtgaatattccggtaacaactatttctgtggcacatacaatgctgccggccatgtgattcgcaatctaaagattgaaacgaatgataatgcagccttatttggacgacttggcggtaaagtatataatctgggaatagaaggtggaaatatcacaggcgcttatatcggtggaattgcaagccatgccgttaaagatacagcagcaataattaactgctatacagatatttctatggatggaatacgtgcaggcggtatcgccgataattttgtaggaactgtcggaaattgctttagcgtagggttgatacatggtacggatagtgcagatgtattgagctttagccaatataaagaggtacaaagcgtttattccgttaaggaaaaaaatagtcaggacttcgatacacaaagtacagatgatgtcagaattacatattgtacggaagaaacaatgaaaaatggaatattggcacaacgattgaatgattctatttattcgataggtacagaactacaaaagagcgatggtactgaagataatgaccaagaaacaacaattgagttggtacggtggaaacagggaacggatggacatccggttttcgatgtgccatcgtaattgaagcagaaaaataagaaaggcagacaatcaaatgaaacagcgtttagcggattatgtggcggactttctggcggcgagcggtgtgacggatgttttctccgttgtaggcggcggcgctatgcacctgaacgatgcgctgggccataacccccggctgcatgtgacttacaaccaccatgagcaggcctgtgccattgcggcggaagcctacgcccggctggaaaataagatcgcggcggtctgtgtgaccaccggccccggcggtaccaacgcactaaccggcgttgtaggcggctggctggactctatccccatgttcattgtctccggtcaggtgcgctatgacaccacggccagatacgctttgcagtacaccggtacgccgctgcgcgccatgggtgaccaagagtacgatattactaaatctgtccagtacatgacgaagttcgctgccatgctggaggaccccaaggacatccgctacctgctggaaaaggcgtggcacctagccacgacggggcgccccggcccggtctggctggacatcccggtcaacttccagggcggctacatcgagactgacgagttgcgcggctacggccccgccgaggatgacgcccagctgcccccgccggtggacgacgccacgatccggacgattctggaaaaaatcaagaacgccaaacgacccgtgttccacgcgggctatggcatccgcctgtccggcgggtatgcggcgttccgctccgtggcggaaaagctcaacatccccatcgtcacctactggaacgccgtggacctcatcgaggatgacaatccgctgtactgcgggcgcgccggcaacatgggtgaccgcccgggcaactgggctatccaaaacgcagacttgattctggccgtaggaacgcgcatttctatccgccaggtcggctacaactggaagacttgggcccgcgcggcagaggtcatcatggtggacattgaccaggccgagctgaaaaagccgaccctgcacgttgaaatgccggtctgggccgacgcgaaggactttttgaccaagctggataaggccgccacggcccccgtgaacgcgggcggcgagtggctggccacctgccagcgctggaaacgcgactaccccgccgtgctgccccgccagtgggaggaaaacggagagaccgccaacgtctacgcctttgtgcgctatttaagcagccgcctgccggagaacagcctgaccgcggtctccaatggtgcctgctgtgtagtcggaaatcaggcgtatgttattcagaagggcagccggatggcaaataatagcgctgttgccagcatgggctacggtcttcctgcagccattggtacatgcatcagcggcgggcgnnnnnnnnnnattccgccgccagacgatttgtcttgaaggtgatggctccatcatgatgaatcttcaggaactgcagaccatcctgacgaacaagctgccgatcaaaatcttcctcatcaacaacaacggttaccactccatccgcctgacgcagaacaacctgtttaaggagcactgcaaggttggcatcggccccgagagcggcgacctgtccttcccggagtttgaaaagcttgcaaaggcgttcggctacccctactacagcgcccacagcaacgccgagatgaagcaggccgtggacacggtgctggcgctggacggtccggtattctgcgagattttcaccgacacgaaacaggtctgggagcccaagagcagcaccaagcgcctgcccgatggtacgctggtcagccccccgttggaggacctggcccccttcctgccgcgtgaggagctggagcagcagatgtttatcccgctgatgccggaagtgtaagggagtgcgtgattcgaaaatggcaagcattcaaagacaaatccgcaccgccatcatcactggccctacgggggcaatcgggatggcgctgtgtgcaaagctgctggcggagggcgtgacggtttacgcggtcacccacccgggcggcgcgcgggcggcgctgctgccgcaggacgcgcggctgcatgtggtgccctgcgacgcggcggagttggccgcgctgccggagctgatcccggaaaaggccgatgcgttcttccactttgcgtgggcgcatacgatcggcccaggccgcaacgacatgccggcgcagatcgagaacatccgctacaccattgcggcctgccgcgccgcggcgcagctgggctgccaggtctttatcggagccggcagccaggctgagtatggccgcgtggagggcatgctgaccgcacaaactccttgcttcccggaaaatggttatggcatggctaagctgtgcgccgggcagatgagccgtgtggagtgccaggcgctgggcatggcccacatctggacgcgcattttgagcgtctacggtccgcacgacggtccggccacgatgatcagcggcaccatccgtaagctgttgcacggcgagaagcccgctctgaccgcgggcatccagcagtgggattatctgtacgccgccgatgcggcagctgcgttctacgcgctggccgtcagcggacaggacggcagagtctacccgctgggcagcggcactgcccgcccgctgaaggactacatcgaggcgctgcgcgatgccatcgacccggcgctgccgctgggtttgggggaggtcccttacggcccgctgcaggtcatgcacctgcaggcggacacatcagccttgcaggcagacaccggttggtatgctgcaaccacatttgaagaaggaatccgtaaaaccattgaatgggcaaggaaagaaacaaaatgagtgagaaaaagacaatttcggtaatgatcccctgctacaacgaggagcagaacgcccgccccatctatgaggctgtgcgcgatgagttggtcaagagctgtccgaactatgactatgaaatcctgtttatcgacaacaagagcgaagatggcacacgcgccattatccggcagatctgcgccgaggacaagcacgtcaaggccatcttcaacgtcaagaacttcggccagttcaacagcccgtactacggcatgatccacacctccggtgactgcacgattacgatgtgcgcagattttcaggatcctgtggagatgattcccaaatttgtagccgaatgggaaaaaggttataaaattgtaattggtcgtaagactcagagcaaggaaaacggctttatgtattggctgcgtggttgctattacaagacgatcaagaaaatgagcagttgtgaacagattgaacagtttaccggattcggtttgtacgataaaagctttattcaaacattgcgagaactgaaggatccgacacccttcatccgcggcatcgtggccgagttgggccccgagcgtaaggaaatcgagtacacccagccacagcgccgtgcaggcaaaacccataacaactggtatagcttatatgatgcagcaatgcttagctttactagctacacaaaggtagggatgcgcctagctacatttgtgggatttatttttgcgggaatgagctttttgtttgggcttttttatttgattgcgaagttgttgttctggtataactttacggctggctatgcgcctatgatgattgcaattttctttatgggcggtattcagttggcttttcttggatttcttggtgaatatgttatggctatgaatacacgcatcatgaaccgtccgctggtcgttgaggaagaaaggctgaattttcagcagaaatccaagtaa

SEQ ID NO: 865 - DNA, 11978 bp, unidentified
  source 1..11978: mol_type = unassigned DNA
atggccgcagctaccgctatatcggccagttcgtttcctcccgctactgcttcgatttcagcacggatgcaacgggtgtaccctgtatgtactactacggcttcggccacggcgtgggcatgagccagtgcggcgccgtgggctacgccgccgaggaggggatgggctaccgcgacatcctgaagcactactactccggcgtttccatccggacggtgggcagcggcacgagctccggcggcggtctgttcagctggctgcgccgcctgctgggcatgtaaaaaatcaaaaggaattgcgcaaaatacttctcaaatgagacgtgatttggtatactgtacacgtttgtacacaagagacagacgatttcgcgtttcacgctccaaagcgggagcgatacgataaagaataacaggtggagagaacggaatgcagttggagaaggaaaagaaagaaaagcgggagcgggagcgctgccgcgcactggcgcagcgcatcgcggaggaggcaaaccccgcctcggcggccctgctgggagagcagatgtccctgctgacgaaagccctgcaccgtgcaggtgtggaggcagaagagtggacagagggttctgcggcagagcttctggtggtggcagaccccgcgtgggaaacgctgcccgagaccctgcccgcccgggtgctgctggtgagcaatgagagcaccgttatggcgggctgggccgagcagctggctcagcggggatacttccgcgattttggctggcgcagcaagggccgcgccccgcagtcggcgctgttctgtaccagccagcccacccagctgaagatggtgcggggctacgagatggaaatggacatcctgcgtgaccggatggtgcgcgccgagcgcaccagcggcgaggaagccgagctcatcgcccggctgcgcagcgacctttcgctcagccgcagccacgagcagcagctggaaaaggcactgggcgaggtgaccggctcgaagttctggaagatgacctggcccatgcgctatgtcgtcagcaagagccgccagctctggcacactctgcccttcttcgtgctcctgcgggagctgcgcagcggcggcatcgagggtgtgcgggaactggcccgcgcccgccgcgaggcccatattctggaaaaacagcgggcttttcttcagcccgcgcccgccgcgagtacgccgccctcttcccgggcaaagtcatgcgcgccgaccggttcgcaccggtggaactgctggtgcggcaggcaggcgaccagcctgcaggccccaagatcagcatcgtggtgccgctctacaacaccccgctggacttcctcgaagagctgctggattccgtcgtgaaccagacctaccgcaactgggagctctgctgtgtggacgccggcactgccccgggtgtgggcgagatggtgcagcagcgcgccgctgtggaccctcgtatccgctacaggaagctggagaagaatgagctcatccccggcaacaccaacaagggcatcgagatggccaccggcgacttcatcgccctgctggaccacgacgacatcctccatccctgcgccctctggtacgccgccaaggccatcgccgagcagggagccgacttcgtctataccgatgaggcgaccttcgagggcaaggtggagaatgtggtgctctaccacttcaagccggacttcatgctggacaacctccgctccaacaactatatctgccacctgaccctcttcagccgccggctgatggacgccgcaggcggcccggagcggatggagtacaacggcagtcaggattacgagctcttccttcgcctgaccgagacggcccggaagatcgtccacattccccacgccctctattactggcgttccagccccggcagcacggccagcgacatctccgccaagacctactgcatcgacgcgggcattgccgccctcaaggctcattacgcccgctgcggcgtggccgtggacgatgtgtccctcatcccgggtacgccgggctactacaagaccgattatacgatcgaccatccgggccgggtgagcatcctcatccccacctgcgaccacatccgcgacttggagacctgtgtggagtccatctacgcccgcaccacctacccggattttgagatcatcctcatcgagaacaacagcaaggcccccgagaccttccgcacctatcagcggatgcagaaagagcaccccgataacctcaaggtcgtcacctgggagggcaagggcttcaactacagcgccctgaacaacttcggcgagaagttcgccaccggtgagtatctgcttctgctcaacaacgacaccgaggtcatcactgccgcctggctggaagagatggtcatgtacgcccagcagaagcgggtaggctgcgtgggtgccaagctgctctacccggacgataccatccagcacgccggtgtcggcttcggcatcggcggcgtggcgggccatctgcacaagtactatcccgccagctccgacggctatatgggccgcctgaactatgtgcaggacgtctacgctgacaccgccgcctgcctgctcatccgcaaggagatctacgacgaagtgggcggtctggacgagagctatgccgtggccttcaacgatgtggacttctgcgtccgcgtccgtcaggcaggctacaccaacgtcttcaccccgtttgcccagctctaccactacgagagcaagagccgcggcatggaggacaaccccgaaaagcagaagcgttttcagggcgaggtgctgcgttttcaggcccgctggggcgacctgctggctgcaggcgacccctgcaccaaccccaacttcgacatccagcgcgaagatttcagcctgaagatattaccgctggaataaataaaagaggaacaacctctcagtctcgcttcgctcgccaagaccgggttgcggcacccagcatccgcttcactttgcttgcgtattgctggccgctgccccaacaatgactccctgcttccgccactggcggcggtcgtcattgttgcccctaaaaaggggagcccttggcatggcggaaaggtctgagctataaaaatgaggagcataaaacttggaactctctgcctgtatcgttgtctataacggctgcgacgaagccctcaaggcggcgcagacggtgctgcaatacacccgccgccacccgctgaccctctatctggtggacaacgccagccccgacggcagcggcgcacgtctggaagccgccgtgaagggcggcgctttgagcactcagcccggccagaaagtcgaggtgcgctgccgcaaggagaacggcggcttcggcaccggacacaacaccgtcctgccggagctgacgagcgactatcacttcatcttgaacccggacatccagctcaccgccgataccctcagcgatttggccgactggatggccgcccacccggatgctgtgatggcccggccggggctgcgcttcccggatggccgttcccagagcctgccgctgcggcgctgtgcgctgcggcccatggtctaccgccagctgccatttttgaaattctgggagaaatataaccgtgcgtatttgatggagggggaggacctgtccgctcccgttgagatcgagttctgcaccggcagcttttctgccgtgcggacggcggagttcaaggccgtgggcggcttcgatgagcactacttcatgtatgtggaggatgccgacctgacccagaagatgcgcaccaccggcaaagcctacctcgtgccgcagtacaccgccatccatgcatggcatcgcgcagcccaccgcagcctcaagccctttttgtggcagaccgggagcctgctgcggtatttccacaagtgggggttcaagttctgagcctttgctggtgaaacaaaagagcgccctccgcaaaaatttttgcagagggcgctctttccttgcttttttttcgatttgatagtagaataaggtgtaatactatcgcaagcctgccagtagtgcatagcgagatcctgccagcgcgtggcgcgggaagcccggcggctggcggcgtattaccaccaacattgtttacagcggacgcagctccgctttgaatccatacaggacccggcggatacgctgccgggccttgtacaagctgcacaacttttttatttcataatataaggagtgcacaaaaatgaaaggtatcattctggccggcggtgccggcacccggctctatccgctgacgatggtcaccagcaaacagctgctgcccgtctacgacaagccgatgatctattatcctctgtccaccctcatgctggcgggcatccaggacatcctcatcatctcgacccccaccgacacgccccgcttcgaggcgctgctgggcgatggcagccagtacggcatccatctgcaatataaggtccagccgtccccggacggtctggctcaggctttcatcctcggtgaagagttcatcggcgacgactgctgcgcaatgatcctgggcgacaacatcttctacggcaacggcttctccaagattttgaagaatgctgtctccaatgccgagaacaagggccgctgcaccgtcttcggctactatgtgccggaccccgagcgcttcggcatcgtggagttcgatgcaaacggcaaggtactgagcgtcgaggagaagccccagcatcccaagagcaactacgccatcaccggcctgtacttctacaacaaggaagtcgttaagatggcaaagcaggtcaagccctccgcccgcggtgagctggagatcacgaccctgaacgatatgtacctcaagcaggatgagctggacgtccagctgctgggccgcggctttgcatggctggacaccggcacgatggacagcctcgtggaggcagccgactttgtgcggatgatcgagaagcgtcagggcatcaagatcagcgcccccgaggagatcgcattcaagtacggctggatcgaccgcgacaccctgctggaaagcgcagagcgctacggcaagagcccctacggccagcacctcaagaatgtggccgacggcaaactgaagtattaagagaggcggtatccgcatgaaaatcattgttaccggctgcagaggccagcttggcaccgagattatcaagcagctccgggaaggccgcagtgagcttggccccatccccgagaagctggtgagcgccacggtcattccggtggacctgccggagctggacatcaccaactacaagatggtggatgacttcatccgccgtcagcgcccggacgtcatcatcaactgcgccgctttcaccaacgtggacggctgcgaggtgaaccatgacgctgccttcaaggccaacgccatcggcccccgcaatctggcacaggccgccaccaagaccggcgcccgtctggtacacgtctctacggattacgtcttctccggccgcgagaacggcggcatcccgcaggatgaggccaccattcccggccccatcagcgcctacggctccaccaagctcatgggtgagaagtatgtggagcagttctgccaccgccacttcatcgtccgcacggcatggctctacagctactacggcaaaaactttgtcaagaccatcgtgaacgccggcaaaaagttcggcaagctggaagtcgtcaacgaccagtgcggcaacccgaccaacgccgtcgatctggcccacgagatcctgcagctctgcgtgacccacgagtacggcctgtatcactgcaccggcgagggcatctgctcctggtatgatttcgcatcggagatcatccgcctgtccggcgtggacgccaccgtggctccctgcaccagcgaagagtacaaggcaaagcacccggacagcgccgaccgccccaagtggagcgctctggacaaccggatgctccgctgcaccgtcggcaacgacgtccgcgactggaaggacgcgctggcctgcttctttgagcactgggacggcgacaatgggatgaaagcttaattggcttttgtgaggaaaaagattatgtttaaccagtcagaaaagaaactgaaaacatgggcgacgattcaaggcatgtttttcagtgttgttgcgattgttttaggcgcggttatttattctgccgcagcggctacagataataatgcggtaggattactgctcggagtaatcgttgcagttgttgtttggtttttgtcgatgctttctgtatggacgttgtattcatttgcggatttagtggaatatacaaaagcgaacaatgaaattctggcttcaatggactcgacactgggtcagattgcagattgtctgtccactggtgaaaataatgaaactgcggagtaattgcagaaaataaaagaggaaatttatgaaaaaatatcttatcaccggctgcgccggttttatcggttccaactttgtgcattatatgctcaagaagtaccccgagatcctgctggtcaacctcgacaagctgacctacgccggcaacctcgagaacctgaaggacgttgagggcgacccccgccacgtcttcgtgcagggcgacatctgcgacaaggagctggtcgagagcctgtttgcaaagtacgatttcgattacgtcatcaactttgccgctgagagccacgttgaccgctccatcaagaaccctgaaattttcgtccagagcaacgtgatgggtaccgtcaacctgctgcagcgcgccaaggaagcctggtacgacgccgacgccaagacctggaaagagggcaagaagtacctgcaggtgtccaccgatgaggtctacggcgctctgggcgctgagggcttcttcatggagaccactccgctctgcccccacagcccctactcttcctccaaggccagcgctgatatgttcgtcatggcattccacgatacctacggtatgcccatcaacatcacccgctgctccaacaactacggcccttaccagttccccgagaagctcatcccgctgatgatcaacaacgtcaagcaccacaagcagctgcccgtctacggtgacggtatgcagatccgcgactggctgtacgttgaggaccactgcaaggccattgatatggtctgcaacggcggcaaggtgggcgaggtctacaatgtcggcggccacaacgagcgccccaacatcttcatcgtcaagaccatcatcgagcagctgcacgaccgcctgaaggacgacggcatcagcgaagacctcatcaagcacgtcgctgaccgtctgggccatgaccgccgctatggcatcgaccccaccaagatcaagaacgaccttggctggtatcccgagactcccttcgagaagggcatcgtcctgaccatcgactggtacctcgaccacgaggagtggatggagcacatcaccagcggcaactatcagaaatactacgaggaaatgtacaagaataagtaacttcttgtaaatagcctgaaagcgaaaaagagcagggcgtgcggtcctatggctgcacgccctgctctttttttgtcggagttaaagtttgtcctctttcatgtagcggatgagcaggggcagctcatagaccagcatggacagccagccgataccgtagctcacaggcatgatttgaaggtctaccttgagcaccagcaccagcacagcggcggcggccacgcggaagcccatgttgagcatactgctgttcagggtgatcttcaaatcgccgaggccgcggaagccgccctggatgccgttggtcacgccgggcatcagatagaagagggaggcgcaccgcaggaacttgacgcccaggtcgatgacggcgggatcatccacgaagagggagatgatggggcgggcgaagagcaggcagacggccatcaggcagaagccgtagatgagctcgatgcgcaggccgcagaaaaagccctgacgcacccgctcctttttgtcggcaccgtggttctgggccatcagggtggtcatggcgtgggcgatgttctgctggggcatataggtgaagtcgtccacccggctggcggcggtgaaagcggccattgcattgatgcccagagtgttgacgatggcctgcacggcaatcttgcccagctggacggtggcctgctgcatggcgctggtccagccgtactggacggtgctgcgcagcagagagccgtcaaagacgaaccagcgccgccccagctgaaggacgggaactttgaactggatatagacgacgcagagcacacagcagagcgcctcgctgaggacggtggagagggcgcagccttcgctgccccagcccagcacctcgacaaagaagagatcgccgccgatgttcagcaccgagcttatcatcagaaagtatagggcgctcttgctgtcgcccagcgcccgcatggtggcggcgaggaagttgtaaaagaaggtgaagatgaggcccgcaaagacgatgcggaggtactgcaccgcgatgggcaggatctcttccggaacctgcatcagccggagcagcggcgtcgccagcaggacgcagagggccgaaaagaccagcgagaacaccgtgcctgcgatggcggtagtggagacctgacgctccacgcgctgggtgtctccggcaccataggccgtgctgacgaggatgccggcaccgaggcagagaccgttgatgaagaggatggccagcgtcatcagcgggttggaggtgccgacggcggcaagggcgtcttcgccgacaaatttgcccacgatgatgctgtcggcggcgttataagtgagctggaacaggttgcccagcaccagcgggatggtgaatttgaccagaaggggcgtgatggctccggtcgtcatgtcttttgtcatggatctcttctctttttctttttataatatgttctggcgtgcgctgaacacggccagtgccgaacggcttttgccgtttgcgataagctgggccgctgcgtgaagggcggcacctgcgctgggggaggccgggatggcatcggtgcgcaggacccgctgcgccgcccggacggcgtcggcggtggtgacggcagcgatgttgtccactacataggaattgtagttgccgggaacgaggccgaagccgatgtccgggatgccatgggagccggtgaggccgctgctcagggcctgactctcgtaaggctccacggctacgatacggacgtcattcgtccacgccttgaccgtttcgcccacgccggtgatggtgccgccgctgcccacgccgatgacgatgctgtccacgatgctggaaccctcccgcgcgatggagcgcaccagtgcaggccccgtaacccggcggtgataggtggggttgtcgtcgttgttgagccagtccatatagtaccagcccttttcggcggcggtggcttttgccagcgcccgtgcgcctgcaaggcccgcctgggccggggtatggatgatctgcgctccgaggcggagcaggctctcctgccgcatggcgggggcgtcctccggcatgaccagcgtcaccgggtggcccgccgtcagccccgccagcgtcagcgctgtggcaaaaggccctgacacggcctccacgatggtctggccgggggtcagtgccccgcgctcaagggccagcgccagcatcccctcagccagctcgtcccgcgccgtgccggtggggccgttgtagttcagataggcgtacagccgcccccgcagcccgcaggccgcaagatagccccgcagctcgacgatggggccgggcagcagggtctggtagatgttggggtagataggcacgggcggtctcctttcgcgtccgggggaaagcttacgcctataactttaacgcaaaggaaaggaagcgtcaagcggggcttgggcagaaaagagaaaaatcgggagaaaatttggcaaaatgacgcaaaaagtccttgacaagggacaccccgtctgctatactccgtatgtaaagcaaaaaacctttacaaacagcggaggtcagagcaggacagaacatggcaaaagactttgaaatgggctatctgctcgatttttacggcgaagtgctcacgcccaaacagcgcgagatgctgcgccagtattacaacgatgacctctccctcagcgagatcggagaaaacttcggcatcacccggcagggggcgcgggacgccatcaagcatggcgaaacggccctcaaggagctggaagaaaaggtcggcttcgcggcccggtaccgccgggtgcagcagacactggaagagctggagcagctggtcatcgacgcccggtttgaatgcaccggcccgaacgcccggctgaccaccaccgagtatgccgccactctgaacaagatgctggggctcatccgctccatcgacgaagtgaatgagagctgaaaactgatttgagaggagcaccgaacaatggcatttgaatctttgaccgaccgccttgccggtgtgttcaaaaagctgcgtggccacggcaaactgagcgaggcggacatcaaagccgccatgcgcgaggtccggatggccctgctggaagccgacgtcaactacaaggtggcgaaggatttctgcgcaaaggtctccgagcgcgccatgggccaggaggtcatggagagcctgacccctgcccagcaggtcgtcaagatcgtcaacgaggagctggtcgccctgatgggcggcgaggaagcgcctcgtctggtcatcaagaacaagggccagaccatcatcatgctctgcggcctgcagggcaacggtaagacgacccacgcagcaaagcttgcaaaatactacatcaagcagggccgccgccccatgctggtggcctgcgacatctaccgtccggccgctatcgaccagctgcaggtggtgggcaggcaggccggtgcgccggtcttcaccctgcccggcgaaaagccgcctgtcatcgctaaaaaggcgctggcccacgccaaggactacggcaacgacatcatcatcctcgataccgcaggccgcctgcagatcgacgaagtgctgatgcaggagctggtccagatcaaagaggctgtccccgtggacgagactctgctggtcgtggacgccatggccggtcaggacgccgtgaacgtcgccaagaccttcaacgaaacggtcggcatcgacggcatcatcctcaccaagaccgacggcgatacccgcggcggcgcagccctctcggtgctgtctgtcaccggcaagcccatcaagttccagggtaccggcgaaaagctggatgacctcgaagtcttccatcccacccgcatggcaggccggatcctcggcatgggcgatgtgctgagcctcatcgagcgcgcacaggatgccgccgacgagaagctggccgaagagaccgccaagcggatgatggaaaacaagttcgatatgaacgatatgctggcccagttcgcccagatccgcaagatgggcggcgcgggtgccatgctgagcatgatgcccggcatgtccggcatcgacgccagccagatcgacgagaaagccttcgaccgcatcgaggccatgatctactcgatgaccagggccgagcgcgaggacccctccatcatcaaccccaagcgcaagcgccgcatcgcagcgggcagcggcactcaggtgtccgacgtcaacaagctgctcaagcagtttgagatgatgcagaagatgatgaagcagctcaagaagagccccaagggctttgcccgtaagctgggcggcctgatgggaaacccgggcgcctttagaggcatgaaataattccggtatacaccccgctgtggggttgtacagatagatttaatccccgcaaaccggggaacaagaaatttttggaggatattaccatggcagttaagattcgtctgcgccgcgtcggcgccaagaaggctcccttctatcgtgttgttgttgctgacagccgcttccccc

SEQ ID NO: 866 - DNA, 8579 bp, unidentified
  source 1..8579: mol_type = unassigned DNA
atcctgaaccagctgtaccagtacacccagctgcaggataccgtgggcgtcatcatgctggccatcgaccacaaggtgccgaaagtcctcaccctgaagcagatgcttcagaagtacgtggaatttcaggacgaagtggtgcgccgccgcacccagtacgacctgaaaaaggccaaggagcgcgcccacattctggaaggcctgaagaaggccaccgacatcgtggacgagctgatcgccaccatccgcgcctgcaagggcggcatggcagaggccaaggctgccatcatggagcagttcggctttgacgacccgcaggcagatgccatcgtcaagctgcagctgggccgtctggcaggccttgagatcctgaagatcgaggaagagcttgccagcctgcaggccaagatcgagaactgggaagccattctggccgacgatgcccgggtgcttgctatcgtcaaggaagagctgctggaaatgaagaagcgcttcggcgacgagcgccgcaccgagatccagtccgtgaccggcgaggtggatatcgaggatctgatcgccgaggagcagtgcgtctataccctgaccgaagccggttatatcaagcgtcagctcaaggccacctatcaggcacagcggcgcggcggacgcggcatctccggcatgacccgcaaggaagaggatatcgtgcaggagatgttcgtaggctccacccacgactatgtgctctttgtcaccgaccggggccgtctgttccgcatcaagggctacaccattgccgagggcagccgcaccagcaagggcagcaacatcgtcaacctgctgcagctggccgagggcgaaaaggtcaccaacatgatctgccagtcgaaggaagccgacaccgagggcggctttgtgaccatggtcacgaagcagggcctcatcaagcgcaccccgctggaacagtatgccaacatccgcaagtccggcctgatcggcattgccctgaacgagggcgacgctctggcatggacccgcctgacctccggccacgatatgctcatcgttgccacccgcaacggtcaggccatccgcttcaacgaagccgatgcacgtcccatgggccgcagcggccacggcgtgcgcgccatccgtctggccgagggcgatgaagttgtgggcgtgtgcatctgccgcgagggcggcacggtgctcaccgtcaccgagaacggcaagggccgccggtcggacatcgacacctaccgcatcaccgcccgcggcggcaagggcatccgcaactacgatgtgagccgcgacaaggttgccgccgtgaagatcgtggatgacgtggacgatgtgctgctgagcagtcaggagggcatcatcatccgcctgcacgccaacgagatcccgctgcagagccgctacggctccggcgtgcgggtgatgcgcttgggtgagaacgacaaggtgatggtacttgcccgcaccgaccacgacgacgaggcccagaccgagcagatcgacacctccgatgccgatgccgaacccaccgcagagcagcttgccgccatggaagctgcggatgctgccgccgctgcagaagccccggaagcggacgataagagcgaagaataaaccttgaaaacacaataagatttgaaagaagccgccgcgcaaggatttctgcacggcggcttcttttcaaatccatccaaaccatgtataatagaaatagcgtgtgaggaataaaaataaacacagaaagtggtttaaggaacatgacagagcaaaaaaaatccccggagatcagcatcatcgtgccggtgtatcaggtggaaaaatacctgaacgaatgcattgattccattctggcacagacctttacggattttgagctgatcctggtggacgatggctccccggacaactgccctgccctgtgtgatgctgcggcagaaaaagacagccgcgtgcgggtaatccaccagcagaataaggggctgagcggggcaagaaatgccggaatcgatgttgcacggggaaattggcttggctttgtggattcggatgatatgatcgaccctaccttctgtgaaaaaatgcttcatgctgcagtgcaggctggggcggaaatggctgtgtgcgatattctgcgcatgaaagaaaataaagcactggacagttatcaggaacattgtttaaaagacgaagttctctcaagagaagaaatcgttcaccgtatccagctgtcaccgttctatatggtaatgacacgactgtgccgccgcgaagtatttgagaaaattcgttttccagaaggaaaaaattatgaagatgcattcactgcaccggaaattttggaacgggtaaataaagcagcttgtgtggcggagcctctttatcaatatcggctgcgttcgggaagcattatgcacgcggctgtaaccctgaaaaatctggaagaagtccatgcaaactatgcgctgtttcagtatacaatgaaataccgaaaatatgatgaagcctgcctgcagtatacagttacaaagcgcatcttccgtaaactcaagagaaaactgtcacaggaagaacgcaaaagcgaacaggtgcagcaggctgccgcctgtgtggcaaaagcaaaggacgagttgagccgcgcaggcggtttcacgctgcgtaatcaactggaaactgctttgtgcatcctgaatccaaaatggttctttgcgtataaatatggggtatgacagcggaaggaaaatactgtgagtgaaagaacagaaagtggaagaccggagatcagcatcatcgtgccagtgtatcaggtggaaaaatatctgaatgagtgtattgattccatcctcgctcagacctttacagattttgaactgatccttgtggacgatggctcaccagacaactgccctgccctgtgcgatgcagcagcaaaaagggacagccgcgtgcgggtgatccataagcaaaacggcggtgtaagcacagcccgcaatgcgggtctggatgcagcacagggaaattggatcgcatttgtggattcggatgatacggtggaaccggagtatctggaaaaaatgcataaggcagtgctggaaacgggtgcagattttgcaatctgcagcagtcagtgcattgatgaaacgggcaaaacgcttgcgggcggagaacatcgccttttgaacgagtttttgccgcaggaggaagttctgcgccggatggtggtgtcggattttcaggttccgtggaataagctttatcgccgaaaactgctggaaaatctgcgctatccagaaaacaaggcgtttgaagatacctgtctcatgccggtcatttacgcaagagcggcttctgcctgcggtgtatgggattttttatacaattaccgcatcgttaccggcagtgccatgcaccgcaagactaccttgaaaacactggactgggtggaagcatggtaccgcctgtttgatgtgctgtaccaaaacggcatccgggatgctttgtgtgcagcctatcgcccgattttgactgccgtgtgggatatctggctgcacctgacaccggaagagcgcaaaagcccccggatgaaggaagcctttgcgtatgagcgtacagcccgccatcggctgatgcaagcccgcggcgtaacactaaaaaatttgtgggcggcagtggtctgcgctgcatcggcctgcagttatctggatctatgccgcaaaaggtcggaaagacggcagaaaacgacctgaagcaatgaggagtttattgtgcaggaacaacataaaaaacagccggagatcagcatcatcgtgccggtatataagacagagcgttttctgagcgcctgcatctcttccatccttgcccagaccttcacggattttgagctgatcctggtggacgatggctctccggacagctgccctgctttgtgcgatgccgcagcggcaaaggacagccgcatccgggtcatccaccagaagaatcgtggcctgagcgtggcacgcaatgccgggctggacgcggcagagggcgaatggatcgcctttgtggattcagacgacatcatcacgccggacttctgcgcaaagctttaccatgcggcgcaggaggccggtgcacagatggccgtgtgcaattaccggcaggtggacgaagccctgacccccatccggaagcagtatctgcatgtgcggcgggaggtgctgaccccggagcaggcgttggagcacagcacccttctgccctacatggtggtgtggaacaagctgtaccaccgcagcatttttacgcagctgcgctttgcagagggcaagctgaacgaggacaccctgctgatcgcctacgcctacgaaaaagcggacagaatcgctaatatcccggatgcgctgtacctttaccgcaaggtggcgggcagcatcgtcaacagcaaagtcaccctgcgcaatctcgaccgtgtggaagcaaactataccgtgttcgagtgcgtccgccgccatggcatcacgggttcgctgtgtgagctgtactgggcactgctgcactccctgatcgatgtgggaatgcacctgaccgccgaagagcgccggagtgcccggatgcagcaggcgcgggagtacgagcgctgcgcccgccgggccttgcgtcaggaacatgctgttaccctgagggcactgggcaacaccctgtgttttattatttcacaggactggtattttgcccgccgatggaaaaataccgtgtaaccgcgcaggtttgtctggacttccctgcaaagatatgctacaatggcaaaacaatcacaaatacccgtgggggagtagcaggcgcttttgcagggcgcagcaagtcaacatgatgaccgttggttccggtctggcttgctttcatttgcgagactcatgtgtttttggcgcatagaacagcgcccgtgcacatggagttggtttcaaaaaaatcacccggtcccggacgtacatgtgcgcccgggaccgggttttgtattgcccgatattctggtcagattcaggaggcagacaatatggaatggagctttgtatttttcctcaacagtgccctgctgggcgtgggccttgcaatggatgcgttctcggtgtccatggcaaacggcttgcacgacccccgcatgagcaggggaaccatgtgcaggatcgcgggcacctttgccctttttcaggccgtgatgcccatgacgggctgggtgtgcgtgcacaccattgtggagctgttctcttcgtttgaaaaattcatcccgtggatcgcgctggcactgctgggctacatcggcggcaaaatgctggtggatggcatcaagggcgaggaagccgaagaggccgcagagctgagtgcgggtgcactgctcatgcagggcatcgccaccagcattgatgcgctttcggtgggcttcaccatttcggaatacggctggctgatggcacttgcggcatcgctcatcattgcggtggtcaccttctttatctgcatggcgggcctgcgcatcggcaaaaagtttggcaccaagctctccggcaaggcatccattctgggcggcatcatcctcattggcattggtctggaaatttttatttccggggtgttctgaaattcagacagcataaaacaaaagggcacggcgctgcaatgcgctgtgccctttcgttttataaaatgttccacatagaacaattacttttccggctcaaaataatcggcatattcctcggtcagcttggagccaagccgccggatgccgccgtacaggtgccgttccaccaacggttcaaaggcggaaaggtcgcaccgctcgatggcgttcatcaggttgcggtggtctgcgatcacctcggcaaggccgccggtggtcatggtgtccagcatccggaagcggctgtagtcggcgtgggcgttctgcagggtgctccacaggtacattttatccatggccgcaaaccatgtcccgtgcagggcacggtcggcctcgtacagcttgttgtaatccgggctctccatggccgcaagggcttcgtaggcttccacccgcctgcggatcaacgcccgctgctccggggtgcaccggggcgaaaaatcccgcaatacgcgggcttccacggcggtgcgctcgtagatcagttcgtccacgatgcggcggttcagccgggtaacggtggtgcccttgtaaggcacaatctttaccagcccgttttcctgcagcttctgcagcaccacccggatcagggtgcgcggtgcgccaaagcgggcacagagcggattttcgctcagcgaagagccggggcggatggtcaggtcaatgatctcccgctccagcacagcatagatctcagcatcagttttgtattgttccatacctctcacctaatggaaatgcattattcttcaaacggtttccagaacgcaccctccggcagcggcagcgtaaatgccatgggctttccggtctccgggtgcaaaaactgcaggccgcagctctgcagggcaatgctgccttttacgcggcttccgtatttgccgtctccggccagcggatgcttccgggatgcaaactgcacccggatctgatgggtgcggccggtgtgcagagtgatctcagcaaggctcatctctcctgccgttttcacgatgcggtattccagcacggcttcccgcacgcccttgcgggggcggctgaccgggaatacccggccccggcggctgtccttgaacagccagtcccgcagggtgccttcggcgggcagtgcttcgtccggcccgcctgcaatgacggcccgatatcgcttgatgaactgcggcacttccggcttcccttcggccctgccatcctgcacagcgtaggcgttctggctctgggtgatttgacggctgagtgcggccgcagccccgggcgttctggcaaacaccatcaggccggacacacccgtgtccaaccggtgcaccacccctacaaaggcatccggctggccccacagctgccgcagggctgcgggcacgccctcttcgctggaaagtccggcgggcttgtccagcaccacaagggcggcatcttcgtacaggatgttcacagcctgccctcggcgatcagggccttgagcttcaggataccggcaatggtcttgccgtcccggatctcgccgctcatgaccatctcataagctttatccagcggcacacggtcaggggtcaggaattcatcggcatccaaatgcatctgggtcttgtgcaggccggtggcgacccatgtatagatcacttcggtgtcatagcccacggtggggaaaaactggcccagagagatataattgtccgcggtcaggccgcactcctcgcccagctcccgcttggcggcttcaaaggggtcctcacccttttccagcttgccggcaggcagctcccacagctcctgctgcatggcgtagcggaactggcgcaccatgcagatggtgccgtcctcaaaatagggcagaatgcacgcaccgccgtggtgatgcaccacttcgcgttcggcggtcttgccgttttccagcagagcagtgtcttttgtcagggtaatcacccggccctcgaagagcacctcactggtgagtgttttttcgtaatgcacggtcttctccattttattaacctctttgcccggcacagcgccggttttctatggcttcagtttacggcaaaatgaggtttgttgtcaataaagagatgataaatataagaggatgggacgatttgaaatgcgcgccgcgtttgctttgcgcataatcagcggaaagaatatttataatttcgcaattctggaaaatctgcggagcttgtcggggcaaagcccctccatctgctaacgcagaccgctctgccgcttgaaagccccactggggctttcattgctacacaaacgcggattttccagaattgccttttcacaggaggggtcgtaacggaaagcagcatttgcagcgccgctttctgagaaagcgcggcgctgcgcaagccgtgactgagagggttccctcccctttttgcgaaaaaaattacaggatctggcaaagcaggcaggccaaaaccggaaaatccgcgccagtgctcactttaacgaactaaagacgtacaaaagcgctaaaaaaatttctttatttttggtgcgtttgttgagcggtttgcgtttactttatgggcggaatttgctattatagtatacaagcaatagtgcctttatggggttctccggtcccatgtggggcatattgccccgcgcaaaaggtaccaaattctgaataatggaggaagaaaaatgcctagagcaaagcaaactatggatggcaataccgctgccgcccatgtagcgtatgcctacacggacgtggctgccatctaccccattaccccgtcttctccgatggctgactctgtggaccagtggtccgcagctggccagaagaacatcttcggcaatcaggtcaaggtcgtcgagatggaatctgaggccggcgctgctggcgctgtgcacggctctctgggtgcaggtgctgttaccaccaccttcaccgctt

SEQ ID NO: 867 - DNA, 8401 bp, unidentified
  source 1..8401: mol_type = unassigned DNA
ctacttctctattcttatccagaaatcatcctctgccatacgcccctgcgtcttttctattatcataaatgtgtcataaaacggaagtccgatatcctccagcacaagcttcatcttatctcttgttcttggaaaacatcttgactcaagaaattccttatagtcattgtaatcaggattttcattaacgccaaatgcacgaaacatcagcttgtctgtataattctttattctcacaagctgctttgcgtcatcaacatctatcagtgtacagatgtcatccttatacatataaaacattctgacaggaaattctttctccggtattatcagtctgttcacataatcaggataatcattaatcatcttagaaagtaaaacaattggacctgtaatcttagcattttctttttcccatcgttctattgtcggtttcgatgttcctacaagactggcaaattctttctgtgtcagtccaagattctttcgcagattcttaatatcctcagatgtaatataatcttttaatgcaaacattgtgtcacttcctttcagtccttgataaataatgacttttcataacccaagtgtaccatgtacacattttattgtaaacaaaaagtcgttaaaatgatggtttttatttataataatctcatcattttaacgactttattcatataaaacatttcaatttcttaattatccagatttattggtaactttaattctctattagaattatatagcctccagcgcctgtgcaatatccgcaatcagatccttcttatcctcaagaccacatgagatacggataagtcctgctggaattccagcggctttaagctgctcatcattcatctgtctgtgtgttgatgttgcagggttaaggcagcatgttctcgcatctgctacatgagtttcgatagctgcaagctttaaattcttcataaacttctctgcagcctctcttccaccctttaactcaaatgaaactactccgcagccgccatctggcatgtacttcttagctgtctcatagtacttgttagaaggaagtcccggataattaacgaattcaaccttatcctgcttctcaagaaattctgcaacagcctgtccgttttcaacatgtcttggcatacgcacatgaagtgattcaagaccaagatttaatataaatgcattctgtggagactgtatacagcctaaatctctcataagctgcgaagtacattttgttataaatgcgccttctttaccgaacttctcggcatatgtaattccatgatatgattcatcaggtgtgcagagtccagggaatttgtctgcatgtgccatccagtcaaactttccgctgtctacaatagctccaccgactgctgctccatgtccgtccatatatttagttgttgaatgtgttacaatatctgctccccattcaattggtctgcaattaactggtgttgggaatgtattatcaacgataagtggtacaccgtgtgcatgtgctgcatttgcaaacttctcaatatctaatactgtaagtgcaggattggcaattgtctcaccaaatactgctcttgtgttgtccttgaacgctgcattaagttcttcctctgtgcagtcagggtcaacaaatgttgcttcaattcccatcttcttcaaagtaacatcaataaggttaaatgttcctccatatatagaagatgatgctactatatggcttccagcttcgcaaatattaaataaagcgaagaaattagctgcctgtcctgatgaagtaagcattgctgcacttccaccttcaagggctgcaatcttagctgccacataatcattagttggattctgaagtcttgtgtagaaatatccacttgcttcaaggtcaaaaagttttcccatatcctcacttgtatcatacttaaatgtagtagactggattataggaatctgtcttggttcaccatttccaggagtatagcctgcctggacgcattttgtgttaattgaataattatccatatttccctccggctttatatgtttacatgacatgaattatatcacaaactcaaagcatataacagcacattttagaaatcgggctacacatttattaacataatatgttatgatatcaattatgctattatcagtttttaataatattgtataataattaagaggttttattatgaataatcagtcagcgactatgaacacaaaagataatccgcttggatataaaaaagaatccactctgcttgttggttttgcaattccatgcattatttcaatgcttgtgacagcgctttacaatattgtcgaccagatatttatcggtcagggaatcggcatgcttggaaatgctgcgactaatattgcatttccactttcaacaacatgtacagctatatcgcttcttctcggtataggaagcgcgactaatttctcgctgtatcttggtgccggtgaaaagaacgaatctgaaaaatatgccggcaatggtattgtgcttatggcattgtttggaatatttctgttccttgtaaccactatattcttaacacctatgcttaaattctttggtgcaactaaagatgtacttccttatgcaaaggcatatacaagaatcactgcgtttggtttcccattcttaattgcaaacactggtatgagcaagcttattcttgcagacggaagcccgcgatattccatgatatctatgcttgctggtgccatagtaaatactattcttgacccattgtttatctttgtctttaacatgggaatgactggtgctgctcttgcaacaattacaggtcagataatttcattttcaatcagcctgcgttatatgtttcattttaaaacaattaaacttagcagggaaagttttattgtttctgctgcccactgtaagaaaatatttattcttggagcaagtgcctgctttaaccagattgcaatgaccgttgtacagattgttatgaacaatacgctgtcacactacggcgcacagtctgtatatggcggtgacattcctcttgcctgcgccggaattataactaaggttaatatgattttcatgtcatttgttatcggaatatcccagggaacacagcctgttataggttttaactatggtgcaaagaagtacgcccgtgtaagaaagacttatcttcttgcacttggtgcagcttctgccctgtctttaatcgcatttgcatgcttccagatattcccaagacagattatcagcatatttggtaacggaagtgacctgtactttaaattctctgaaagatatttcagaatatatatgtttctgacaattgttaatggcatccagcctgtaacttccaatttctttaactcaattggcaaatcacagcttggtgtatttatgtcgcttacaaggcagattattttcctgctgccacttatcattatatttcctatattcatgggaattgacggtgttatgtatgccggacctatagcagacgctgccgctgctatcgtatgcggatactttactataagagaattaaaagaattaaaaaagctggaaatcgatttaactaaatgttaaaatataagttatgcgtgtattcgtatatttaacggattatttttaaaaggatttttaacatggataattttaatgctcgatatgaaaaagaacttgcctatcaggaaattacctcgaataaatacactctttacggtattctgctatttataggagttgaattactgatatggcttcttaatataattggattttttgaacttgataaccagataatgtctgctgttataggttcatctattgtattatttatccccataatccttatcatgataaaaggagatttatctaagcctgcctacaaatacattgccatgactcagatatgtataattacaggaactataattacatttttatcatatcacgctattcttctgtatgttcttccgcttttatttgctggacattacagaaaacgttctgtgctatggtacacatatgtattaagtgtattaatgctttttgtaagttcgattcttaattattattacggaataatggataccaatctgcttattgccggaacacaccagcgcaaatggtatcttgaccttatagcaaacggaggaagctttacatataatgcaaatgctgtatttataatactaatctttgcatgtataccccgcagtatgatactgcttgtatttacattcatgatacagtatatagttaccgccagcctgcatgatgccgcaagaattgcccagcttacatatcttaaagaaaccgattctttaaccaggcttttcaacaagaataaatacaacgaaatggtatcaatgtattatcctaatgtaaataatattactgttattttctgggatcttaacaacctgaaaattattaatgacacttatggacatgaatatggtgataaagcactttccgcactagcttctgtattatacgcccattcagatgaacaatgccgccgtgtttacagatttggtggtgatgaatttgtcatgataattgataacccacatgacggtgaagctgaactaataatatctgctgttaaagatgaacttgtgaaatgcagttatgatatttcaatagaaatatcaagtgctgtcggtgttgcatccggcaacggaagtgatattattgaaatagtaaaaaatgctgactcagcaatgtacgctgacaaacagctctaccaccatcggtgattgtgaaatactgtatatgcgttgatttatgccgccagcttaactgctggcggttttttctgatttttggggatgggtggtaaatcatggctttatgagaaaaggcttcctataagaaaataaatatatctcatcttataggctgattttccctcttacgctgtctaaaatatggttttgaagttgaatttcctataatgttcatgattatagttactttataggtgcaatttacaagtaacatagtagtcgatgtgatttttgacctataaaggctttagatttacgactactgataggtatcatatgtttttcaatcaacagtcttaatatatcttcttctttttgttgttccaatacaggctaataactccttattcactaattcatttaatagttgtcttgttctatgaccttttaatccaatcttctctgctatttgttccgtactatattcaacacctatatccatatttgttaaaatctgtttgtgtcttgctgataaatctgacctattcatgttttttgaatctgctgatttttctgctaattcttcatcagattccttttccatcttcatcacaagcattatgaatttaataatgtatagggaagtaaaaacttcctcgtgtatcaaccacgaaaaagggtggtacccaaaagtaccaccctacagactataaatctatcctacatactctaaaaccgactattttctgccaagaatcttagacattcctgttgccacaaaaagatatacaaccatattaactactgatttaagaagaagtcctggtgccgaagctaatcctgctgcaaagctgcctgctattattgcaccaaatacaacatatcctaatgtcatgaaaagtaatgtaacaactgcaccaacaattccttttactgaaataaccttacatctgtcaaacttacttttcatattgccaaatattgcacatgctattattggcatgattgtctttattataagtgttggaactgcccatactgcaaatccagttaatatatctgccatcgcagaaccaattcctcctgcgagtgcgccaacaactggtccgaagaaaaatgcacatataagtattacgctgtctcccaaatgtgcatatcccaaaggaataggaatctgtaccaccattgttgcaacacatgtaagtgccataaatactgctgttatacacatctgtgttacagtaatatgaaatccttctttcttaatcccctgctgtactaactgtgtctgttgtgcttccattttatctgcctcctatatcaacatactttaattgcacataagaataacagataaagtgacatgtgtacattgtcattttgagttaaatttatatggtcagatttaaaatctattctccctcttctttcttaatcaattcatccataagttctttataatctgaggcttcaagcggaagttctacttttatgcctttgcatgctgaataataagcactggcacacaacatgagtgaattaatcccctcactgcccttaactgtcagataagactcatcacctttaagcaccgcatttgcaaaattttcaaataactgtgcatatggctcagatgccttctcgaactgtatagtttcctctgtaaatgtcatattctgccttgagttgacttcttcgttcttgatatactcacatacatctctgtgtcttgtaatggtgagcgtgtcgtcttccagaagaattcttgccttcgttcctataatctcaagtcgctcttcgtgacaggcttcgcctgtggatagtataaatgtgcctgtctttccattgtcgtattccataacgatagtagcctcatcatctactataaaatcgttgtattttccaaatggaatcgctgcaaaaagtttctgtggcattccaaacaggtactgatacatatcaagaatatgctgtccctgattgataagtgctccaccgccttcacctgcaaagctgcttctccatgagccagatttatgatagtatgaggttcttaaatatcgtgaattaataagacatactctctttatatctcctaattcaccattatctatcatctgcttaatcctgatgtatttagggtaaagcctctgatgaaatatcattccatatattctgccactttcactggcagccttctgcattgcaagtgcttcacctatatctgccgctgccggcttatcacatagcactgcttttccctttgcaaatgctttcaaagccagttctttatgagttttatgaggagttgctataataactgcatcataacatgattctcctgtctcaaataattcttctgcactcctgaatatccttgcattatcaccatcagtattaacaagtgactcgccccattcaataagttcatctcttcttataaccacagctgataatttcatatgtggaacttctcccgctgttatcattctggcatatttctttccaacacttcctacacctataagtgccacctttaacaattctttctgcataccatgtaccccgtttcattatattaactatgcaccacttctcctgtttccacagccttcttcagtaagatggcggcatacgcatctgcaagggcatcctccatactatatggcgcagacgcatttcctctgctatactctgccgtattcttcatcatcactgcgattgctgtttcatcttctgacagaccacacaatccaaattccggctcatatataattttattattaaatgaaattttcttaatttcacgaatcttctcaaaattaggattagagtttcctgtattaatcacatgggaatccgttatgattctgccagtctgaccttcattattctcatcaagataatatacacattcatcaataagttcgcctcttaccccctgaattttaagcgtattctttctgattggtgacctgtactgctccgaatcaaaatcataccatgccactttcccgctttcgaattcaaatgtggcaacgcatcttttctttcctgcaatcctgccatcagtgaacttatcatatcttgtaagagtctgcgttgtcgggaattcgtatgtcttggctgaaactgtatacttctctcccggcttaacaccaagaaaagctcttataagacttattccatgatattcatgcgccagtgacacatttgcacagctgacatcaccaataattccttcattaataagctttaatgatgctttaatattaggatactccctgtactgttcagcaaccacctgttttttaccacatttgtaataagaatacagtttattaagcgaatccgtatcaagtgccgccggagtctctgataaaacagttattccacggtcaagccattccattgaaacatcacatatagcgtccttcttaacagccacaactgcaaaatccggtttatatgccacgcattcttctatagatgtagttgtatgtatctgatactgaccggcaattaagtccgctttctcctgcgtcctgcaatacatcgcatcaagactgaatatttctggcagagcctttgctacgcgtacataatataaggcccgccagcctgagccgattataataaaatgatattttgccat

SEQ ID NO: 868 - DNA, 9550 bp, unidentified
  source 1..9550: mol_type = unassigned DNA
ttaataaatttctattattgttttctctttcacaacaccgttgtccaatgccgattcaagatatctgtatctcacccctgaagctattttgaagtgttccaagatcttatccagacgttgattaataaaagtacctgtaaagcaatatttctttaataatggattaacaatacggaactctacgtcaaaacgcttgctcaaagttcttaaagcatcttcaagaggagtatctcgataaatgatccttccacttttccaagcaatatcagattcaacaaaagtagttgtacacaaaagtttctcatccaataaattataaatcaccttctgtccgggttgcatactataagtaacctccctgcctttctgctgacaatggaattttactctacctgtcaccaaagtagcagctacaaacttatcatccggataagcatccacgttaaattcagtacctaaaacctctaattcaatcccctttcctacatcgactaagaatttccgtccattatccttttgtactgaaaaataagcttctccgagcaattcaacctttcgatattctccttcaaaagacactggatattttagataagaagcagaattcagccatacccaagtaccatccggtaactccacttttgtcatcatccccggattagaccgaatttcgacataacgatcataatttttatcttgattaaatacaaaatagaagaaagataagaataaaggaataaataacacagctgctgctcttatcccccattcccaccagtttattttcttcctttttgacaatctcttatccagcttcaccaatgcctgtttaggatctatctgcttcacggtatctattatatctgttacgtggtgtatgtaacaaatctgtttagctatttttctgttctcttcagagagggaaatccaattttctacctcttctttttctttctctcctagtgtaccggaaaaataaaggagtaaaagagcctcatctatattttcatgtaattccatcatcttttatgttcattttattaagaagacggaatacttcaattagcccctaaacaaaaatgcaacttttttaattaaaagctgcatttttattttaagactcaaaaacgaatcggctatccttagagaaaataagggaatatgattgtaatcaacggtaaatagtcttttagttctacacgtaaaagtctcaatgcttgctggatacgatactccactaattttatggaaacgtttaattctttcgcaatctctttatatgttttatcttgataacggctcatctcaaaagttatacgataggagtccggcaatcgcatcacggccttttctattttcgccatcaattcctccactacataaaaatcaggatcttcaaaacttgtctgcatttctttagcaaacatatgctcataacaacgtctttttgtctgattcttacttattaaatccaagcatctgtttctgaccgccataaacaaataacttcgcaaagaagtttctatgatctggaattctctgttttcccatagccatgtcatgatatccaaaacaacttcttcagcatcttctataggaatatagtacttcccgaaggcacatagtatggaataatacttcaaaaataaagtatcaaaagcctttctatctccttttctaaaaagagaataaagctcaatatcttcatctatcatacgatttgtctccttattcactttacaaatttatatatttaaaaatccctaaacaaacaattgcatcttttttaatagacaataaaaaaagtcagcacaaaatgaagcaataaagaaacaactttgttacatatacccacatatatcctgattatatcactatccctttctaaagtattttcacttttatgcaaaaaaactttggttttatgcatcttttctccaaaataatgcatacttttgcgccattcttagaataattatacaatgaagaagaaagcaaatcggttagacgccatcaaaatgattatctcaagcaaggaggtcggttcgcaggaagaactgctgcaagagttgaaccgcgaaggcttcgaactgacacaggccaccctctcccgcgacttgaaacaactgaaagtagccaaagctgccagtatgaacgggaagtacgtatacgtgctgccgaacaacattatgtataaacgctccaccgatcagagtgccggcgaaatgttgcgaagtaacggattcatttccttgcaattttcaggcaacatcgccgttatccgcacccgcccgggttacgccagcagtatggcttacgatatcgacaacaatgaattcagcgaaatactgggaaccattgccggcgatgatactatcatgttggtgttgcgtgaaggagttgcgacaagcaagattcgccagcttttgtcactcatcattccgaacattgaataactatacatatttatatatataaagaaatggacactcaacaaatagatgttatggtagccgacgcctcacatgaggtatacgttgacactattttggaaactatcagaaatgctgccgccgtgcgaggaacgggaatcgcagaacgcacacacgaatacgtagcgacaaagatgaaagaaggtaaagcaatcattgctctctgtggtgacacattcgccggattcacctatatcgaatcatggggaaacaagcaatacgtggctacctccggtctgatcgtacatcccgatttccgtggtttggggctggcaaaacgcatcaaacaggcttccttccaactggcacgcctccgttggccgaaagctaagattttcagcttgacctccggagcagctgttatgaaaatgaacaccgaactgggatacgtccctgtcaccttcaacgaactgacagacgacgaatctttctggaaaggatgcgaaggatgtatcaaccatgacatcctgaaagctaaaaaccgtaagttctgcatctgcacagctatgctgtacgacccgacagatccacggaacattaaaaaagaacaagaaagaaataacatttaaaagatacagcactatggaagaaaagaagaaaaaagtagtggtggcattcagcggcggactggacacatcgttcaccgtcatgtacctcgccaaagaaaaaggttatgaagtatatgcagcttgtgccaatacgggtggtttcagcgaagaacaactgaaaacaaacgaagaaaatgcctataaactgggagcggtaaaatacgtaacgctggacgttactcaggaatactacgaaaagagtctgaaatacatggttttcggaaatgtgctgcgtaacggtacttatcctatttcggtcagctccgaacgtatcttccaggcattggctatcgcacgttatgccaacgaaatcggtgcggatgccattgcccacggttctaccggagcaggtaatgaccagattcgtttcgacatgactttcctcgtactggcgccgaacgtagaaatcatcacactgacccgtgatatggcattgagtcgtcaggaagaaattgactacttgaacaaacatggtttcaacgcggacttcaccaaactgaaatattcatataacgtaggtctgtggggtacctctatttgtggtggtgaaatcctcgactccgcacaaggactgcccgaaacagcttacctgaaacacgtagaaaaggaaggcagcgaacaactccgcctgactttcgaaaaaggagaactgaaagctgtcaacgatgagaaattcgatgacccgatcaaagcgatccagaaggtagaagagatcggcgccgcttacggtatcggccgtgacatgcatgtgggcgacacaattatcggtatcaaaggccgcgtaggtttcgaagccgccgccccgatgctgattatcggtgctcaccgtttccttgagaaatacacattgagcaaatggcagcagtactggaaagaccaggtagccaactggtacggtatgttcctccacgaaagccaatatctggaaccggttatgcgtgatatcgaagcgatgttgcaggaaagccagcgcaacgtaaacggtacagcgattctcgaactccgcccgctttctttctctaccgtaggtgtagaatcggaagacgacctcgtgaaaacgaaattcggagaatatggtgaaatgcaaaaaggttggactgccgaggatgcaaaaggctttatcaaggtaacttccactccgttacgtgtttactataacaaccataaagacgaagagatatgattaaagcaggaatcattggtggcgcaggatatacggcaggcgaactaatccgcctgttactcaaccatccggaaactgaaatcgtatttatcaacagcagcagtaatgccggaaacagaattaccgacgttcacgaaggcctgtatggcgaaacggatttaacgttcaccgaccagttacctctggacgaaatcgacgttcttttcttctgtaccgcccacggagatacaaagaaattcatggaaagtcacaacataccggaaaacctgaagattatcgacctctccatggactaccgtatcaaaagtgacgaccacgactttatctacggtctgccggaactgaaccgtcgtgccacttgtacggcgaagcacgtagccaaccccggctgttttgcaacctgcatccagcttggtttgcttccgcttgccaagaatctgatgctgactgatgatgtaatggtaaatgctattacaggaagtacgggagccggggtgaaaccgggtgctaccagtcatttcagttggagaaacaacaatatgagtgtgtacaaagcattcgaccaccaacacgttccggaaatcaagcaatcgctgaaacagttgcaaaacagcttcgattcggacatcgactttattccgtaccgtggagatttcgctcgtggtatcttcgcgacgctggtagtcaagaccaaagtagcgctggaagaaatcgttcgtatgtatgaggaatattatgcaaaagactcctttgtacacatcgtagacaagaatattgacttgaaacaagtcgttaatactaataagtgcctgatacatctggaaaaacatggtgataagctattgattatctcttgtatcgacaatttgctgaaaggcgccagtggacaagccgttcataatatgaacctgatgttcaatctggaagaaaccgtaggactacgtttgaagccttcagctttttaaaaacagaagaattatgaatttattcgacgtatatcctttatacaatatcaacattgtcaaaggtgatggctgtaaagtatgggataaaaacggaacggaatatctggacctctacggaggccatgccgttatctccatcggacatgcacatccccactatgtagcgatgatcagtaatcaggtggctaaacttggtttctactcaaactccgttatcaataagctccaacaagaggtagccgaacgactaggaaagatttccggttacgaagactacagcctgtttctgattaacagtggtgccgaagcaaacgagaatgctctgaaacttgcttctttccacaacggacgtactaagattgtatctttcaataaagcattccacggacggacgtctcttgcagtagaagcgactcacaatccttctattatcgctcctatcaacaataacggtcatgtcacctatctcccactcaacgatgtggaagcgatgaaacaggaattgtctaaaggagacacatgcgctgttatcattgaaggaatacaaggtgtaggcggtatcaagataccaaccaccgaatttatgcaggaactccgcaaagcttgcagcgaaacaggaacgatcctgattctcgatgaaattcagagcggatacgggcgtagcggtaaattcttcgctcatcaatataatgacattaagccggatatcatcactgtagccaaaggaatcggtaacggctttccaatggcaggtgtcttaatcagcccgatgtttaaaccggtatatggccagttgggaactacttttggaggaaatcacctggcatgttcggcagctctcgctgtgatggatgtcattgaacaggaaaatctggtagaaaatgctaaggcagtaggtgattacttactggaagagctgaaaaaattcccgcaaatcaaagaagtgcgcggacgcggactaatgatcggcctcgaatttgaagaaccgatcaaggaactacgcagccgtctcatctatgacgagcatgtatttaccggagcaagcggcacgaatgtacttcgcctgttacctcctctctgtctcagcatggaggaagcgaaagagttcctcgcccggttcaaaaaagtactctaaccgctcatttgattaataaacagccaacgataaaagcagcctttattagaaatttatttcttattctggctgctttttgttttttcgtaattaactgttacctttgtctgtaacaactcattaaaaacaagcgtatatgaaaatagccattatcggtgcaggaaacatgggcggttcaatagcccgtggcctggcaaaaggaagtctgatagacgattcggatatcattgtatccaatcccagtgccggaaaactagagaaactgaaaaaagaatttccgggtatctccaccaccaacaataatctggaagcagccacaggagcagacattgtcatccttgccgtcaaaccgtggtttatggaatcggtgatgcgcgagttgaaattaaaaagcaaacagatactcatctccgtagctgccggcatcagttttgaagaactggctcattatgtcgtagcaccggaaatgcccatgttccgtctgattccgaacaccgctatcagcgaactggaaagcatgacgcttgttgccgcgcgcaacacgaatgatgaacaagacaacttcatcctccggttatttagcgagatgggaacagtgatgcttatccccgaagataaaatagcggcagccaccgcattggcatcctgcggtatcgcttacgtactgaaatacattcaggcagccatgcaagccggaatcgaaatgggactccgccctaaagatgccatgcagatgatagcccaatccttaaaaggagcggccgcactgattcagaacaacgacacccaccccagcgtagaaatcgacaaagtaaccactccgggcggaatcaccatcaagggtatcaatgaattagaacacaacggcttcacctctgctattatcaaagccatgaaagcttccaaataacaccatagaattattaatcataaaatactaaccatttgtatgaatgaacaaattaaacagatagcagaacgcctccgcggattacgtgatgtattggaactgaccgcagaggatatcgcccgcgatagtgacatttctgctgaagaataccggcttgcggaaacaggagattacgacatctctgtcagcatgttacaaaaaatagcccgtacgtataatgtagccctcgacgctctgatgtttggcgaagaacctaaaatgagcagctactttgtgactcgtgccggcaaaggtatcagcattgaacgtaccaaagcttataaataccagtcactggcttcaggattcatgaaccgtaccgccgatccgttcatcgttaccgttgaaccgaaagcaatcgacgagccgatccattataacaaacataatggacaggaattcaaccttgtcatcgaaggacgtatgcttatcaacatcgaaggcaaagaaatcatcctcaatcaaggagacagtatttattttaactctaaacttccacatggcatgaaagcgctcgatggcaaaacggtacgttttctggcagtaattatgtaacaacatcatggtagaaagatttttatcacagacctctttcagctcacaagaggacttcaacaagaatttgaaaataaacgtcccggagaacttcaacttcggttatgacgtagtagatgcctgggcagccgaacaacctgacaagaacgctttactttggacaaatgacaaaggcgaaagtcgccaattctcatttgccgacatgaaacgatctacggacatgaccgcttcttacttccagagcctgggtatcggccgtggcgacatggtgatgctgattctgaaacgccgttatgagttctggtatagcaccatcgctcttcacaaactaggagcaactgtcattccggctactcacttgctgaccaagaaggatattatctatcgctgcaatgctgccgacatcaaaatgatcgtagctgccggcgaaggaatcatcctgcaacatatcaaagaggctcttcccgaatgtcccacggttgaaaagttagtcagtgtcggtccggaaatcccggaaggcttcgaagatttccatcagggtatcgaaaatgctgctccgtttgtacgtccgcgccatgcgaatactaatgatgacatctctctgatgtattttacttccggcactaccggcgaacctaagatggtggcacatgactttacttatccgttaggtcatatcgttaccggtagtttttggcacaacttggatgaaaatagccttcacctcaccattgccgataccggctggggaaaagcagtatggggaaaactctacggacagtggattgccggagccaatatcttcgtctacgaccacgagaagtttaccccggcagctattctggaaaaaatccaggaatatcatgtcacctctctctgtgcacctcctaccatcttccggttcttgattcacgaagacctgacaaagtacgacttgtcttcacttaaatattgcaccattgccggagaggcattgaaccctgccgtatttgaaactttcaagaagctgacgggtatcaaactgatggaaggtttcggacaaacagaaacaaccctcaccatcgccaccatgccttggatggaaccgaaaccgggaagcatggggctgccgaatcctcaatatgatgtagacttgatcaaccatgaaggtcgctctgttgaagcgggtgaacaaggacaaattgtaatccgcaccagcaaaggtaaacctctcggacttttcaaagaatactaccgggatgcggaacgtactcatgaagcttggcacgatggtatttattacaccggcgatgttgcctggaaagatgaagacggatacctgtggtttgtcggtcgtgcagacgacgttatcaagagttccggttaccgcatcggcccattcgaagtggaaagtgcgttgatgactcatccggctgttgtggaatgtgccattaccggagtacccgacgagattcgcggtcaggtagtaaaagctacgattgttctatccaaagactataaagcacgtgccggagaagaactgattaaggaattgcagaaccacgtgaagaaagtgactgctccttataaatatccgcgtgtgatcgagtttgtagaagagcttcctaagacaatcagcggtaagatccgccgggtggagattcgcgaaaacgataagaagtaa

SEQ ID NO: 869 - DNA, 47132 bp, unidentified
  source 1..47132: mol_type = unassigned DNA
atcttggaaagaagatggcagcatcatcaacaagcagtgcttatactatatataatgataagcagatgaatacgcagtattcagagtataatactaagatatctgcggcagaagacaaggttactacatgggaagattattattatagtaagttctcagcaatggaatcagcgcttgccaagatgaatgcgcagtcatcatcgttatctggactttttggataatagtacatattaacaaccgcataagcatggaagcttatgggaaatgaggaaaacatggcatttaatcagaatatagcacaggaatataacagaaataagattcttacagcaagtcctgcagaacttacacttatgctttatgaaggggctattaagttctgtaatatagccctgatagctatagaaaagggtgatttacagaaagctcatactaatattaagaaggctgaagatataattacagagtttaaggtgacacttaatcataaatatcctgttgcagaagattttgagaaaatatatgactacatatactcccttttagttaatgctaatgttaagaaagatccagagatacttaatcaggcattagttgaaataagaggcatgagagatacttggaaagaggttatgaaccgtacaaggggaatgaaccagtaggagattaatatatgactactaattatcttcagatgatgatagacagccttaataagaagaaaggaattcttatcagaattatagagcttaatgaagagcagaatcagattctttcagaagaaacattgaatggtgatgcatttgatgataatatgaaagcaaaaggaagttgcattgatgagcttgatttgctggatgagggatttcagtcattatatgacagaattaaggaagagcttgctggcaataaaaccaaatacagcagtgaaatagctgcaatgaaacagcttattaaggaagttactgagttaggtgctaagattgaagtgcaggaagcccataataaagtaaaggtagaagcaatgttcagaagagaaagacaggaacacagagaagcaaagagaagtgcttctatggcgaagtcatattatcagaatatgagtaagttaagcaatgaacctcagtttatggacaccaagcagtaacttaaaaaagttatattacgggctaaagtttcaggacttaagtccgatatataaagtacagggaaacagatagtttcctgtaaaccataacaagatgcttcaaggatgttgcatctaaattaatttcaaggaggaaaatattatggtagtacaacacaatttatcagcaatgaacacaaacagacagatgggtacagtttctagcgcactccagaagtcaacagagaagttatcatcaggttacaagattaaccgtgctggtgatgatgcagctggtctttcaatctcagagaagatgagaagccagatcagaggtcttaacaaggcttcttctaatgcagaagatggtatttcacttattcaggtagctgaaggtgctcttaacgagacacattctatcttacagagaatgaatgagttagcaacacaggctgctaacgatactaacacaacatctgatagagaagctattcagtctgagattacacagttaacttcagagcttgatagaatctactctacaacacagttcaacacaatgaatctgttagatggttcattctcaggaaagagccttcaggttggttcactttctggtcagattattggtatctcaatcggtaagatgaatgcttctaacctcggagtttcagctactaagatttcagtaagctctaatgcaacagctggtacttcaatgtctatcattcaggctgctattactaaggtttctacagagagatctaagttaggtgctcttcagaacagacttgagcatacaatcaacaacctggatacaacatctgagaatactcaggctgctgagtcacgtatccgtgatacagatatggcatctgagatggttgagtacagcaagaacaacatcctttcacaggctggacagtcaatgcttgctcaggcaaatcagtcaacacagggagtactttcacttctcggttaataacaactactactataagcagaagagccggtgcttgcaccggctctttttgcaaccagacaaggatattaattacagacaggggaacatacatatatggaatttgataaaagtttttttgaagatgagataagagatggtttctatgtatcagcagagatgaagcatgcatgggcagcgcagcttgaggtactcaatgatgttgataaagcatgcaaagagaatggaatccagtattttgcagagtggggaacacttctcggagcagtaagacatcatggattcataccatgggatgatgatatggatatatgtatgaaaagacctgattttaataaatttgttaaaaatgttaagaatattatgccggaaggttatcagatatataatatagaaagtgataaggataatgataatctgctggcaagaattattagtgggagaacaatagatttcagtgcgaaataccttgataaatatcatggctttccatatgttgcggggatagacatatttccgctggattttattgcaccggacagggaagaagatgattatttatgtactgttatagatattgtcaatacagtagccaagtttatgagaatgaaagattcagagaatgaagctattgaaggagaggacttagaaaagctgaatagtaatcttttaagtatagaacagttatgcggagtaagaattgacagggaaaaagatataatacagcaattaaatatacttgtagaccagttatgtagcctttatacagaagacgaaacagaggaactgactataagggctatatggcagaagaataaagcctataaattccgtaattcgtattataagaaagcggtcaggattccttttgaaaatattacaattcctgtaccatttggttatgatgcaattcttaaacaaaagtacggggattacatgaaactggttcatacatgggattcacatgattatccattctttgataaacagagagatattatcagggaaaaatcagagtcaggtcttaatgaatttaaagatacgcttgaagatgttataacatttaaggaacacgttgcaatattgcgcggaaagagaaaagtgttaaaggcgctggataataaaaagaaaaagaaaaatgttgtgttcatgccatttaagccagagcattgggatgcaatggatgggctgtggagagagtataaggacagggaagatgtagatgtaaaggttgtttctgttccatattattataagaattatgatggaactgttgaacaatacagtacaagcgcagagtatccggactatattaatgtgctgtcagaggatgaatataattatgagaaagatgatccggatgaaataattattcagaatccatatgacggatataatgttgcagcaactatacacccacgttattatgtcaggaatctgcttatgcatacagataagcttatatatataccttattttacgacagatgagattgatgcacaggatatgagagcagatgtcagcatgaattcgtatgtgacaatgccgggagtggtatatgctgatgaagttatattgcagtcagagaatataaggaaactgtatataagaaagctcacaggattttttggagaagaaagcaggcatctgtgggagaaccagcttaactcgaatggtgcgcagtatctggtaaatgataataataatccgttaagatataacaggatacctggaaaatggagaaatcaggcagtcagaagcgatggaagttataagaaaataatactttactatataagtactaatggtgtgcttgaacataagcatgaaatgtttgaaaaaatcggacgtacaatggatgtgtttaaacaatataaagaagatatcgtgtgcctacttgcgtttgagaataatatggaagaggttctggagggggagaattcagaacttcttatggattatcagtgcgctttaagaaagtacaatgaatatatcttgggcaatggagagttaatggacgctgtaaaggcgtgcgatgcattttatggtgaggcaggagcagaggcacagatgtgtagaaatgctaataagccggttatgatagaaaatgtatatttataacgcacaaacttaagatgccatgaaaaacaggtaagaatggagatattatgctgcagtttccagacagttattttgaagatgaagtaagagatggattctatgttccatcaatgataaagagagcatgggctacggctctggatgtattatgcgaggtggatcgcatatgctgtaagtacaatataaaatattatgcagagtggggaacacttcttggagcagtccgccatgctggatttattccatgggatgatgatctggatattggaatgatgagaactgactatagaaaattctgtgaggtggcgcctaaagaatttaatgaaagttttcagatatttacatttaacacgcagaaagattttcatcattttcttgcaagggtggtgtgcaaaaacagaatatgctttgaggatgaacatttaagaaggttccatggatttccatatatagcaggactggatatatttgtccatgataatgtctcagatgatgctatgttgcaggaaaaatgtgaaaaaacagcagagtatgttatcacggtggcagatgcgattggcgatggaaggcttaacaaagcacaggagacagaggcgttgagaaaaattaataatatgcttcatgttaattgtacctcaattgaagataaggagcaggaaagaatacagctatataatgtggctgagagtgtatttgcatcatttgaacatgaaaaatgtatggaaatgacgcagatgatgccacatagcctgtatggaagacatttaagaattccaaagaagttctacgagaagcttgtaaggattccgtttgaaaatacgactatacccgtgccagcaggctttgatgccatgttaaagcggaggtatggtgattatatgaagcttgtcagaaatgcaggaggtcatgattatccgttctatgaatcacagaagagacagcttgaagcacttatggattttaaactgcctgagtatacatatgatgagaaaaaggcagtaagggaagctgattctgaagagctgtcaggttatagaaggtatctgaaggattatcttgataatattgaaagacagattgaagaaatcggacatatacaggacacggaagtcataaaagagaagcttgttgatgtacaacaggaagtgattgatatgggaaaccttatcgagaagataaaaggtgaagggactgaaagtgtaagatgcctggaacatttctgtgatgttatatacacgatgtatcagggaaataatgccgatataaaagctgagtatgacaatgtaagaagaatattagaaaaagatattatcgaaaagaaagaagtacttattcttgtgagtaaggcttctgagtggaagtatatagagaatgtatggaagaaatataaagaggaacaggacacagaagtggatgttgctgtacttccgtatttttataaagaatatgatggaagcataaagaaagaagtaaatgaactggggaactttacaacagatattggtgccattgatttagcacaatatgatattgctctgcatcatccagacattatatatatacagaatccttttgataatgaaaataaagcaataggaattgaaaaaaaatattattcagacaggttaaagtgttgtactaacaaacttgtctatatacagtcgtttacacttgaagagtttaattcttctaatgaacgggagtataagaacatgggctgtttctgcacagtacctggtgtagtaaattctgatgaggtatacgtacagtctgagaatatgcgtaatatgtatataaagaagctgactgaattcgcagggaaagaaactgaaaacatatggaaagataaaatatatgttaaaccggattggatgaagaatgagggacataatgttgttaaaggcaatggaaaaataaagattttgttctatacttcaataagcggacttatgcagaattcagagatagcggcgggcaagataaagaatgtattagatgtatttaaacaatactcagataagatagaggttatctggtgtgttcagagccttgttgatactgttatggaggatataaacaggaatcttagtgagcagataaatacaatcagggataaatacagaattgaagaaatcggacatatatgcagtgacagagacaaggatatacttaattcatgtgatgcatattatggcgatatatcttcagtggttcaggagtacagaaatgcagacaagcctgtaatgataatgaattatgaggtgtaggaatgaatatacttgttattggagaaaagctgtttacggattatgcattgcaggcattagatgatactgctcatatggttgatgtctattattgggatggcacatttggaccagaactgcttatggattcgggtatcaatgattatgacagtatagttgttatgtttgatgatgataagttatcggcagatattacagttatgattaagacaattgttactaatgacagctgtacagtatttgattatattttatggcataaagcaatgctgcctgccatgagggcagatctggttatgagtaatcctttacatcattcatatgatggactgattcttggtttgtcacatgcggaggttggaatacttgcagacagattacaggggcattatgctaatctagctgtttcatcacaggatatatattataattataagactcttgagtattgcatagataattactgggagaagataaaagatctcaaacatataattatagatatgtatgattatgaatattttaattttgatacatctcttgctaagaatatatacagatattttatgtggggcggttacaatcttgatgaacataatatgacacgcaataaaatatataaaaacagcctcgaggaagtccgcaattatcttctatatagcaaatataaaggattggatataagtaagcttgggatgtggaaggatttgttcccggacacatattatatgaatgggtatgccgattacagaggcgttaacagggtcgaacagagaatggagatgattacggacagacttgttgaagagtatgaggtaacatcaagcactgtgcgcaatgagtatcccgaaaccatcagtgaaaatgtgtctgttatgaatgatatgcttgctttaatatatagtaagtggcctgacattaaagtaaatataatacttcttccaatatataaagggattcttgataagagagaaccatattatattaagtggaaagaacagtttatgggagttatagagaacttgagcaacagatatccgttcagattcacatcatatctggaagatgaaatgacagaggataagaagtactattatgacaaggatcatctcaattaccttggtgcatatgtgtttacgcagaagttaaagcaaatgcttggagaacagttttaaaaatgcattaataaataggcatattaaatagaataatgggttaatattgggcgggtgacatccgatatataagatatatatagaagaaacgtatatcctatagacatggaagtcaggatgcaatatttactgaatgtgtgaattccgtgtatgagtaaatacacggaatttttttatggagaaatatatatgaaagtactagccgtatatggtacgagaccagaagctattaaaatgtgcccgttaatattagagatgaagaacagaccagaggtcaagtgtgttgtgtgtctgacaggacaacatagggaaatgcttgatcaggtgaatggattatttgggataacggcagattatgatcttaatataatgcagaaaggacagtcgcttgcagacattacgtcaaaagtgctgcaaggactcgataaggttattgataaggaaaaacctgatgtaatgcttgtacatggagatacaacaacttcatttgcagcagctctggcggcgttttacagaaatattcctgtaggtcatgttgaagcaggactaagaacatacaatatgaagtctccatatccggaagaatttaacagacaggctgtagatttaatatgcaattattattttgcacctacagaaactgcaaaagagcatcttctcaaagaaggaaagaatcattcacacatatatgttaccgggaatacagtaatagatgcgttaaagactacagtggatgaatctttttcggatgacaatattgagtgggcaaagggcagcagacttatattacttacctcgcacagaagagagaatattggtgagaatatgaaacacatatttgaggctgttaatgccattgtggatgagtatcctgatgtcaaggttatatatccgttacacaagaaccccagagtcagggagatagcttatgagtatttcagggataatgacagaatcaggctgatagagccgttggatgtatatcattttcataattatatacaacaatgcttcctgataatgacagacagtggaggtgtgcaggaagaagccccatctcttggtaagcctgttctggtattaagagagaatactgaaagaccagagggagttgcggcaggtacactaaagctggttggagttgagaaagaatctatatacagaggtgttaaggagctacttgataatcgcgaaacatatatcaagatgagtaaggcaagtaatccttatggagatggaaatgcatctaaatatatagttgatgctttattaaaaattatgaggtaagacatggataaattaaagattgataaaaaaggctatgtaacattttatgcagcagctgaatataatggaaagttgtatattgccgacagagacaacagaggtttgctggaatatgaccttacaacaggggagacaattataaaaaatgtatttatggctgagaattatatgaataattattggtcagcgtttacatataagaacgagatatggtttgttccgctcagagattatcaaaaatttgcaatatataatatagatgacaacaaaataacttttatgtcatttccaaaatcagaacacagatgtgattatataccatttatggattatcaaataattggagaaaatgtttacttaattccagcacattatgatagtattctaaaaattaatcttcaaacaagagaaacagcgaggatttcaattggtgtagaggaatatgctggtgatggatatccaataactatggcaagcatagtgattgaagacaaaatagttatgtgtccatgcaataataagaaagtgatagtttttgatacaaatatggatcgggttattgaatgtattgaactggaatatacaaatatatattcaaatattgggatatattatgacaatatagttttgataccggatgatttgaataatgccatttgtgaggtcaatataagggataaatcatataagtataaagctatattatgtgaagacgaatataaaaaattaaaatatccaggtattatagttgatgataatgatatatatttttttcctgataatgggactgcgattttagtatatgattatttaaatgagagtatgagatataatgaagtatgcataaaagatagtacaagaaaattaaagtatgttaaagggaaaaaaataaaacaacatttgcatatagcattatcagatgatagtaaaaatccatgtatattgatttcaaatggcagtgttgaaactattgaattaaaactaccagcggatttttttgttagggaattatttatggagatgaaagaaagagaaaaatatgatatctgtaatagtgccaatttataattcggaaaaatatttaaatcaatgtttaacaagtcttgtaaagcagacatattctgatttagaaataattcttgtaaatgatggttcaactgattctagtatgaatatatgtgagaagttcaaaaaagaagatgatagaattattcttataaataaaaaaaaccaaggattagtcagagcacgtaaagatggtgcaagaaaagctacgggtgaatatataacatttattgatgcggatgattggattgatgcagatacatatgataatttaagagattttaagtcagatattattgcatatgggctggttgaagaatatggctataaaatcaagaaaaaaacaaataagtttaaagatggtttttatgaaaaagataaaatttcagattatataataccacaaatgctatgtgtagataatttctttgaatttggtctgttaccgaatcttgtttgcaaattgataaagcgcactttatttctggaaatgatgggagaagtgagcaatgacgtatctgttggggaagacgtagacttcttttatagacttgtttttaaagcagaaacactaacaataagatcatattgtccgtatcattacagacagcattctgaatctatgatgcgaaagaaaattgatattgaatcaataaaaaaactgtattttgatttattaacaattaatggagtaaaaaagaagacggaatgggaaatacaattaaacaaatatatcatgtttgtaatgttattaaaaataccagataaagtggttcatctaataagggaaatcagcgagataaatggaagtgttgttatatatggagcaggagcttttggaaaaggcatatatactcaattaaagcaaaataagaaaattaaagaactttttattgttgataaacaatggaaggatcttagcaaggaaaagatattaattgataatcctgaaagaattgccgatatcaatccagataaagtgataattacaattctggatgaaagagtatgcgattatgtgaaagagtatttaattgggataggcattggaacagataaaataattagaataaatttctcggatttatgtggtaataaagtctttgatatataacaaaggagtatgggaaatatcaggctaattgtgaaagtgagacacatgtaaggcaatgggatgaacgcagattattttcattgttagaagaaaaatttgaaatagaaaatatgataaaaattccatatataaatagttttaatatggataatttatttgtgtcagcaattttaagataataggagaaaatatggcagttgttagcatagtaatgcctgtatataacggcgaaaaatatttaagacaatctattgcaagtgtagtgaatcagacatttatggattggaatttaataattgttgatgactgttctacagatgcttcacctgaaattatgaatgaatatgcaaaagcagatgacaggattcaggttatacacaacgaagtaaacagtaagataccagcatcacttaataatgggtttgaaaaagcagcgggcagatattatacctggacatcagatgacaatatatatgagcaggatgctattgagaaaatggttaagtatctggatgaacacccggatacaggtcttgtatattctaatatgagatttattgatggagaaggcagagaaacaggaatatatgaatctaagccagaggatatattcagtaataactgtgtaggcgcatgctttatgtatagggcagatattgccaaagaagctggcaaatatagtgcggactggtttttagtagaagattatgagtattggctgagaataagaaatataagtaagataggtcatatagatgaattgttatataagtacagacatcatcagagaagcttatcagaaacccggatgatacaggtaagagagaaactatatgacttaagacttaatatgattcagaagatgaatgataagattcctgacagaattaagacagaattattcaaggaaatgtggctgcagagttccgaagggcatgatgagctgcttaatgtattttggaatggagaaatgccggttgatttacaatggcttaaaagaaaagggataattgatatgagtaaaaaagttgttttgtttggagcaggagtgtttggtgctaaggcactggattatcttggagaagaaaaagtgtattgttatgtagataataatccggaactgaaagataagattgttaatggtaagactgtaaaatcttttgatgatatgaaagaacttgcaaagacttaccagatcgtaattgctgttgatgcccacaaagcaggcatattagcggaacaattagaaaatgccggaataacggaatatataacttatcttgagatggttaacaattataaaaaaccggaattatccggacaggttgactggataaaaactacagaaaaggccaaaaactggataattaataattctataaaaggagagggaataattaataattcccggtacaagaagagttatccggaagtcagcggatattatattccaacacttttaagatggggattcagagatctggctgttacatatgccggatggttgtgctcaatacagcatgaagagggggcatggtatgatacggatgataaagaaccatatgtgtttgatacagcccagattcttaaagggttagtggctatatatccaataaaacctgaggttaaagacagcttaataaagggatgtgaatggttattagggcagattacagaagaaggcagattagttacaccttctaaggcagcgtggggtaatgatggagtgtgttcagaactgatacatttatactgtctttcaccattgatagatgcagcaaagcttcttgataaaccggaatatgagaaggcggcgagaagagtggctgattattacatcagtaattatagagataaaattcttaactttggatttctgtcacatttttactcatatgttatggaggctctttgcgatatagaagagactgagcttgcaaaagaagcaatggataaactttctgtaatgctcgatgaaaaaggatatattcctgcattcaaggatgttgactgggtatgctcgacaggaatgttccagctggcaattacatggtataagcttggtgatattgaaagaggaaataaggcattaacatatgcagcaaagcttcagaatgaaacaggtggatggtttggaagctacgccgtaattgataatccaaaacctacagataagaaggagtatcctgattatatacctgatggggaaataagctgggcggttaagtattatctggatgcagttttttataaaaacagattagagtttgatatacaggcggatagtttttcatcatcaatttcaaaggaagatggaagatatcaggttatccttaaagaaattaactctgtgcataaagcgggcatgaagataattgatgtcggttgtgggaaaggaagattcttaactaatcttttagaggatgtaaaagattcccagttatatgcggtagatatttcagataaggtaatggggacattatcagacagaatcgtaaaagagaatggagtgctcacacagattccgtatgctgacaatacatttgacatcacgtatgctgtggaatccctggaacatgcaatatttcctgaaaacgccatcaaagagatgttacgagttactaaaactggcgggaaggtaatagttgtagataagtcggtaaaagcacttggaatgcttgaaatagatgcatgggagcagtggtttgatgatgaaatatttgaaaatgctattaaaggttcagattcatctttaaaggtaatagacaaaataccatatgatggctatgaagcagatgagttgtttaaggcttggattattacaaagtaggagaagaatatcatggaaaagtatgaagattatttagataaatggctcggtggattagaaagtgaaatagccttttggaaaagatacatggagacgaaaggggacatttattatgatacatttaaaaatcagacagaaaaagataggcattttacattagagagatatttagatggattttctaagacagagcaaattaagtttatagatataggttcaggacctttttcaagatgcggtcatgttacagaaaactacaacctgttagtagaaacagtagatccacttgcagaagtttataatgatcttaaaaagaaaaatgatcttgagaatggaattactattaaaactggatttgttgaacttcttgataagtattttgatgcagatagttatgacatagtgcatatgagtaattcgttggatcatagttttaatgcggtatttggtatttatcagcttcttaacttatgcaaagttggcggaaaagttattttaagacatgctgaaaatgaagctgaaagaagtgaatatggtggattacatcaatggaatttgtctctgcacaatcaggaaaattcatttattatatggagaaagaatgaacgttatgatataaagaaaattcttgatggctatgcaaaagtagagtggaatgcagatgtatatgagaaaaagtggaagtataatgaagttgtaataacgaagttgaaagagtgccctattcctgaaaatccatatacagataagatgcttgaaagagtatattcgtttctgctaaagacccttgtggataaaattggtaattgtgataatacaatagtattgaagaataaagagataattaaagaaatgaaagaatcacaaaaactgataaataatgtattacagataagtaatgataaaaagatagatatttatggaatgggagtagttggaaagaacttaattgatatactggataataataatatctgcataaattatatctttgataaagatgcaagaaaatataaaacttatagttctgttcagctggagaatgttaaggatattgataagaatattatttttgttgcggtaatgagagataacaaagaaataatagaaaagttgataaaacaggggtataaaaaagataatgtatatttaatagaaaacttagtttaattgaggtgatgatatgacgatagtttttggagcaggaaaagaagcagaaacatatattagagagtttagtggaactgatgagatagtgtgctatgacaatgatagaagaaaatgggggaaaactatctcgggaataccaattattacattagaaaaatatttggaaactttaagagcctcaaaatgtaaaatcattgatactataagtaataaaacagccttatattttctgaaggatacttgcggggaaatgcatgaagtatattgtttgcataataaagaactgaagcagttgaaccttaatgatttaagagattacgaaagagaattagaggcggttgaaagtgagaaaataaaaaaatataaggctatagttgcaagtggacagataaaaagtgagtttgcgttagaacattataagaaatatataaggcatagagaaaatgattatagctggccagagattaattctgtggagttaacgaattactgtaatcttaagtgtcctaattgtccaacaccaacttgtaaaagacccaaaggatttatgcctaaagaagtgtttgataaagctatggaatatgttactccggatatggattcttatttctcattacatggtcttggagagccattattacatccacaattttttgagtgtgtaagacgtgttgctgaattagaaaagccaatactcataagtacaaatggcgtgttgtttgataagcagaaagctgatgacttgctggaactgttatctggtgccagcaaaagtaaattatttatttcatttcatacgaagacatccgtagaaaattggaaaaatgctgtagaattactacaacagaagcaaataaaaaacgtagaattatttggacagattctcgaacataatgagagtgaagcaattggatggttgtcagaatcaggtattaatgatccatttaataatcagtacataagatatgttacttctcattcttttgcaggaggagtggaaggaagaagaacatgttattctgatgtagaagtaaagaacagatttagaaattgttactttgtgaagaataattgtactgctgttgcatgggatggaaggttaaaagtttgttgtctggattctgaattagaaggaataggcggaacagtatttgatgttgaaaaactgactcacaagaatactccgtataagttatgccattattgtgatccggattggacaagtaactatcagtaggggaggtgtatgaattatggaaaaatataaagaatgtgaaactgaaataaaaagtgatacaaatactgatgtggaattttatttagttgatgcgtttgaaatttttcattttgaaccattttatatagaacttagaaaaaaaaatataaacgctgtttttatagctgagccatgggaaactaatacaagtgggaaatggtttgactatgattcggcaataaagatactagatgaaaagggatatgtatatcataaatttgtaaatgttaactgtaaatgtgcgataacaactcagcagaaagacatattaaaaaaatatactaatgcaaaaaaaatacagcttatttatggaataggattcctaaaaaaagtacaatttcaacttaaagattttttgaaagatccatttgattattattttgtgaatggtggatattataaagataaatttttaaaattaggaggcagcatctataatataatagatgtttcctacccaaaacatagagatttttttaagcggggatatgaaaaacagaaattgataaaagaactgggcattcatacggataaaccaatacttttatattatccaacatgggatgaatatagttcaattaaagaattcgcagatagaataggtgagttaagaaatgactttttcgtagtgacaaagccacatcattgtacattcagattgaaaagtaaaaaaaatgatttgaaaaaattatatgatgtgtctgatatggtgttagatggtaattatgattttgctaaaacaacgattttagccgatttagcaatatgtgattcaaagtccgcatcttcaacggaaataccatttttaaatcctgatataaaaatggttatgatattggtaaataccataagggaagattacgattatccattggataatatatattgtgttgtagaagaaccacataatctgatcgataacgtcaagaaggttatgattaatgataagtggaaaaataacagaaatgaaataataaaatatacatattctggtgatgttgaggaagggctgaaccgaggattaagaataattctagatattattaaataataagtatatttatggttacctaagaagaggagaaaaatatgaatatagcagtgattttggctggtggaattggaaaaagattaggagcaggaaaacctaagcaatttgtagaattgtgtggaaagcctatgattctttattctatggagatatatcaaaaatcttctcagatagacgctattgagatagtgtgtgttaaagaatatatagattatgtttggaaacttgttagagaaaataacatatcaaaagtcaggtggatatgtgagggcggggcgacttgtcaagagtcgactcgcaatggaatctttaatttggagggggagattaaagatgatgatatgttaagctttaacatgagttcaagtctttttgtaagcgaagacattttatcggattcttttcatattgctaagaaatatggtgctgcctttgcttgtatgccatgtgtttataataatgcagagacacaagatggtatattatcaaataaaataaattacaaagaaaataatagaacaataaatatgccatggacatcatcttttggaaaattaaaagctatgtatcataaggcttatgatgaaaatatagaaacgggagaggcatcatatatgccaacattatttgttgcattaaaagaaccattgtatttttcaaaggatgatggattaaataagatacatatacaaaaagtggctgatatacagattgcagaggccattatcgaatatagaatgaaaagagggatgttataatgaaatatttaatgggagtagacgaagggacaacaggatgtaaagcaattttatttacagatgaaggaacacaaatagcatctacggcaagagagtatccgtcatattatccaaatccgggctgggtagaacaagatatttatgaaattaaaaaggctgtttttgaatgtattgaggaaacaattgttaaatctaatgtcaatccgtctgatatagttggaataagtcattctaatcagggaattacgatggtgcttcttgatgaaaatgagcaaccagtttttgaacatacaataggctggcaggatttaagatatgttgatatattacctgaactgatgaaagaagttgaccagaaggaatatttaaaaatttctggcatgcaatatggaacatacaatatacctgttttgagatggcttcaaattaatgagaaagaaaaatggtcaaaagtaaagagaatttgttctcatcaagattggttcttaaggcagtatggtgcggatggttattatattgatgagggatgtgctaatttcctttctatggttagaatgtcagataatgaatgggatgaacgcctgctaaaatattataatgtgacagaagatatgcttcctaaggttgttcatattcctggaacagttgttggaaatgtatcagaagaagtatcaaaagctacaggattacctgttacatgtaaagtgtgtttaggcaatctggatgcaaattcatgcgcaattggttcaggggcagatgagatcgggacacagttgttaattatgggaacagcgggggtgtctatatttgttacagataaggataaattagatcctaatggaagaattacggttagaactaatcctggatttggaaactggcaaaattatataatgacgaatacaggggcatctgcatttagatggtttagggattctatctgctcaatggaagttgcaacttcaaagcttatggggatggatccatatgacataataacaacgatagcatcacattcaaaaccaggagcaaatggggttacagctttaacgtgtattcagggttcacataccagaaagaaaaatgaaaaagcacgaggaagcttttttggtattaatttaggaacaacaaaagccgatctggcagaatcaattcttgagggaatttgttttgaaatgaaagatataatggctatgaatcaggaattatcaggcgaagttacgcatgtaagattatgtgggggagtggctaaaagtcctatgtggtgtcaaatgtttgctgatattcttgaaagacctgtagaattaacaaaagtctcagaattaggggctttaggagcggcaatgtgtgctggaataggagctggattgtataaagattgtgaagacgctgttaaaaggtgcgtaaaaataacggaaatatacaaaccggataataataaaaagaatgattacaatgatgcttttaaagtttgggagaaatactatagaatagcaaatgaaagtatttatgtttaaaaggattgtgttggcggaataatgtacaagattataatttttggaacgggattatatggaaagcaggcattacaattttttacaagagaaaatgttatgttctggacagataacaaagaagatttacatggaaaactgatagaaggaatagaagtgattccaccatcagaattaaagaagtatctaaatgaatgtgtgattgttattgccgcgaaacctgaattttttaatcagataaagtatcagctgaataaagaatatggtatagaaatggcattgaattacacatttttgaagtcatatataaatgattcaggtatatcggttggagagtttttgagtggctgcatggaaaaggatatatacagattgatgttttattatgcagaggaacaagagaaacctgcacaggagcaggttgagttctttgtttcggtttctgatatacgaagattgaatccggcaagaggtggtgcaagaagatttcaattagaattactcatgtcagcatatagattgagcgaagacttgaaaatgtcaggctttgagataatgattgaaggtgggactcttataggagcagtcaggcatgggggatttattccgtgggatgatgatatagatttcatgatgctgcgtaaagaatacgaaagaatgatggaattttataaaaataagggtttattttatagttctgatgcgccatattatgatgaaaacacgttgtattcagaaatgtcggactttcttaatgaatgtggtaatgattatgcgttctgttctaatggaaagtttgtaaaagtgttctttaaaagaactccggaaccaattgttttagatatatttccaatagattattacaatgatgatattagctttgaacagctgcagaatattgatatgcagcttaaaaaggaatttgatagtaatacagacaagtcagctgttaaaagagataaatggtataaagcgataagaagtagtggtaaaatagttagtaagatggaatcttcacatttatgttatggcttggaaacagattttattaaaatgtgcaatagttatttttcattgaattatgtactgcctcttaagaaaattaattttgaaaataaggtgttcttaggacctggtaacccagataaaatgcttgaaatggaatatggtgattacatgcagtggccaaatgatgccggaagtactgcacatggtgctaacagaaggttttcaagatataagaattacagtaatccacgttatattcacacaaagtctgaagctgaggatttctgcaaagaaattaatgaaaaagcaggcgattatcagctcatagttgaaaagtataagatatttaactggaaggaatattttgatattgtcgattatcttgatgaacatgatattagttatatagtgtatgcataaggaggaagtatggttctgaaatatgattctctggaaaaagttaaggaacatgtgcaatataataattcccctgttgtaatttatggagcaggaatgataggacagattattatgccatatatgataacaagttcaggtatgctcgacaatctgttgttttatgtggatggagatagaagaaaacagcaacagactatacatattgggaacagggatatagagataaaatcaccagagattctggacaaacttcctgggaatgcagtagttcttattactaacagcaattatacaggaatagttgacatgcttaattcaattgatgcattaaaagaaaatgttggggtaattattccgattatactggcaatcagggcaaggaaactgggaatgggtagctattctgacagaccatcagaggtcagaattccgaaggtaattaattattgctggttttcagggaatccgatgcctgagtatcttgtaaaatgtattgaatcttggaaaaggttttgtcctgattataagattgtccgttgggatgaggataattatgatgtagggaagaatatatacatgaaacaggcatatgaggcagggaaatgggggtttgttcctgatatagccagactggatattctttataattatggaggtctgtatattgatacagatgtagagataattaagaatcttgatgatcttcttggaaacgaagcatttactggagtggagaaatggggaaatattaatatgggtggatgcagcggagcagttccccatcatccaatgattaagaagatgctggatttcagaataaatgaagaatttattatgcaagatggaagtcttaatcttactacctgcggatattatgagacgatgccgtttatacaggagggattcatccctgacaatacaacgcagacaattgatggaatgactatttattcgtcagattatttccaaccatatgattatatgagcggtgagacatgtataactaagaatactcattcaatacatcattttaatggcggatggattgatgagaaacataaggaagagcggcagaagacaaaagataactaccagaaaatggtaagtaaactggcttaatgagtattaagatatcattgcttaatatgagcagaaatgagggctattatggttatagaactggcaattaattcacaggctgataatgacacaggattgacatacgggcagataattgaatcagatggaattaatgccgggcaggtaataccatatggaccggatatgtacaggcaggcgctgcctataatattaaagcatgggtatgcagtggcatctgatccggatggaaagaacagcaaaatacttaaattacagggaggcacatatgcacaccgatacagatatgatgggggcgttgatatgtggttccttaatagttatgactgtatatttctttatgattgcaatgaattttctgttgaattgtgcaggacagcgttaggagaatggactggaaaaagacttgtgcttgttggtagtaaatgggagagaatgattgagtatcttgacgatattgatggggtggaatgtttctatgaaccagagccggatgattcaagatttacacaattgatggaaggatacagatgccttcatgtaatagacggacttccacatcaggaaagcatggaccggtataatgatgggattatgtattatgaagaggtcatgtcttttacatatatgttctcggattatagatcattaggcagccttaatcctgataagaaattttttgttatagatgggtattataacaaacttggactttttacaatattttctaaaatagtgacatgtgcaaagtatgtaaaggctaagggaatggtacctgtagtcaggcttaccatgtcgggaaacagcttttattctgattttgaaggtgatgatatatggagcaaattctttaatcagccagaagggtatacgctggaagaggttatacacagtgcgaatgtgtatttttctccaggattctataatggaagtgtacagagtactattatggaaaatatcagtgaggatgcagttttgtcatggtcttgcggagaatataatgatgcaatgattagatatatagaagagaaaaaagaaagctatctcccatatcctgacagaactcttggagtgcttgcaagaggaacagattttgttaatacacatttaaagaatcacccggttcatgcaaccaaagaaatgatggcagataagattgatgaacttatgagtacatgggatggattggaatatatatacatagcaactgaggatttatcttatgttgaatatttccgcaacagattcggagataaagtgtattttacagatcagcaaagatattcaaccagacctggacaattactgtatgattatcacagaagtgaaccagacaggcagacaggatttaatcttggagcggagtacgctgcttctattgcacttcttgcacagtgcaattcttttcttgcttctggatggtgtacaggggttagcgaagcaatcagggaaaatcaggggaattatcgcaataagtatatatttgatctgggatttaacaattaatgcttgataaatgcactaaattgtattagtatatattatatatgatatgtatttaacgaaagcggtttttctatattacctgtgcggttgttatatttttatatggcaatggggcggtacagggtctgtttatcttggttatgtctttatgtcaatgaaaatcttgcttttaatagggtataaagcaggattgtatgatataatggacgcaatctgaaacagatgattcgaagctggaacttaagtgtatggtgtataacatcaacaatggaaagaatcctcatataagacagtcgtgaaagtggctggatgaatatatgatatttgttaataaggtcagagagctacactgtggcagaacagcaattgttaaatcagttgattacgttgcttttagcagatggaagaactgaagatttaaagaagtctgcttcagatagagagtatcagttacgcttactgaaagagtatggtctggtgtagagaaaatagtgtgaaaacgggcaggaatggagagtaatatgtatacagaattaacagcatctatgatgtgcgccgattttggcaaccttgggaaagaagtaagagaattggaggcagcaggtgtagattcatttcatattgatattatggatggccgttatgtgcctaactttgcaatgtcacttaatgacctgcgatatataaggtcggctacagataagcctatggatgttcaccttatgatagagcatcctaatacgcatattaatctctttctggagtcattaaggaaaggggatacagtgtatatccatcctgaagcagagtatcatccgtcaacaacactgcagaagataattgatgcaggaatggttccgggaatagcaattaatccggggacaagtgttgagacagttatggagatgcttcagattgtagataaggttcttgtaatgtctgttaatccaggtaatgcaggacagatgtatcttccttatgttgggaaaaagatagaaagacttcttaatatccgtaaagagatggattttgaggtgtactgggatggagcgtgcagtgcagataaaattaccacatttgcgccaatgggggttaaggggttcgtgcttggaacaacacttctttttggcaaagacagaccatatggggagattttaagggagataagaaatttatgataatagacaataatcctgttatgatggggcaggatgagataatcaggcttgcgacagaacttgcagaggctgttgataataactggcttgtagatggtgaaaaggcagccggatatacatacgcccatcttgttgccatgttttttgctacaggcagtatggaagatggaaacaagctttataattattgctatgatgctgcaatccgatgtggtaagtctaatatagataagagactgcgtgatggacagaagataaaggttgcatttcttccaatatcagcagcagagtggccagcagagcgtatatataaaatgttaagagatgacgacaggtttctgccagttgttgttccggttcctataatcggaaggactaaggaagaacggggaaagacatattcccagacatataagtattttgaagagaatggctataatgtagagcatgtgtatgaccctgatacagaggagattacaggatgggaagatataggtggtgttcctgatgtagttattcatgttacaccatggtatctggatatggtaaagaattatcagattattaatttgccgttttcagtgcttaatgtatatatatcatatgggttgactgttggcaattcccagacaggaagatttgatgaattatgtatgtataacaaggaatttatgaatctgtgttggagagtatatacagagactaagacagattatgaagagtttatcaggtatgaggcacttggcggaaagaatgtccgtaatagtggatatattaagatggattacttctatgatgaacacagttatacagaaaaagatatacgaaatatgtggggaataccagaaaacagagatgcgaatgggtataagaaggttattattgcaccacatttttcagttggggatactaatgtattgtcgttttctacatttgacaagaacatgtatttttacatatatcttgctaagaagtataaggacagtatttcatttgtttttaagccacatccgaatctcaggaatggactggttaagcatggatatatgaaatcaattgatgaatatgaagcgtatcttgatgagtttcgcagactgcctaatgcaagggttcaggaagagggaagctatctggaattgtttgatacatcggatgcaatgatagacgattctatttcgtttgtaggagagtatctgtatacaggaaagcctatgttatttcttgaaagaccagaacagagatttaatgagcttggaaagaaaataattgatgcacattataaagttaagggtactgattattatggaatagatacttttcttgaggatgtggtgctggctggcaatgatacaagaaaggctataagacaacgcgtatatgaggaagaactagattatgcaggaattaatggaatcaaggcatcagactacatatataatgacattgcaaatgctttattaggatagaaaggcatatttatgaacgtagcattagtattggcaggaggaacagggagcaggttaggtgcggatatacccaagcagtatcttatgtgtggtggcaggatggtgattgattattgtctcgaagcacttgatgagtctgcatatatagacagtatatgggttgtggctgatgttgtgtggcaggatcatattaaaaaggttggaaagctggcaggatatgcgcttccgggaaagaaccggcagttatctgtatataatgggcttatgtcaataagcagggcttatggagaggaagatgttaatgtactgatacatgatgcggcaagaccgtttcttacaggagaattaatccagaagtgtatagaagcgttatctggacatgatggggttcttccagtactgcctatgaaggatacagtatattatagtgataatggaaatactattacatctttaatcagaagagaaaatgtatatgcaggacaggcacctgagctattcagacttaagccatacattcaggctaatgaaagccttatgccggatgatattatgaatattaatgggtcaagtgaaccagcagtcatggcagggatggatatcgttatgataccgggggatgagagtaattataagattacaacaaagtctgattatgacaggtttgagcagaggataatgggagaacaggtatgaaggcacaggtgttatatggcattaatgacatgcgctatgaggatattgaagaaccccagctaaaggatggctgggttattgtcaaagtgatggcagcaggaatatgcggttcagatattccaagaatatataagacaggagcccacgttcatccaatagtgattggtcatgaattctcgggtaaagttgttaagacatataatggagattctgactggtccggaaagagagtaggagtgtttccacttattccttgtggaaaatgtaaatgctgtcaggataagcgttatgagatgtgcagtaattataattatctgggatcacgttgtaatggcggacttgctgagtatgtggcggtaccagagtggaatcttcttgagcttacggagaatatttcttacaggcaggcggcgatgcttgagcctatggcagtagcagtacatgcgatgcgtcagttcactataaaagaaggaaccaatgtatgtgttattggagcaggaactattggcatgctgcttgttatgcttcttaaagcatcaggaattcatgatgtatatgtatatggcaataaggaatcgcaggaaagatatgcggcaaagattggtatagataaggaacattacagtccgcaggatataaatgctgattatgtttttgaatgcgtagggaaaaatgaaacaattaatcaggctatagaactgtgcgctccggcagggcatattgtacttgttggaaatccatattctgatatggatataccaaaggatatttactggaagatattaagaaagcagttaaagttaagtggaacatggaattcatcatacactggaaacatggatgatgactggaattatgtgattagtctgcttaaaaccgggactattcatccagagtgttttataacacatgagtttaatctctcagatattcaggaaggaacacgaattatgagggataagtcacaggattatgtaaagattatgtgtattaatgattaatggttaatataagacggaggtcagagtgataacaattgatattctttctccggttggtggaagaacaggtggaattgaaaatgttatacgggcgtggacaaggaagctgccgggtgatgaatatgacataagagttattcatatggctccgggaatgaaatatcttgaaggatataataaagcatattcatttgccgaatgtatggatgataacattaattcaaagcttacacattttgcaagaaattatgcaggatttataaacagctatggcagactggatatatgtgtggcaacgaactggccagctatgtgtgttgtggcagatacggtgagaagggcacttgatacgcattttataatattatcgtgggttcacagtgatatatcgcagtatcaggcagccgggctaggcgggattaatgagatgttaaaggctgatgcgcatctgtgcataagcaggagtaatgaagagtcggttaaggcggtatgtccggaggcaataacatatttgacgggaaaccctgtacatatgcagacatttgtcgggaaagatccaggtgtcaatactatgtgttatgtgggaaggctgcaggatgttaagagagttgatattatacttgaggctttatacagagcaagacataagtggaagcttaagattgtcggaacaggtgagtcagaggatgaacttaaagaaatcgttaagtatcttgggcagcagaatcaggttgaattcatgggctggcaggataatccatgggagagttgtaaggatgcttctgcaatgatagctgcatcagagtatgaaggattcatgcttactggggcagaagctctttcaatgggcatgactgttatatcgacgccagttgatggggttactgattatgtaagagaaggtatgaatggctatttctttaaatatgaggatgctataggacttgcaggaattcttgataatatatatgaagggaaaatgcctttgtgtgacagaaaaatatgtcatgaatctgtagaaaaatatagtgaagaagtatattttagccgcttaaaaaatatttttgattttttattaaaaaggggttaagtatttaatatttcctccgataaataatacataagaaataaacaatttttaaattgattataaggagttattgatatcaaggaggaattattatggtagtacagcataatctatcagctatgaacacaaacagacagatgggaacagttactaatgccctttctaagtctacagagaagttatcatcaggttataagattaacagagcagcagatgatgcagccggtctttctatttcagagaagatgagaagccagatcagaggtcttgataaggcatcttctaatgcggaagatggtatatctcttatccaggtagctgaaggtgctcttaatgaatcacattctattttacagagaatgaatgagcttgcaacacaggcagctaatgatactaatactacatctgacagagaggctatacagtcagagatttcacagctgacatctgagttagacagaatttattcaacaactcagttcaatactatgaaccttcttgatggtaactttacaggtaagagtcttcaggttggagctctttcaggtcagattattagcttaagcattaacagcatgaaggcttcagcaattggtattaaggcatcaagcataagtgtaagtagcaattcagctgcaggtaagtctatgtcacttatccagcttgctattaatactgtttcacaggagcgttctaagcttggtgctcttcagaacagacttgagcatacaattaacaaccttgatacaacaagtgagaatacatcagctgctgagtctcgtatccgtgatacagatatggctactgagatggttgaatacagcaagaataatattctttcacaggctggacagtcaatgctttcacaggctaatcagcagacacagggagttctttcactcttacagtaatataattaagaaatcaggagccagaactgcggtaatgtcgcagctttggctcttttttaatatatagatgatgggggaacatatgatattattttatcagtggaatgcatttatgcagagagggatggagaatgctctcaaaagattaaatatagaatatgaagtgtattatgattgtgccagagactgggatagtgataatgaatttgcagacaaattcagaaaaagaattacagctggtatatacgatgttgtgatttcggtcaatttcatgccggtaatatctgatatatgcaatgattgttcggttaagtatgtatcatgggtgtatgattcacctcttcatatcagacgccttgatacccttaagaataaatgtaattatatttttttctttgacagggcacaggcggattattatcttgcagatggggtgacaggagcaaggcatcttgcactggctgctgatccggatgtttttgccggagtaaaaacagggacttatgattgtgatgttgcatttcttgggcagttgtataaatcagaatatcaggatttatgcaggggactgagtctgtatagcagaggatatcttgaggggattattgcagcacagtcacagattaatggtggttatataattgatgagatgctgacagcggatacgctgagattggttaattcagactttttgaaggcaagtaagggcagattttcggtgactggaagagaattatcgtatacgcttgccaaggaaacaacggggagacagaggtatacagcacttgcattgctttcggacagatgcaatgtaaatgtttattcaaatgatacggatggacggcttgaaaaggcttcgttttgtggatacgtagattattatgacaagatgcctgctgtgtttagaagcagtaagattaatcttaatatttctttatgcacaatccagacaggaattccactgagagtgttggatattatggcgtgtggcggatttgtgcttacaaatatgcagcctgagcttatggaatatttcattccgggagaggatgttgcggtgtatgaggatatgaaagatatgattgctaaagtacagttttatcttgaacacgaagagttaagaaaaaggattgcacataatggatatctgaaagtttgtgaaatgttcagatttgacgacagaataaagtatatgttggagatagcagatgaaaaatgatatgacggatgttaagatatcggtaattgtaccatgtcataatgttgttggaatggttggtgaatgtcttgaaagtattgttaatcagacgataggattgtcacatctggagataattctggttgatgatgcgtctactgacaacacagtagatgttcttaaatattatgaacagaagtattctgataatataatgctggtgttatgtgataagaatggaaggcagggaacggcaaggaatataggaatgtcatatgcaacaggaaattatataagctttgttgattcggatgactggatacatcctgatatgtacaagattcttgctggtataatgatgaataataactgtgacattgtgcagttcagatacaaggaaacgaaacagctgccatctgattataacaggcatatagataatgttgatgtaaagatatatgattatgcaaaggatagaaaaaagtatcttctggattcatctatacttaatgagtcatgtacaaccaagttatacagcagccggctgatagcagaggcgggtgtacgttatgcagaaaatgttgcatatgaagagccgctttttacatatccgttgaagttctatgcagacagagttgctgtaacacaggcacagttatattactatagatataatgagaatggtacaatgctttcttacatgaataatccttcaacaatggtacagcatctgcaggtgcagcaggatgtgtatacaagaatgagtaattctggatatatggatgaattcagggatgagattaacctgtattttttacattcattttatgcagaaacattttattttatggcagcaagaaggatgccgatgccggctgttatgttaagatacatgataaatgttgttaaaaaatatattccggattataaggataatccatatatcggatatccgggggtaagggaagaaatggaaagtcttaagcttatagactgtgctggcctgttagatgatgaacttgagaaaatggcagcagattatatgagaaactgcatttaaggagaaattcgtgaagatattatattatacatggaatgagattattaagaacgacatatgtgatgccatgaaagcttacggacatgaggttaagctgctgtcatatgagattaagagctatattaaggatattgaatttcttaatattgttgaaaatgaactgaataatggcaggaattgtggaaaaccatatgattttatattttcatgtaattttatgcctgttatatctaaaattgcgctgagaaataagattccatatgtatcatggacatacgacagcccatgtatgactatgtattctgaaatgatatataatccttataattttatgtttcatgttgattcttcagaggttgaaagaatcaggaagtcaggcgtgaagcatatatatcatctgccgttggctgttaatgtgagaagaacagatgctcagatcagggcatgcgcagataatgtcagtcctgcacttattaataaaggcgttgcatttatggggaatctgtataacaatgagccggattttgttgagagtgttgcagggcttccggattatgaaaagggatatatcaatggaattaagcttgcacagcttacaatgccgggaagtgagcttctggaagaaatgtttgacgatgctctgtgtgacaggcttaagaagtatgtcagcttttcaaaggaagaggaattctttgtaaaggacacagatatgattcttaatatgttaaagaagaatatttcatcaatggagagaatcggaatattaagggagctgtcggaagtatgtgatgtgacgctttatacccagtcatcaggatgtgatatgaggggtgtcagagtgagagaatatatagattatgagcgggatatgccggtcatgtttgccaattctgcaattaatctaaatgttacgttgaggaatatcaggacaggaattccactgagagcgttagatataatgggggcaggaggatttcttcttaccaattactgccctgaactgaatgaatatatgacagaagggaaagattttgtctcatatattgatgccggagactgttgtgagaaggcagtatactatatagaacatgaggctgaaagaaagaagatagcagctaatggacatgatagaatacttgatatgtttacatatgaacatcagattaagaaaatgtttgatgttatcagaaaggaactgtgacaatgaatatacttatatttgaatataagaatttcgggacggaggatattaaagaatgttttgaaaaaaacggacataaatatgttgttgtggaaactaatctttacagggacagaataagccctgagtttgataaaatatttgatgataagttcggacagggagttgataatgagccttttgactgtgtgtttacatttaatttcagtccggtaatatctaataactgcaagaaaagaaatgtgccatatatagcatttgtgtatgatagtccacaggttcttctgtattcatatactattatcaatccgtgcaattatgtgtttatatttgacaagacacagtatacggaacttaagatggcgggcattaatactgtgtattatgcgcctttagcggttaatgctgacagaatgaaacgcatgcttgataagacaggctgttcacataataatgacagatttaagggagacattgcgtttgttggatcaatgtataatgaaaaatacaatcttttcgacagacttgagggcataaatgatttcacaaaaggatatcttgatgcgataatgaaggcacagagaaaggtgtatggatatttctttcttgaacagctgttatccggcgaggttcttaaggatatgattaagaattatccagttgaaccaagtaaggacggagttgaaacagtttcttatctgtatgctgattattttcttgcgaggaagatggcatcagatgaaagaatggatataatgaaactgcttggaaaggagttaggagagcagcacaggattaatctgtatacacctaatccgactccgggacttgcaggtgttaataactgtggccctatagattactatgatgatatgccgtatgtattcagaaattcaaagattaatcttaatattactctgagaagtatcaagtcaggtattccgcttagaggaatggatataatgggagcaggaggttttcttatgtctaattatcaggaagatttctttgatttcttcgttccgggagaagacatggtattgtatgagtcagaagaggatcttatctgcaaatgcaggtattaccttgatcatgatgacgaaagggaagctatagcaagaagtggaagtgaaaaaatagcggaacatcatacatatgatgtccgctttaatgagatttttaatattgtttttaattaagagaaagctttgtctattatctgcagaagacgaatgtcgtatgtgtggtattttgcaatggtttcatatccattatgggctatttcgagacgttcatcttcatgccacaggtaatatgtacagagctcttttaagtgctcgggactttcgtaggcaaccagatcttttccgatactaaatatttcaggaagctctgactgatagttggttataagaaaacctccagcccctaatacatcaaatattctgagtggtagtccggagcggatggacttggctgttatgttgaggttgattttactgcaattaaatataagaggcatttcatcaagcgatcttgcaaaaccacagttgtgaatgtgtggcatgctgcttgtgtcacttcctgtatatatattgacttgaaatgagtctgacagcattccaagaagcctcagcctttcctgttcggcgaccttcacactaagatagtactgggcaacaagcgctttgacatcagttcttgaacctggcgggaattcatagtgtgatggtatgcatgacagaagccgttctgctgtttcatcagtaagtatattttctataaagttataaccataaacccatatctgtgaattgattattccatcaacaaagcctttgtcatagtcagacaggacggcattgttgaaatgacatttttcctgatatgttgaacctataaatgaaatgtcgctattgtattgacttgacttatccttacttgctgatgatattaccttgttgctgcggattaggtttgtggcaagaggaatatggaaaatatgtccgttattatagcgacagaattcgttatagagcaatctgtcaaatagaaatactctgttcacattattggatagtgcattagaatacagttccagtacagggctgtcgacaataagacttatgtatatcagtccggttatctggcagatatcagacagccatgggaagaaattgattgtgaacacaaatgaataattattgcctgtaagtcttggtgcaactatggcagaacattgcgatggcatcagatttttgttatatatttctgcagtttcttcatcaacttcaagaccaatgcgtctgaaagcatctattacgtctggttcacacagacttccatatctgtacatgaatattttcattatgaattttatcccctttcacataacactgtatgctgtatatatgttttatgtaatatagtttattatatattaatgatattggcaattcataagtcaaatgttataattttatattattatatgtgtcaggtaattataaagggggatatacgtgaagaagttaagtgtaattgtaccatgctacaatgtaggacagtatattgaccggtgtgtggaatcgctgacaagccagacacttgataagtcacaatatgagataattctggtggatgatgcttcaactgatgatacgtggaaacatattgaggattgggaaaacaggtttcctaatattattattacagttcattgtgatgttaatggtaagatgggacgtgcgagaaatatcgggttgacgtatgcaagtggtgaatatataggatatgcagacagtgatgactggaccgagcctgagatgtttgaaaagatgcttgaggcagcagagaatggcaagatggatgttgttgtgtgcaaaagcataagggatcacggcaatgattatgacaagtcgaaagctggtacgggcagaattgatgttatgaatattgattctgaagttaagagaaaggaattcatagtagccaatcccatgagttatgctgtgtgggataagattatcaggcactcattgctttctgataataatatttcgtttcctgaaggatttgcatatgaagatatatattatggaactttgttgcatttgtacgcggtaaagattgcatttgttgattctgtattttatcattattttgttaatccaaagtctacagttttattaaaggatgttggatatcataaggatataatgagtgttaacaggatgctgtttgaggaacttaatgcaagaggatgtttcggcttatatcatgatgagctggagctggatttgttgtttacctggtatctgggaacagtcaaggtcatatgtttaagatttcagaaaccaccatatgatatgttttgcagcttgaaacaggaggtgctggagtgcatgcctgattgttttgacaatccgtatgttgcaacgagcatgaaggagttttatcagcttcttgtacaattattaaaatgtaatgtaacggagaatgaactgattcagatagcagataattttaagaaaatgtaatactatattacatgtgatgattattataaaggatggaaaaacaatgacagataagaatacattttataatatgttaaagagtaatgccgagagccagccagacgctgtggctgtcgtttatgatacgatgaaagttacttatgcgaagctttttgatgatgtaactaagaaggcattacattttcagaaatttgaaggaaagaggattgcaatattcgggccggcttcatatagatggatcgttaatatgttcggaacgattgttgcgggaaaggagcttgcacttgttgatttcttccttcctcatgattcgagggttgaccttcttaagaagacggaagttaattatacactgacatctactaaccagtatattctctctgatgagaattcaattattatatcaagtgcggagaaggataatgttgacggacttatatatgatgagaatacgcaggagggcgatattatcatgtttacggctacagctaatgaatgtgataagccggttgttctgtctgttgataatattcttaatgcggttatggcgataaacagcagggttgaatgtacaagtgatgatattgtgcttgcacagattccgcttcataatgaatttggatttatatacagcctcatatggcctttgtataatggtgctatggtgtgtataggcagaggcttaagacatgttgatgcagatacttattattataatccaacgattcttataggtactccttctatgattgactatcagcgagctataagtgggtttaataaagaactcaatactattatcataggtggtgcaagctgcccgttcagactttttgagaatctctgtgacagtgatttgaaggtttataatatatatggaatgacagagacttcgggttgtgtaggggttaatgagctttatgatggttcgtatactctttttgataataatgcagtatctattgctgatgatggagagattattgtaagtggaccatgtgtcatgaaaggctattataatgacggggagtctactgaaaatgtattaaaagacggtgtgtatcatacaggtgattacggaaggattaacaatgtcggcagacttgttctgttgcagcgtaatccggatattattctgctgcctacaggtgagaagataagccgtgtaagaactaatgaacagattacagctattaatggagttgcagaaggatttataacattttacaataacaggcttacggcggttattgtgcctattgataagagtgcatcagaagatatatttaaacgccgtattgataagtataatgagaagaagggctaccgctgggagattcagaagattgtgttaagaaaagaacctttgccaagaaattctgatggcacggttgatgaggaagctgtatgtgagcttattggtgattgatattaattttccaccaatccagccgatatatattcaaaaggttcataaagaaaggtgattagaatcatggatgattacagacagcagcagatggatgtacttaaggaagctgttccttacagcgagaagcttattggagcaatagagaaagtctcagatgaacttgcaggagttccttttccagagactcatgatgcagtgaacgttattattgaaggccttaactggctttttgaagtatataatggaactaaggatattattgaggctggggcagttgacgaggcagaagctaattctggtgttaaggagctttcagaggctgtaaaggctgatgatgatgtggctgtttctaaagcacttgtaagacttagtacatttgttaagcagttacatgatgcaggaagcagactgattaatgaataataagaaacataaaggcatccgccggtttatgtattacatgaaccagacggatgccttattttatattatggtagttagatatagccattgaacatcatgcctgagtaggcagaaagattataagggtcattcacaggcttatgcggattcttataagcgacaatcttattgtttacatagttcatagggttgatggagatatcatcagcctttctttggattgatttcttgaatgaatccaaagcgttaaatacatcggaaagtgtgccgtcagaagcagctttctgaataaccgccttattaacttcaattgttccagaggaatcaacagttagaccattcttttcaagctgtggctggtaatccttcattattcttgaaaattctttctttaacttggcattgccctcaaacttatcgttctctttatcagcagcaattgaaaaaagcctgttgtatcctgaaacaagttcgccaatactttctgttatcgaatcagtatcttccctgagacttatggttacaggctcctccgtagtactgttgaagtttattgcaaatgctttgttaattgtaatatcgttggatgccgaagaccgttcctctccattaattgaaaatattgcattagatggatactgtgatactctgtctaagccaaatgcattaatgaagttagtattattcttcattgttggttcatcaaagccttcaacgaaatcaggattattggtctggatatcattgttaggactgatgttaaatattgttggcttaataccgcttataccagtcatgtctgaaactattgagagagcagtgttgccgaggctgtcttcattgacgttggctgctaatccgatgttcgatcggttgatgagtcttgccagcttattctgtatgtcagaattactttcttcctcatctaccgtaaactggaattcataggtcaggttattaatgttaaggtcaaatgaataatcacctggttccacagcgcgattgttaggctgtaagaaattaccggtgttaatctggctggttgccagctgctttacatcaatttcaaagcttgaactgtcaggtgaagtgctgtcgcctatgtattctgcggttacactttgtgggttgctggatactgctgatttcttaaataccatgccgtgaccgtcgcttcctgaaagctcgttggcaatgttacttaattctctggcgttctctttaaggtcgattgcatatttctgtgcggcctctgacatatctgtcttatatgtaggagtctgactgttagatttcagaactctgccatatgtattctttaattgtgctttagtgtgtgtatcgtactttgagttagtcttatgtccatactgggcaagataatagctgtacacgctactgatcataacagtcacctccttgtctgtaataatcggtagaaaatgtaaggaaatccatttccttatatatatcgtatgtttttgtacaaatattataatatgaagttcattttttgtcactatattttctttaaaaaagttgttgacgagttggaatgtactgtgctatattagaacggctatggaagcggtcttttttgcgtgcctgaatttcaacaacccaacattgattaggcgggcaaagaaaccaattggtgttttaacacctacaaaaataataattggaggtggaagttgtgcgagtaaagataacattggcatgtactgagtgtaaacagcgcaattacaacatgactaaggaaaagaaagctcatccagacagaatggaaacaaagaagtattgtaagttctgtaaatcacacacattacacaaggaaacaaagtaattagtacagtgaggagtatttcatgggtgatactgtaaaagctaagaagcagaaaaagaactggttcaaaggtttgaaagctgaattttcaaaaattatttggccagaccgtcagtcgcttactaaggaaaccgtagctgtattggctgtgtccgtattattaggtgtaatcattgcagttgtggatttaattgtccgctttggaattgagttcattgtaaaataaggaataggtgattgtatggatgacgcaaaatggtatgtagttcacacttactcaggttatgagaacaaggtgaaggctaacattgagaagacagttgaaaacagaaatcttcacgatcagattcttgaagttatcgttccacttgaaacagtagtggagattaaggatggctctaagaaagctgctcagaagaaaatgtttcctggatacgttcttgtgaagatggtaatgaacgacgatagttggtatgttgtcagaaacacaagaggtgttacagggtttgttggtcctggatcaaagccagtaccacttacaccaacagaaattaagaatctcggcataagccttgaggaagaacaggaagttaagcctgttatccagttcgctggcaaggtcggcgataaggttatgatcctctctggtgcatgggaagatacagttggtgagattaccaatattaatgagggcaagcagtgccttacaattaatgttgagatgttcggtcgtgaaacaccggtcgagattgatttcacagatgtgaagttattgtaagaagcagtcccgatcctgggacgtgggagaccagaatgaatttgctgcgtaaattcattcacaagaattgtctgatggccaattcttggaggatggatagcaaggtaatattatgatggtcgccaattaccacatttatttttaggaggtgccaaaatggcaaagaaagtaacaggatatattaaattacagattcctgccggcaaggctacaccagctccaccagttggtccagcacttggtcagcacggtgttaacatcgtagaattcacaaagcagttcaatgctaagacagcagatcagggagatcttatcatacctgtagttattacagtttatgctgatagaagcttcagctttattacaaagactccacctgcagcagtacttcttaagaaggcttgcaacattaagtcaggatcaggcgtacctaacaagactaaggttgctactattaagagagcagaagttcagaagatcgctgagcttaagatgccagatcttaacgctgcatctatcgaagcagctacttctatgatcgaaggaacagctaagagtatgggtatcgttgtagaagactaatctacatttgattcatgattattgtgggaggaaagatagaatccttccgatattaccactaggaggtttataatgaaaagaggaaagaaatacgttgaggcagccaagaatattgaccgccagacattatacgaagcagcagacgctatctcattagtaaagaagaacgctactgctaaattcgacgagacaatcgaagcacatatcagaacaggttgtgatggacgtcacgctgagcagcagatcagaggagctgttgttcttccacacggaacaggtaagactgtacgtgtattagtatttgctaagggtgctaaggctgatgaggctcttgcagctggagcagatttcgttggtggcgaggagcttattcctaagatccagaacgataactggttcgagttcgacgttgttgttgcaactccagatatgatgggtgttgttggtcgtcttggtcgtgtacttggtcctaagggattaatgccaaaccctaaggctggtacagttactatggatgtaacaaaagctgttaatgatatcaaggctggtaagatcgagtacagacttgacaagactaatatcattcacgtgccaattggtaaggcttcattcacagaggagcagttatcagacaacttccaggctattatggatgcaatcgttaaggctaagccatcttcacttaagggagcttatcttagaagtgtagttctcacttctactatgggacctggtgttaagttaagcacagccaagtatgtgggttaatcagatttttgattaaaaacggttgacattaatatattttgatagtatactatcaacttgtgagcagcattttgctgtcaacataatattttgccgtagacagcaggtccggattcagtattactgatgatggttaaaggtaacacgcctaccgaggatttaaggatttgattaattattccctctctgtctttggcagagagggttttgtttgtagggaaactatagacgaataatcttcacttaggcaaaatcgcttctatatgaagcaagaatctaacaggaggtaattattcatggctattttaaagaatgtaggccttaagacatctactatcgatgagattaaagataactttgacggcgctcagggcgttgttgtagttaactacagtggtcttacagtagaacaggatacacagcttcgtaagcagttaagagaagctggtgtggtttataaggtttataagaacactttagtaaagagagttgttgctggaacagagttcgagccaattgctgatactcttgaaggaactaatgctattgcattctgcaagacagatgctacagcacctgcaagaatcttagctaactttgctaagacagctgatgctcttgagttaaagtgtggcgttgttgaaggaacattctacgatgcagcaggtatcgctacaatcgctactatcccttcaagagaggaacttctttcaaagttacttggaagtatccagtcacctattacaaactttgctcgtgttattaagcagattgctgagaagaacgaggaagttgcttaatcagtttaacactgaattaactatgaaagcagcatagatgctctttcaattttagaataatattaaaaaggagattataataatgacaacacaggaaatcattgaagttattaaaggtttatcagtattagagcttaacgatttagttaaggcttgtgaagaagaatttggcgtatctgcagcagcaggcgttgtagttgcagcagcaggtgctggcgcagcagcagctgaggagaagacagaatttgatgtagagcttacagaagctggagatcagaaggttaaggttatcaaggttgttcgtgaaatcacaggtcttggattaaaggaagctaaggacgttgttgatggcgcacctaaggttgttaaggagcaggcttctaaggaagaggctgaggaaatcaagaagaagctcgaagaagttggagctaaggttactcttaagtaattcacttgattgttctaatgaatataataagaaagacagcgggccttcacggctcctgtcttttcttttttctataaatcacatctttattttattatgccagctatggcagaaatactattatctttatacaattctatatattcgtggaaattttttaaaaatcccttgacatatatatatctttgatgtattatggacaatgcactattgtggtaaattgtgcttattctttgcacatttactgataatgtaatatattaatgtgaagaaaactaaggggtgaaacgtcaatggagaaaaacagattacgcccaataacgtcgggcaaggcaatgcgtatgagtttctcaagacagaaagaagttcttgagatgcctaaccttattgaggtgcagaaggattcttaccagtggtttttgaatgaaggcttgaaagaggtctttgatgacatatctccaattgcagactataatggaagattaagtctggaattcgtagattttgcgttatgtgaagacgaagttaagtattcaattgaagagtgtaaagaaagagatgctacatatgcagcgcctcttaaggttacagtaagacttcataacaaagagacagaaagcatcagcgaacatgagattttcatgggagacctgccattaatgactaagacaggtacatttgtaattaatggtgctgaacgagttattgtcagccagttggtacgttcacctggtatttattatgatatacagaaagataagtatggtaagattttcttgtacagctgtcaggtaattcctaacagaggtgcatggttagagtatgaaacagatgctaatgatatattctatgttaaggttgaccgtaataagaaggttcctattactgttcttatcagagcattaggatttggtactaatgcggagattcttgatatttttggcgaggaacctaagcttcttgctactatggagaaggatacttctactaactatcaggaaggtattcttgaactttataagaagttaagaccgggagaaccattatctgtagagagtgctgaagcacttatttcaggtatgttctttgacccaagaagatatgatcttgcacacgtaggaagatataagtttaataagaagctttctttcaagagcagaattacaggacaggttcttgctgaggatgttgttgatgagaacggaactgttattgcaacagcaggtgagaagcttacaagagaatcagcacaggctattcaggatgcagctgttccttcagtattcattactgtagaagttaaggctgctgatggtacagtatctgacagagttgttaagattctttctaaccgtgcggttgatattactaaatgggttgatatcagcgaagaagaagctaaggagcttggtgtaacagagtatgtatactatcctgttcttgcacagattcttgctgagaatgaatctttagaggatattaaggaagctattactaagaacattgctgaccttattcctaagcatattacagtagaagatattcttgcttctattaattataatatgcaccttgaatatggtgttggtactaaggacgatatcgatcaccttggaaacagacgtatcagagctgtaggagagcttcttcagaaccagttcagaattggtatctcaagaatggaaagagtggtccgtgagagaatgtctacacaggatcttagtggaatatctccacagtcacttattaatattaagcctgtaacagctgctattaaggaattcttcggaagttcgcagttgtcacagttcatggatcagaataaccctcttagtgagattactcataagagacgtctttcagcccttggtcctggtggtctttcaagagatcgtgcaggtttcgaggttcgagatgtacactatactcattatggtagaatgtgtcctatcgagactcctgaaggacctaacattggtcttattaactctcttgcatcttatgcaagaattaatgaatatggattcgttgaagctccttatcgtattgtagataagtctgatcctaagaatccaagagttactgatgaagtacgttacttcacagctgatgaggaagatgatttccatgtagcacaggctaatgctgagattgatgagaatggttatttcgtaagaaatactgtatctggacgttacagagaagaaacttctcagttcgataagagccagattgatcttatggatgtatctcctaagatggtattctcagttgctacatcaatgattccattccttcagaatgatgactgtacacgtgccctcatgggttctaacatgcagcgtcaggccgtacctcttcttatgacagaagctcctgttatcggaactggtattgagaataagactgctgttgactcaggcgtatgtgtagttgcagaggctgatggtgttgttctttcttctgaatctaacaagattgttatcagagaaaaggatggcaaggcgcgtgaatacaagcttactaagttctcaagaagtaaccagagtaactgctataaccagagacctattgttttcaagggtgatgaggttaaggcaggagatgttattgctgatggtccatctacatctaatggtgagattgccctcggtaagaaccctcttatcggtttcatgacttgggaaggttataactacgaggatgctgtacttcttagtgagcgtctcgtaagagatgatgtgtatacatctattcatattgaagaatatgagacagaagcaagagatactaagttaggacctgaagagattacaagagatcttccttcaacaggttcagacgctgtaaaggatcttgatgagaacggtattatccgcgttggtgctgaggtaagagccggagatattcttgttggaaaggt

SEQ ID NO: 870 - DNA, 24536 bp, unidentified
  source 1..24536: mol_type = unassigned DNA
gatatgcgcatggcagaatggcgcgaggcactgcgcaaggcaaagacagctaaggaacgcacctcgacaccgcgtgtgaagatgcccgagcttgcggcagactaccgcgtgacgtgcaatgaggaagtgaatcaagggttgacgattgagatggctatggcagaagcctcgcggtgtcttgactgcgccaacccgcaatgcgtcacaggatgccctgtgggcatcgacattcccggatttatcaaaaacgtggagcgcggcgagtttgccgaggcagcccgtgtgataaaaaagaccagcgcgcttccggcagtttgcggacgcgtctgcccccaggaaaagcagtgtgagagccgttgcatacacaccaagatgaaacacgaagccgtggcgataggctatctggaacgcttcgtagccgactgggcgcgcagccacggttcggccgacgaggaaaaacccgccgcaaacggcatcaaggtggcagttgtgggcagcggaccagccggactcgcctttgccggcgacatggcgaagcgcggctacagcgtcacggtctacgaggcgctgcatgagattggcggagtgctgaaatacggcatccccgagttccgcctgccgaatgccatcgtcgacaccgaaatcgacggtctgcgccgtctgggcgtggagttcgaggccaactgcattgtcggcaagacattaagctacgacgacctccacgccatgggcttcaaaggcatcttcgtggcgtcgggagccggactgccaaggtttatgaacattcccggcgagaatctcaacggagtgatgtcgagcaatgaattcctgacgcgggtcaatctgatgggagccgccagtcaggatgaagacacccccgtgcttcacggccacaatgtggcagtgattggcggcggcaatacggcgatggactccgtgcgcacagcgcgtcgcatgggcgcagaaaacgtgatgctcgtctaccgccgttcggaagacgagatgccggcgcgccgcgaggaagtgaaacacgccaaggaagaaggcgtgcgtttcctcacgctccacaacccattggaatatgagggcgacgagaaaggcaatgtgcgcttgatgcgcctgcagcggatggaactcggcgaacccgacgagtcgggacgccgctctccggtggctgttgatggcgcagtggaggatgtgcccgtcgatttggtgattgtcagcgtaggcgtttcgccaaacccgttgattccgaatgcgattccagaacttgaggtgagccgcagaggcaccatcgtggtcgacgagtcgacaatgcgctcatcgctgcccgacatctatgccggaggcgacattgtgcgtggcggagcgaccgtgattctcgcgatgggcgacggacgccgcgccgcggcagagatggacaaaagcttgcagaaccaataataccaaaaaaatatggacaacttcaagattacggctataggattgatgtcgggcacatcgcttgacggtctcgacgtgtgctgcgccacattctcaaaaaccgacggccgatggcgtttcgcaatcgatgcggcacgcggctatgactatcccgacgatttgaaataccgtctcggcacgggagcgcaacagatgtcggcacacgactttgtggcgttccatagcgaatacggcaagtttcttggcgagcgtgtcgccgactttatgaaggaatacggtatacgtcccgacatcgtggcgtcgcatggacacaccatctttcatgagccaggcaagcgcataatgtttcagataggcgacggcgcagcgattgcagccgaggcgcgtgtgcctgtggtcagcgatttccgtcgtcttgacataatgctcggcggacagggagccccgcttgtgccgattggcgaccgtctgctttttgccgactatgatttctgtctgaacataggaggattctccaacatatcgtatgagtgcgacggagagcggcaggcgtttgacatcagtccggtcaactatgtgctcaatcactattgccgtcagcgtggcctggagtttgaccgcgacggactgattgcccgcagcggcacagtcgacgccgaattgctcgccagtctcgacgcattgccattctactcgcagacaggcgcgaagtcgcttggccgcgaatgggtggagaaagagatatttccgatgattgacagccgcgggcttgaatttgccgacctgctctccaccttcaccgagcatgccgcccgtcaggtggcacgcgtagtgcgcagggtaggcaagccgcatcccacaatgcttataaccggcggcggcgcgctcaacgtctatcttgtggagcgcatccgcgagctggcaggttgcgaagtcaagatacctccacgccagataattgaattcaaggaggcgttgattttcgcgtttctcggcgcgctttatatggcaggcgaggcaagctgcctgtcgtcggtcaccggggcggcatgcgacaacatcggaggaatgctgtttaaaatttagagacatctgtcaacgaaaaagacttaacgcagcggattccgctgcgttaagtctttttaacagtggcggcggttgccacacaccattgccttctggcaaactatgtggttctattttggatataaatcaaagatttttcagtaaaaaaccttaaatggtggcaaattgccaccaccatgacttttgttgttcaggcagttggcggttgcggttgctatttgccaaaaaatatgtgtaattttgtcgttggaaagattcgttttagaaaaaaatagcttcaatggcaaaaccgaatatccttataatatataccggaggaacaatcggcatgattgaaaacccggtgacgaagtcgctgcaaccgttcgacttcacgcaccttatcgacaatgtgcccaaaatcaagaagctcaattattccatcaacaatatccagtttcacccaccgatcgactcgtcaaacatgaatccgtcgcactgggttgaaatcgcacagagcatcgaggagaactatgccagctacgacggctttgtggtgcttcacggcaccgacacgatggcatacaccgcctccgcgttgagttttatgctcgagaacctgcacaagcccgtcatcatcaccggctcccagcttccaatcggcgaagtgcgtaccgacggagaagaaaacctcatcacagcacttcagatagccgccgcccgcgacaagaacggcgacccgatggtgcaggaagtggcgatattgtttgaagactatctgtggcgcggcaaccgcagcacaaagatgagcgccgaccatttcaacgccttcaagagcaacaattatcccgaccttgcccgcataggcctcggcattcatttccatgaagaagcattgtggcgccaacgctcgcagcgaccgcttaaagtgcagaccgcaatggaccgcaacgtgatgtttatcgacatgtttccaggcatcaccgagagtacactccgctatcttctcaacgcccccgacgtgaaaggcatcgtgctcaagacctatggcgccggcaacgccccgaccgacaaatggtttgtcgacctgatgcgcgacgccgtaaagcgcggcgttgtgatagtcaacgtttcgcaatgcgtcaacggcggagtccacagcgagcgctatatgacaggcaacacgctgcagtcgaccggtgtggtcagcggatacgacataacatcagaggcagccatcaccaagctgatgtatctattcggcatggggcttcggtcagaacaggtgaagaaatatctcaattgctcgctgtgtggagagataacaatttaagcctttgaacagaagcattttatatttgaaacagggataataatgcttaaagaattttaaatgcggaaaattttcgctaatagcattgccgtgtaaaaaaaatatagtaattttgcagcggttttcaaaagagagaaacattagtaaatattcactattataaatcaaacaacaatgagcaatcttgatttgacaaagtacggcattactggcgctacagtaatcgcacacaacccatcttacgagcaattgtttgaagaagagacaaaagcaggtctcgaaggttatgaagtaggtcagcagacagaactcggtgcagtcaacgtgatgacaggtatctacaccggtcgttcgcctaaagacaaatacatcgtaaaggatgccaattcaaaggacactgtatggtggacttctgaagaatataagaacgacaaccacccaatgtcggaagacgtatggaacaaggttaagactatcgccaagagcgagctttgcaacaagaacctctatgttgtagacggattctgcggcgcaaacaaggacactcgtatggcagttcgtttcatcgttgaggttgcatggcaggctcacttcgttacaaacatgttcatccgtccaacagaagaagagttgaagaacttcgagccagatttcgttgtttacaacgcatcaaaggcaaaagttgagaactataaagaactcggactcaactctgagacttgcgtagccttcaacgtaacatcaaaagagcaggtaatcatcaacacttggtatggtggtgagatgaagaaaggtatgttctcaatgatgaactacttcctgccattgaagggcatcgcatcaatgcactgctctgcaaactgcgacatgaacggcgagaacacagcaatcttcttcggtctttcaggaacaggtaagacaacattgtcaacagatcctaagcgtaaacttatcggtgacgacgagcacggatgggacgacaacggcgtgttcaacttcgaaggcggctgctatgcaaaggttatcaacctcgacaaagagtcagagccagatatctacaacgctatcaagcgcaacgcacttcttgagaacgtaacagttgatgcaaacggcaagattgatttcgcagacaagagcgtaacagaaaacactcgtgtttcttacccaatcttccacatcaacaacatccagccgggttcttctgcaccagcagcaaagcaggtaatcttcttgtcggcagacgcattcggtgtattgcctccagtatctatccttactccagagcagactaagtactacttcctctctggctttacagctaagttggcaggtacagagcgcggtatcacagagcctactccaacattctctgcatgcttcggtcaggcattcttggaattgcacccaacaaaatatgcagaagagttggttaagaagatggagaagaacaacgctaaggcttacctcgtaaacactggttggaacggaacaggcaagcgtatctctatccgcgacactcgtggcatcatcgacgctatcttgagcggcgacatcgacaaggctcctacaaaacagatcccgatgttcgacttcaaggttccgactgtattgccaggtgtagcaactgaaatccttgacccacgcgacacttacgctgatgcagctcagtgggaagagaaagctaaggatttggctgcccgcttcatcaagaacttcaagaaatatgagaacaacgaggcaggtaaggctcttgtagctgccggtccgaagttgtaatcagaacttaaagattcaaatatcggggagcgcgtccaattgagggcgcgctctctttgctttttgtggatggtctgatgcaataaaacgcgatggtgtgcgtttaaacattagaataaaagtatgcttttctatgagactcaattttactaagatatttcttgcagccgcaatcgtattggctgccacagtgacatcgtgtaaggctccgcagtcgttggcatatttcgagaatgccgacagcttgaaaacagtcggaacaacagcactcgactatgccgttaaaatccgtccggccgacgagctgataatcacggtcaactccattgtgccggaggcaacggcagcctacaaccttccgctcgtcaatccgtcgcttgagggagaggtgggtgtgtcgtcgacaccgcagaaccagacctatattgtcaatactgacggggaaataacaatgcccgctatcggcaaaatccatgcagccggaatgactaccaaaggcttgtgcgaatatctgacggaaaagatttcgaaggaggttgacagccctgttgtccgcgtccagcttgcaaacttccgcgtcaacgtgcttggcgaggtgaaacgtccgggcgcaatcgaagccaaaagcgagcggttcaccatttttgacgcgcttgccgctgccgaggatatgaccgaatacggcgaacgcacaaacgtgatggtgatacgcgaggaaaacggacaacgcgcctaccaccgcgtgaatcttaaagatgcgaaaatcgtagactcgccatattactatcttcagcagaacgacgtggtctatgtgcagcctaacaaaatcaaggcaggcaatgcgaaatacagccagaacaacgcattcaaggtgacagtggtttccactgttgtcagcgcagtgtcggttatcgcgtcacttgtaattgcattggcagtcaaataacagcgaaaatgctcaatatccaccgggcatatttctacgtgttcttcgtcagcgtgctgggcttgtttttggctccgcatttattgccgtttcttgacgaattgtgtctgttggcatttgcagtgctcgctgtcgtcgacatgacgttcaaccgctgcttcggcaagtataagttgatgtttgtgctgcttggcgtgatggcgttgtatttggcatattctcttgtcgcgtcaccatacaatataccgaaggcgcagattaacgactttattgctcagtgcaagccgctgatagctttttcagtaagttatgccattgcgccgcagttcaccgccaacgagaagtgggtgttgaaaaaggtgtgtattttcttggcgtttatggcatttttcgtcatcgccgccgacatttacgatgtgactatcttccatgtctactatggcggtctgacttgtgtgggctgtgctatggtttatttgctgatgtcgtacgacaacgacaacccacgggcatatacacggtcggatcttatatggacctgcgtaatcctgttgctcggactgatatgcacccgctcgaaatattatgggtttgtggtgctggcattctatatgctgtttgtttatcgtcccggcacggtcaatttcaaaagtgtgcgcagcattgtcgtagccacactcgcattcgcgcttgtggtgcttgtggcgtggaaaaaaattgaatactattttataaccggaaattccgacacgttcgaccccgacgtgatggagacctacgcccggcccgtgctgttcggcggaatggtgcttgtgcttgctgaccacctgctgttgggcagcggtttggctacatacgccacctactcgtcagggcctgatgtcagttactcggatttgtactatgactatggcataaacctgctttgggggttgtcgcccacttatggtgactttatcgcagacactttctatcccgagcttgcgcagttcgggttgttgggaatattcttctttggctatttctgctggtggatatggcggaaataccgcatcgtgatgcgcactcatcattatcagctgtttggaattggagtgatgtcatttgcgttccttgccattgacggtacagctggctgcgctgtgcttcaagcatcagggtcgcttctgatggcagtgatgggaattgtcgccgcgcaagccaaagcggtgaacaaagaagaggcgagagcgttgctggcgcgtccggtgacagagttttatgataataaaaaagaaaaaatagaatatggctacaagttctgacaaggtggatttcagccgtttgcgctatgaaatccgtaagcattggtggtggtttatcgcctcgtttgcagcgatgatggcaatcgctgcagtctatatgcttaaaaacaatcctgaattcaaattccacgccgacattatgatcgaacaggaagaaggcggcggaatgggcggcggaatgatgcagatgatgaagcagttctcgatgggctcgttcggcggcggttcggtagatgatgagatggcggttctgcagtcgcgcagcctgctctgcgaggcaatcaacaagttgggattgcagtatgactacaagggtgttgacggaatgcgcaagctgtcgctctaccgcaagtcgcccgttgaattgtcaacgaatgttgacctcgacacgcttcaaagtggggcgacattcaagattcatctgcgccctgacggcaagattgacgtcaaggtgaaaggcaaatggttctccacgctgtttaaacaagacggcatgacattgccggcgacggtgaaacttcccgacggagcgttcaccatccgccgcacggcattttataaagctggggaggagcgcaagcttatagtggaagtgaacggcaccgcacaaacatatgacgactattccaagatatactacgccgacgtgccgtcgctgaaatccaacggcatcacgctattctatcaggacgaggacaagcagcgcggcaaggatttgctcaacatggttgtggagctttacaacatccgtcgtctgcgcgaggagcagacgaaggcttcacgggagatagcctttatcgacgaccgtcttgcgtccttgacaagccaattgtctgagtcggagaagcagcttgaggagttcaagaccgccaacgatgttaccgacatcgccgccgaggcgaaagtgctgctcgagcagacatcgaaaaacaaggcttcgattgtgggcttgcagacacaattgtcgatattcgacatgatttgcgagtttctcgatgacccgaagaataagtattccatgattcctgttaccagcggacaggactacgaaagtgccgcaaaatcaattgaagcctacaatcagttgattcttgaacgcaccaaacttgacatggcagccaagcacgacaacaaggctctgcaggctctcaacaagcagattgacggtatgcgcggaggtgtgatagaaacgatgcgcaaggcgcgtgaaagtgctgagattgcctacaacgacttcgttcgagaagatggcaaatatgcgtcgaggttgaaacagttgccgtcgcacgagcgtcgttatgtcgatctctaccgggatactgaaataaagaataatctttacattttcctgcttgagcagcgcgagtcgaatgcgttgaaatttggagtgcaggagataggccgcattattgaccccgcttatcatgaagttaaaaaggcttggcctaagggctcaattgtgtttggcgcggctttggttctggcaatcataattccgttgctgattctcatgctgcgcgccatccgcacaaaacggataatgattcgtcaggatttggagaaattgaccgattttgagattgtaggagaagtggcagacaatgagctggcagggatgcgccgagtgcgcgaccgtctgattgcttccgaaggagtaggcgtggtagccatagcctgtgtcaagtcggagtcgggaacagccggcattgccgccgctctcgccacctcgttcggtaatgctttgagaaaggcggtagtggttgatttatgcggaaattcaagcgcggcagccactcttgatgactatctcgttggaaaagcgacgattgacagtgttgtcggcggaaacgcagacggatttgatgtaattgcgtccagaggcgaccaatcaatcgatttgattgcttcggaacagtttgctgtgcttgtcgacagcctgcgcaagaattatgattatgtaatccttgccggcgacgcatttggcgactatagcgcgttcagcgttgtagccacaatggcagaccgtatgcttggctgtgttgaggctggtgagcttagagaaaactttactgaatttgacaatgagttgaaggcactttcgttgccgagtggatatatctttcaaaaatagttatgagagtactgattgtaaataagttctattatccgcgcggcggcgactgcgtgtgcgcgatgtcgcttgagcgactgctgcgtgagcggggacatcagacggctgtctttgcaatggactatccggacaatatagcaaccgatttcaatcaatattatgctccggaggtgtcgttctccggaggaattggcggcaaactggcggcggcaaggcgcatattcggcggtgctggtgttaaggcggcatttgccaggcttctcagcgatttcaagccagacgtggtgcacttcaacaacatccactcctatctgtcgcctgtaatcgtggaaatggctaagaaattcggagccaggacagtgtggacgatgcacgattacaaacttgtatgtccgtcatacagctgcctgaacgatggcaaggtgtgcgagcaatgtatagaaggcagcaaacgaggagtctattccaaccgttgtatgaaaggcagccgtgcggcgagcctgctggcatggcttgaggcggaaaaatggaatacgaagcgcttgcagcgcgccacggacacgtttgtctgtccaagcgaatttatggcatcgaaaatgaagcaggggggctttgatgagaaaaaaatcaaggtggtctgcaactttgtcgatccagagaaagtgaaagacatcaaagtgaacaccgagcgtaaggactattatgcgtatgtgggacggctgtcggcagaaaaaggagtggagacgctgcttaaggccgccgtgcagtttcagataccattgaagatagccggaggcgggccgcttgccgaaggtttgaaatcgcgctacgggcgttgtgacaacatagaatttcttgggcatcagagcgcagcgcaggttaaagaattgctgggaaacgcacgcttctcggttatgccgtcggaatgctacgaaaacaatccgttgagcgttatcgaatcgttgtgtctgggcacaccggtggtgggcgcgcgcatcggtggaatccccgaactgatacaacccggcagcggaatgcttttccgcagcggcagcgttgactcgcttgccaacaacattgccgcggcatgggagtcgccgttcgactatgcggcaatctcagcgcagtcgctgccacgcttcagtgccgagcgctatcttgacagcgtgctggagatatatcaaggatagaaggccaattgaccggatttacgcagcaggcagcctgtcagaggcagcctgctgtcgttttatgccgaaaaagaattgggttaatttatattttgcgaggatatagcggtaaagaaccataggtccggcaacgcctgctgatatgacaagcactgcgccgacggcaaaaaacgggtcgtcaagcagaatgggcgcgaatttttgtaaggcagcctttgcagcgccctcgaatgtggtgtggaacaaatagattatatagcttgtcgccgatattgtcagcaaaccattgattttttttgctcctcttgaaatgatgtcggacaaataaattattgttgcaatcccgacaaaagggatgactgaatgacatacgtcaaatcttatataaaagtattcaagcgcggcaaatgacaggcatacagcccaaaacggaatttttacggatgttgcaatcttgctccagtcgcaacaaacagcaccaagcataaaaaacaccaacatgctctggaattgtttgaaacaaaacacttccggcaggaacggaggaatgcagtacagaagcaatgctgcaccaaggagcaataatcttttttgtttcgtcgcaaacagcggcgcgatgacaaacatccaccacaaagcccagataaaccataagaaatatcccgcttcaggaaaatacagcatttttatatatgcataggcagttactggattctcaacaaacgcatgcttttctgtcagcatcttgattgagatgacaatcacagaaacaacgacatacgggagcatcaaacgcttcagcttcttgaccaaaaacttcgagtatgactctccttcctttttttgtcgccatatatagatgaagccgctggcaaacatgaacaacggcatgtggaaagaataaatgagtttgttcaaacattcataccagaccggagagttctcgggaaagtaatggcctacaaccaccaggacgatgcataaggcttttgctatgtcgaatagaacgattctttgcatattgatgaaaacaaatagtaacgttgtgcaaaggtagtgaattatcatctaaacatctgtcgacatctcctaaattagtttgtttgggaaaaaataattacctttgcaattcgttatattgtatagtgcttatgtgaaaggatacatattgtatggacaaaaatatatcaaaaccgacagacgcctccattattctcacctaccgttgcccgatgcaatgcaagatgtgcaatatctggaaaaatccgacggacaaacataaagaactgaaggcggaggaattgcggagccttccaaaattgaaatttataaatctgactggcggagagccgtttgtcagagaggatttggaagaaattgtggatgtatgctacacaaaaactgaccgcatagtgatttctacgtccggttggtttgatgaccgtgttattgctttggctaagaaatatccgcaaataggcatccgcatatcgatagagggcttgtcgcagaagaacgatgatctgcgtggccgtcagggcggttttgacaaaggattgcgcacgttgttgaaacttcgagagatgggagtgaaagacataggcttcggctgcacggtgtcaaactacaactctaaagacatgttgtcgctttatagcctctcgcgctctcttggaatggagtttgcgacagcatcgtttcataattcatattatttccacaaagaggacaacgttgttacaaacaaggatgaagtgtgtcgtgattttgaagaattgatcaaccttcagttgaaggaatcgcatccgaaatcctggattcgtgcgttcttcaatatgggcctgataaactatattgaagggggtagacgaatgcttccctgcgaggccgggacgatgaactttttcattgacccttatggagaggtctatccttgcaatggccttgaggaacgctattggaaggagtcaatgggcaatatccgcgacagccatgattttatggacatctggacgagtgagcaggcggagaaggtgcgtgcaaaggtgcgtaaatgtcctaagaattgttggatggttggcactgcgtcgccggtaatgcataaatatatcaaagcacctcttggttgggctttgaaaaacaagttgcgcagtctgcaaggcaagccagcctgtctcgacaagaaatggtatgatgtgggacaggatccatgccaaggtgacttgcgtgagaaattttgaaaggatttaagatatgaaggtcgttgtaacaggaacacggggaatcccaaatattatgggtggcgtagaaactcattgtgaggagctgtttccgcgcattgctgctgcggggcacgacgttacggtgatacgccgcagttgttatgtcggtgacgacaatcatatttcgtcatataagggcgttgcgttgaaagacatctatgcaccaagaaagaaaagcttggaggctatagtccacacgtttcttgccgttttgtcggctcggcgtatgcatgccgacatcctgcatatccatgccatcggaccttcgctgatgacccctttcgcacggttgcttggcttgaaagtggtgactacgcaccacggacctgattacgaccgacagaaatggggcgtgttcgctaagtttatgctcaaggctggagagcgtatgggcgctatgttcagcaatgaggtgatagtgatatcccatgtgatagaggatatccttcatcggaaatatgggcgtgactcaaatttgattttcaatggggtgaccaccccggaaaagtcgtcggcgacggactacattgaaggccttggactggagtcgaggaaatatgtggttgcagtaggtcgatttgtcaaagaaaaagggttcgatttgcttatcgatgcattcaaagcgtcggacatgtccaaaaatttcaaattggtcatagcgggagatgctgaccatgaggatgaatattctcagatgctcaagaaaaaagctaaagacagcggcgtggttctgacaggttttattcgaggcgaacgtctgaatcagattctaaccaatgcggcgttgtttgtgctgccgtcctatcacgaaggcttgccaatctcattgcttgaggcaatgagttataatatagatgttgtggtcagcgatataccagccaataaattgccggaacttgacagcgctgatttcttccgttgcggcgaaatggacagtttgacaaaggtgttgaatcaaaaggagaaaaacttggtgcaggaaagggtgtatgatttgaccaactatgattggaatcatatcgcggaacagacaatagccgtctataaaaaagcaatgcggaaatgacggagacgacaggcaggggaaagcaatttctgaaatccgtaggaatatatgctgtcgggaatatcgggtcgaaactgattacgttcctgatgattccgctgtacacgttttttgtcgagacatcggagttcggttattacgacctgtgtcttacggcggttatgttgcttacgagttttgcttcgttgcaactccgcgacggggcgttccgctttttgattgacagcaagactgacgaggaaaaaaccgaggtggtcagcgcaacgatgaggctgctgagccgctcgttgctcgttttcatgctgttgtcggcgattgtgtcgtttgtttatccgataaggtgcctgtggctctcgttcggcttgttggtctcgatggcattgattgaagtgttcgggcagatggcaagaggtgtgggcgagacaaaaacgtttgttgtcagcaacataatctcggcattttccataggcgcgctcagcgtggtgtttgtcgtttggtgcggatggggaataacaggaatcttccttgccaatatttttgcgcgcatgatagccgtagtgtatattgagatcaaggtggggttgttgcacaaatatttcaacgtttcgttgaaaagctctggtatgaccagggatttgctgcgctacgtcctgccgttgttgccatcggtgatgtgctggtggctgaccacgagcagcgaccgtttttttatacagcactacttcacattgtctgacaacggaatttatgctgttgcatcacgttttggcggtataatccagataataggagttataattttccaggcatggcaggagatggcattgcggcagtacagcagtccggaccgcgaccatttcttctcgcggatgataaatctgtttgccatttttatgtcgacggtgttggttggattctcttttggattgaagattctgtatccatatatcgtcgaccaatgttatacaaccggcattgtctatgtattcccgattgcggcggcagcagtgctgtttgcaatgtctaacgtgttggagatgggctatcaatgctcaaaggagactggacgggcattgccaggcgtgatgctcgcggcggtggtcaacattgcgcttaatttcgcattgataaagactgttggagtgtttggtgtcgccatcacgcttgttgtcacctatgccgtgctgctcgcatatcgtctgcacgattcaaagcggtatttcaagttgcggctttcggcaaagtcgatgttttccatgttgtttgccgcggtgagtgcggggctgttttatctgaccgactctattgtggttgatatcgtaatggttgttgtggcgtgtgtgatgctccttcttgtggctcctggagtaatccgacgcaagtaaataaaaagcggaagccctgccgcagtcaagactttcgtagtggagcatagcggactcgaaccgcttacctcaacactgccagtgttgcgctctaccagatgagctaataccccttttctccgatgcaaatttaaaatgaaaatttagtactgcaattccgcagcgatatgttttacagcagtttttgtataaaaaatgagccgttacgtctataaaaagtcattaaaggagcgtgtttttgtaggtgaatggtgttaaatagtgagaaaagttacgctaattgctttgtttttattacttttatagtggttttaggagaaaattaatataatatcaaaatactatttttatgaagaaactcttactcctatttcttcttgcctttttggcggttcctatcgccaatgcggaagagagcgtggtcacattgaccacaaccctcgatgagggagcaagcatcaagctgtatacttgggctgactctatggacgatgcgtttaccatcgactggggcgacggcgtcgagaaaatctacaacaaggtgaagcctagctggacttacggctcggagatcaccggcaagcttggcgcaagcaagaccatcaccatcaagggcgacatcacttatcttgagattaaagagatgcagatttctgccgccactttcgccaacacgaagctgaaagaggtggatatggaaaagaatcagctgacagatttcaatctcagcggactcccggaggttaccaaattgagtcttaacggaaactctattgtaacattctcatcgaccggcaactctgttttgaagaatctcgggctgaagagcaacaagattgactctcatcagtttgagatttcttcgttggcaaatagcctcgagcagctcaatgtgtcggaaaacggagagaattttgtggcgttgaaccttatcaatttcgacaagctgcagtacttcactgccaacgacaatccggagcttaccacagttgtgttctatgacggaagcaccaatttgaagcagataggcatgaacaactgtcacattatgcatttctatgccatctcgttgcctaatctgagctcgctcaacctttccaacaacgcgttgctcgattttgagaacggcacatatcccaaactgtcgacactttcggtaaacggcaactatctctctgagattgacgtgaccaagtttccgaagctgttctcgttcgactgctcaagcaaccagcttacagacataaatgtagccaacaatccggaactcaactatttcaactgcggcaacaataaattgacaagtgttgatgtgtcgaccaacaaggagctcggctcgctgttggtcaacggcaacccattgtcgcgcatcgacatctccaataatgaatcgttgggcacaatcaacatcagcgatacgcagataagttatatcgacttgacgaaggctttgtacctgcgcgatttccgtgcagccaacaccctttgcccgttcttctatttcaactatgtacttcctggcggaaagttctcatatcttgatatgcgcaacaacaagaagatgacaggcaactcgatgacattcacgctgcacacactgccggcgttgaacaaggatgcctacaacaccaatctttttgttgaaggctcgaatgccgagactgccgacactgaatacgtgacgagcaacgaaatgaagtggaaaatcgacgttacaggcgacggcactgccaattgtccggctgtgcctgtgaccgtcaaggctaacgacacaggcgagaaggtgaatgttaccggctatttcggtggcgacatctcaaacgagcgcaactacaactttactaaatattccacaacccacggttcattctacctttcgcagtgggctggcaactattatcaggagcttgccgatgtgacgacaactgcaaaggcaggcgtcgccatcatggtaaacgacactcctgacgaaggctatatgtttgaccacgtcgttgtcaacggcgagagcatctatgagaagacgtttgtggtcaacgaagagtcgacaatcgaagtggtgttccgcggagagacaagtaccatctcgtttaccgctcctatcggtcagtcattgtcgtttgcgctggctgccgaaggcggtaataagccgacagtctcaatcgactggggtaacggttcaagccaggaatatgaggtgagcagcaagaactatgtgcgtatcgacggcgtagcggctacaccggccgaccagtcggcaacaatgtcgacagtgactatcaagggtgaggtgtttgctcttaaccttgaaagctacggcgagtttggcgaggagatgggactgtggaacaacaagatttccggcatcgacctgtcgaagacaaacatactcaacaacttgaacctttacatgaaccctatccgcacgctcgatgtcagcggacagccgttcctcttggagcttgacgcaagctactgcgagctgaaagagattgacgtgacccacaaccctgagctccgctcattctcttgctacggcaacagcctgacgtctgtcgacctgtcgaagaacccagagctgcttgtatgcaacgttaaggtcaaccatcttgaggccatcgacctgtcgaacaatcctaagcttgaggaagtcaacgttgctaacaactacctgacagccatcgacctgtcgatgcttccagcacttggcaaagctacattgatgaacaacgagctgaccacagtcgatctctcgcacaatccagagcttatagatgtcagcgtgggcggaaacttgctcacctcactcgaccttacagccaacaagaaggtgcagatgctctcgttcaacgacaacgcaatccgcagcctcgacctcagcgccaacaccgacctttacaagattgactgcggcggcaatggcatgactgcatgcgaactcaacgacttcttctacacacttccgcagcgcgcgcaggtggttgaagagcaaccgtctgccaacttgacgctgctcacaggcacggaggctactcctaacgatgcagaaaattccgacacatcaatcgcttctgagaaaggttggacgccaagcatgagcggcaacggctctggatgcgacgtggcacgccttattatcgcaccgacagtcaatggctctatcgagttgaaagacgctgaaggaaaggtgatcaactctggcgacaaggtgaaacgtatgtcgcctatcaccatcaaggcaacgcctgacgctggatacgaactcgacaaaatcacagccaacagcaaggtgattgaaggcaatgagttcaagatttcgcgcaacactacggtgacagccctcttcaaggttatgggcagtgtcagcgacgtggcgctcgacggtgtggctatagccggcgccgacggagcagtgcgcgtgagcgtggcaagcgacagcaaggttgaaatcttcgacgtgaacggccgtcgcgtgtttgcaggcaatatctcagccgagacagcaattccgatggcaacaggctattatgccgtgcgcgttgaaaacgccgacggctcgatggcacgcattgtcagtgtgaaataacacttgcaacaaccctatatgaggcgggcacaccaagaaattggcgtgcccgccttcagtttataggctatgtatgcgtcccaatccggataaaagcagtaattttgcagctgattgttttaggaaagaaaaaaattacagaatggtttatcaatgtggaatcatcttcggcttccttgcgataggggagctgatagtgtggctcacaggcatcaaactgccgtcaagcatcatcgggatgctgctgctcacagcgtgcctgcagcttaaatggatacgcctcaggtgggttgagggtatagcgaattttctggtcaagaatcttggattcttctttattccgccaggcgtggcgcttatgctccacctcaatgtcataaaggcgcagttgctgccaatcattgtggcatcggcggtcagcaccgttgtggttatcgtggtcaccggctggattcaccaactggtaagaaaatatcaacatcgtcaattcacgaaacgtcatggaatacattaacaacccatacttcctgcttgcgctcacatttgtggtctacggctcagcgcaactgatacagcgccgcacgcgcttttctttgttcaacccgatacttgtaaccatcgcgctgatcatagtgtttctgatggcttacgacatcccttacgacacctacaaccagtatggctgttacattgagttctggctcaagccggcagtcgtggcgcttgccgtgccgctctacaagcagctgtcgaccgtcaagaagcagctgcttcccataacgctgtcggcgctcggaggctgcatttcaggcatcatctcggtggtgtgggtggcagatgtctgcggcgcgtcgcacgacgtggttatgtcgcttgctgcaaagtcggtaaccacgcctatagccatggaggtgacaagctcgcttggcggcatcccgtcgctaacggcggcggtagtggtcagcgtaggcatcttcggaggcattgtgggctttggcgtaatgcgctggtcgcgcgtccatagcccgatagctcaaggcttgtcgatgggcacggcggcgcatgccgtagggtcgtcgcgggcgtttggcatcagcgaccgttatggcgcttttgccagtctcggactcacgctcaacggcatcttcacagccatcctcactccgtcgattctgcatatcgtcggatatttctaaaggctggaaagttgaaggcacaaaaaaggtacattttaataatatctattgaaattttctgaattttaaaaatgactgattatcaattaaatacacaattgtactatttcattcaatagcgagtaacatcattaaattatgtcttcgttgtccttgatttgcaatttgcaaagaatgtcttccgacaccttggtcgtgttgcttacgaaagtattgacacgctggttccaataccagttgatgaaatccatataactggttttgagaccatgtgccatgtcaaatccatttcctatgataacaagtctgttcatatgctaactgattaaacgtatcttgcctgtaagcaactgttgcatcataccttgcttgattgcctcgtatttagctttcttcgtttcgagagcggtgatttcgttgtccatcttggttaggatggtagcaatggcacgctgttcagccaaagattgtggggcaaaaagtataacattcgctactttctctttattcaagttcttaacactacttccagctgccatagctatatattgttcaaatatagcattagaacttaaaatgtaatatagaaagtccatgtcataagtgttggaataatcctttatgaccagccatccatcatgtatgcatccatctatgtcaagaatatatggtctgccaaaactcatagagtttgaaaggatgaaatctcctttatatacttgtcgtgagtgagatataccttctgggattattttctccgctgtatgtcttataaacttgtcatttggacgaacatcgccaatttttatccagttaataccatcccgatttgtcgtaaggtatgcttctataggtcttggtgaacctccacgttgaatggtagcgttatctcccaactttctttttacccacggctcactaaaacctttaagacgtatttgtcctgtaagaagctgctgcattgcaccttgcttgatattcttctttttctctatcagtttgccgagagaagaaatcaagttgtcaatgcttgtgagggcagaggctatacggcgctgctcattaagaggaggcatcgcaatttctaaattctgaagaatttgcttgttgagtccacctctaccaccatcaccagcagacaacaatcttaatttgtcgtatagagaatctatataaaagtaaagatattttgattcgtatttactattaggcaatattgctgcaatagattgatttgtacataactccaccttgttatatgcagcagttcctcttgtttttccttgccctgcgagacctatcaatacacagtttttcggcaacatatgagtgcctgtattgtcgtatcctttttgtgtgatacgaccattgacatcatatataattttattattcaactctccagaactcatccatctaattgttccattttcccaatattcattgatgttagttgatggagtagcccctgttgatatttcggtaatttggtggatataaagagtctcccactcctcaggaatctttccaatctccgtatctttgaattttgtttctttcatactgtccaatttttactttttcgtttcttcaagtactacccacacaccagatttatcgcttccttcatgtcttatgacgtgtgctttttgcatcaccgacaaatccctctctatcgttcttaaagccaccgacaacgttaccgacatttgcttggcggttattgatggatttgacttgattatagagataataatcctttgacgatcagtaagatttgtttccgacaagtttccgacatttacaccgacatttacaccgacatttacaccgacatttacaccgacattgttattgccacgttcagcaataacatcctctatggtcttgcgttgaatggtagccaatactccgccacaattttcttccattatgggtaatggcaggttaacacgttcaaattcctcttttattttcttgaagccacgcccccatgtttccacgaagcctgctttatagaacacgttggcaatgttgtggtttcgaggaaaagaagaatgcttcttcatcaagtctgctggagtaagctccttgggaagtaaaccatagttccacaattcgatactgcggtcatacactcgcatctggatagccggaccggtgtagtctttgtgagccaatgagttgtatatcaactcacgcaaagctgtctctggtatttccagttgctctacacgctgcaatccctcgtaatggataggagatagcagatatttagtacgaagcgtgtcaaccacacggcttgccatctgaatgacattgccctccaacatatcttgtactatcaagtcgctttcatcagtatggaaacgtccgattttgaagatagcggaaggaaagaactgccccacgtgtttgccaaaaagcagaatagcggcatttttcagttctccatctttggtgaacaatcccaagttgcgcaacacatcctctgtgcttgcatcagcctcgtcctcatccatgcgtccagcttttatgctgcaatgtaaaaagtaatcgatggcttttcggtcaatgtcatcaatagttgcaccatacacaggaatgtcatcccacgagtgtcccattttccgcataatgaactgctgcaaagccaatcctttcaattcctgttttgtagaaccgctgcgataatggtatgttcccttgtaagctattggcacattacttggcgtcaccacaatctcgatgtattctttttctccttctgcaagcaagtttacatcctctacgatgccaagataattgacaatcttgttgggaatgtcttccatcagtttcttggcatcaggcagacctatcacttgcttctcatcattcactccgataaaaatgcgaccaccctgcgcattggcgaaaccacatatccatttcagatattcgtctcgccaagattctttatattctatattttgactttcactaagcatgttgtttcttcgttaaagcgtaaaacccatttcggcaaggtggccgtttacctcattttcgtactcactcacctcttttgtcaattctggtagtgtattctcataccgctccacaagcgaagcaacttctgtaccaatgcgatgagtgactgactgcatcaatgccatgcaaccgccaatgaccgtggcgagccacttgcgttcaacaacaagtgttctaatttcatcctcagtgagagaggcgtatttttctaccaccttattcgtcagtgttgtcgtcagttccttgatttgaactttcagagaagtcaactcgtcatatttgtcaagatactccttaaacactgcaagtgtgtcgggaagaagaggatggtagttctcaatttcaccaattcttctcttgatgtccgctttgttgaatttttcccaaccagcaaaaacgtcttgatgctctgcaataaaggagtttcttgcaagttttgcatttttgttgttgcttggcatatctgccaaagtcaacaaaaataccttttccccttttatcggtttcttacaagttgcagctttgtaagctgctcttatttcattaaccttgtcatagccattgaaatcatcctcgtgctcctctgtcatttcttgtatcaaagactcgatttcttcttgttttgcttttaggatatcaatatgatgtttctcgtctgaaaaatattcatcgagtataatatttacaggaagaaggtcgcatactatctcatcatacatgcaaggtatctcttttgtcttagacttattgctttcagtatcgctgccattatccttcttgttcttcttttccttgacttc

SEQ ID NO: 871 - DNA, 25568 bp, unidentified
  source 1..25568: mol_type = unassigned DNA
  misc_difference 6806: note = a, c, g, or t
  misc_difference 6807: note = a, c, g, or t
  misc_difference 6808: note = a, c, g, or t
  misc_difference 6809: note = a, c, g, or t
  misc_difference 6810: note = a, c, g, or t
  misc_difference 6811: note = a, c, g, or t
  misc_difference 6812: note = a, c, g, or t
  misc_difference 6813: note = a, c, g, or t
  misc_difference 6814: note = a, c, g, or t
  misc_difference 6815: note = a, c, g, or t
ctgaagtccaacactcagcatattgtctccctgatactctatgtacgctctatccccctgacctgcagcgctgtttattaaatcacggctgccttcagcatatacgcataaagacataccaaggaatataacaatccccaataataaacaaaataaagtgcaaataaaactcatacttttctttttcattccatccatcacctttcaatctattatatatataatgtattatagcatttttgtatacgattagtcaatcagtaaatttcctaaaaaacataaatatatattataattacaataaaacaaacaaaaaaacctgaatgttataaagtaaaattcactcaggctttatcaaaatatataattttcaccatactgcttatgttaaatcattatatcaattcttgttctgagaaagttttttaagctcctcctgaaaagtttcaatatctttaaattgcttataaaccgacgcaaatctaacataagcaacctcgtcaatatctctgagacgctccattaccatttcaccgattttttcacttgaaacttctctttgcaaagtattatgaagcgcgctctctatgtcgctaatcatagaatcaatagtctgaagaggcaccgggcggctggcacaggcgttcaaaattccacgttccagcttttccctatcaaaactttgtcttgatttatcttttttaacaactattataggaacactttcaatcttttcgtatgtagtaaaacgcttgccgcagtttaaacattcccttcgccttcttattgccgtgccatcatctgttgaccgggaatccacaaccttactgtctatatgtccgcaatacatgcaacgcatacacagccctccttaaatattaatcaaaagcagccacaatccattgtaaaaacatcaaaatccgtccattcagaccactatatatagtagtatatctcatttttgcaattatgtaaataaaatatataaatttgtcataaaaaagtaactttgtcctataacaaatcagttttttgttttaccataactatatacgtgcatatcagtaactattgtgtttttcatttcatacaaatcctgaagatgagccatatacgttcccggcgtgatagctccgctgaaagccaaactatcaagccctgcatttttcataatatcgtatgtaaacataacacaattagagcctaatgcaaaataagttttatattgtccatcaataaacttaacaaatgaagcaccggaagcccggtaaagctcgcttgccggatcattgcactttttctgttcctccgccggccggccctctttttctgcaatttggaggtcgctttcccagacttcagtttgttttagcatcctatctatctcacgtttaagattcatataatcatctcgacccagttccagcgaaaatcccaccagcattttttcttcatagctcatacaatgctcaatatatggctctctttttgttaaagaagctgttccgccggagataaaaccgcccatcttctgcgagtgctggtcgtaacagccataggagtacaccgttccgtcaaaacagaaatcacaatgtccaaaaccttctatcaatccctgttttaagtgtataaaaatttctaacttgccataactgtcttcaggctttgaaaactttgccttttccatctgtccggattccagcttatcatttatatatttaagggctcttgacggaataaaagccgcaaaaactattggtaatgcaagagatattttgggctttacctttttatttgcataatcagtttcaagaaaactatctatacactccaatgccattgatacagcaaaaactatcagataaatccctgaaataagttcgactgccctaatatgaccaagtgggtcaaagaacaacaatacagaaaatccaaacgccactataccccaaaaaaactttcttatatatccggacactttatcattataaagcagaaagccgcttattaaatttgtaaccgcctgcaccagtgccagcaaactaaaaattctgctgacagcggcttgaaaaaaatctttttgagttaaaataactatactgattactatatacaatatacctgaaataagcgatccaagtctagttccattttttccaaatacagccgaaatcaaagacataaacccaaaagctgccatgccaacagatacaattagaaaaagccatcgaataaaagactcaggcgccgttatcataagaattccgactaccagcagaaatactgccattattaattgaatagctgggtttacccctccgattctttttggcctcatacaaacttccccttttaatatattttacaactgttccataatccggtcaataaattaagattttataaaccaaaatataacgctcaaaatcaataaataagttttttaagtgcttttaatctattaagaatcctgttgttgaaaaagctgaacaggtctcatattgtcatcccacaaaaacaactttgttttactaatatctaatattccgctcccggtatcaagctgaacatcgtatttatttaagtttttgtctgtagtaaacgaacctacagcacactggttaagaaggcatccggattccgtatcatcatacacagctgcataaacattaatatgttttccgtcaggcgttatttcaccctcgttcaacttatttgatatgcttacaacattatctctaagatcttcaatttcccagcgttcagtttcagcaagcttattatattctataattttaaaattgctgaactttgccattgaatagagaggttttgggtatgttcccggattagactcaactcctaaaccaacatacaatgtttcaggcagagactcaaacattatctcatatggctgcctcggattgttagtccaatcagctccgtcatcagatactgaaaattttattaggttgtctcggcgctctatgcgcaaatattcaggtatcctatactggtcaagctgagtattataatctgaatttgaatttgaaatttccatgccatttttattacgcatataaacttgagctatattctctttttcaacttttctagtaataatagaaatattctcacccattctgtccaaattgtcagaaatcatagcaagttttgaattatcagcaggcttatctgtcagcataagtccagctcttattctgtctttatacctaggaatatcctcaacttttacaaccgccgagaaatctccgctgacagcgcggtataaaaatccgcagctgttcttagattttattctgcctgaacctcctaccgtgataataccgttctcatccatagacgctccagcagattccttataccatttggttcctaaaacctcatatttaaattcttcaggcactactccggcaggatttacgcaaacaatcgccgttgctgagtttgcagactcatttttaccgttatacgcacggcaggtataataatgaacgccgcttgacggaaaaatatcaacctctatcttatccgactcaactgtatctataagcatatcaccatcgtaaagctcaatttttgttatttgagtgcctgatttaggaaaggcaactgctgaataattaaacgattcaccttcatttataactttccattcacctttatcaactgttagtcccataaccttatcctgattcgctgctattgcaggagactgtacaacaacatcaggatttgtaggcctcccgctcatctcatccatattatatacgtatgcttcaatccaagtataacctttccattttccttccgaaacaatatcactttctgcataactgcccattccatttttctctttccagtcctgagaaatctcaaaacgtctatacacaggttcggaatttatataccctccaacttcttttggagaattaataatatgtcctgtcccgttttttatatcggttataacctttgcgtctatagcatctctttttggaattgaagcgcccacagtatcaagtatagaattatatgtatcaaaagcagtctcctgcggcacttcatactcacccaaatcaatcggtttatccaggatcacagcgttgttcagatttgtaactccgataagattatcattagtaatagtatcaactccatcaattacgtttccgctgaaatagaaacttgactttgatatatccggagtctcgttttcaatattgtaaaaaacatttcgaacctccgcacctgagcttggtccccatctataaaagttatttacataattcactgtacacggcttaaaagtcaaatagtttattgaatgaggctgccccccatacgaagctgtcccgccccagtcgtaaataacattattggctacattaacattctgaatttcacggtatatagccggattgcgggacttgttgtgagcataaacattatggtaaagcgtggaattatctgttccaaaaattgacccataaccatgctcgcctttttggtgacgggaaagattaagtgcttcgctcatcaaacaattctgaacagtaacattttttccaagctcatatctttgattttcggaacttcctgaataaaccgagacaagctcatcaacagcccagcttacactgcaatgatctattataacgtcgcttatatactgcattgatatgccgtctacctctttttccaatctatcaccgggtcttatttttaaatatcgtattattatgtttgacttccccgcgaaatcacttaaatcagtgccttcaattgtaatcccttcccccggcgcagtctgccccaaaatagttgtattgctttctatacggagctgtttccatttatcataagaaatcgtaccgccgacgtcaaacacaactattctgttgctctttgaaacagcctctgtaagagaccccggacctgtactttccaaagtggtaacatggtaaacttccgggttttctgaggcacgagctcccattgcatattttcctccgccctcagccccgggaaaagcaagcactttttcaccgtcagcccacacaggcaggacggcagtacatactatggaaaaaattattatacaaaataataatactcccctttttcgcatagctccctccacctttcttataaaacaatttataagagtcttaaatacttataatttataaattaagaacacgattctatttactaaattgtaccataccgataaagttaattcaacttaaattcaaaattcatttgacaagaataaggattaagatttatcagaaacacatttcttattaatattataattaagttatatttaaaatttattctatactatttttattatttttaaattaaattacaatatttgacaaaatattgcatttcatttataatataataaactataaacggagggattattatgaaaaagaattttaaaaaactttctgtcgctgcagtaatttttgcactgtttacggcagtaatgtcatttcagatttttgcatccactgatgtaataactgtttttgttgacggagaacaaattaattttgatgttgatcctgtcaccgaaaatgacagaactttggttccaatgcgtgctatatttgaagctttgggagcaacagtaacttgggatgaaacaacacaaaccgcaatagctgtaaaagatgtcaatacgattaaaataactatagacagcaatataatgtacaaaaatgaggaatccataattttagatgttcccgccagaatgatagaagatagaaccttagtacctattcgtgccgtttcagaaagccttgatgcagctgtagactggatagaagaaacacaacaagttattataaccggaacagctccggttcccacagctataatatctgaaaacactccttcaccaattcctgaaccgactgctgttgcagttactaaaccaactcctggcacttcaactgaagggtcaattaaagcaagtgaattaactgactctgacatgaaaaagctaaaagactcagcagaaaatttgagatattcatatgaacagacattgcttccatatttactttataatacaaataatttttataactatctaaacgaaaaaccggaagagttaaagaacactataaaaaatgaatggtatttggcagtagaacgtgctattcttaacattcagctggaatccgaatcaacttacataattgataatacatttttagaagatgctcccgatttagatgtaatgtataacgcatataaaaatattattactaaggcagatttagattttgaagatatagtcgaagaaattaaaatagaaagtattaataattcaactaaagcagcagttatcatattcaaagacgctgacagtacctacagtattgaatgcaaatgcgtcgctcttacagctgattcttcagacaaccgtcaatgttatactatggaaggagattttctgacaacagactcttggttcttctgctttatcaatactaacagccgcggtacaattggttattttaccaaagtaagtgacagtaaagattattcagcctttattgcaatgataaaatttgctgtaggcaaagagtttaaataaactactttaaaatactaatattaaaacaggataggttatataacctatcctgtttaatataaatcttgttattctgacagcaatgtatagtctctctcaaaaagttcattgcaaatctgatgctttaatttttcggtttcaactttttccattaaatatnnnnnnnnnnttttataacaaaatatttgcttttttgactgtatttatgcagtccgttctcaagctggatgtttagaagctcgctcctccacagcaatgacagctgccagcgcattttagcttttttgttatgttcggcctcgcgcataatatttactcccgtatcctttgatactgtcacaataccccagtgttccggcacatgttcaccagcatgttttttgtgactttctccaaccactaagtaattgaaatcaaaaaatttatcatagtctttaacctgtgttaaaagtcgctgataactgtcgctgtcacttttaagttcataccctattattctatccggtaaaaccgcaacaacatccgcacgcgatttccctattaccttttcctctataactcttactttctcatattttgaatccaaataccaaaaaaaggcgtctttcatctccatctcaagcataatttcaccctaaccggttttttacttttattctaactccgtattttttaaaaaaatactccttattgcactttttctgtccaattatttttgatgtctctgaagacggcgctattatctcataatcacagtcccttaatctcttctgtataatctcttcctcaattttatccttgtatacagcgttttcaacaagttccccaaatgcagagtgaaaagggcctgccacaatattcccctcgcttctcaagtcctctcccggataaagcccaattctaataacctctactcctgctttcctaaacatcagcaaacaccttttcgcagtgctgacagcagtttcaagagtatatggtatgtattctccgcggatgtataaactctcaagcgctgttccgctaagcactagagtaggatatattcgtgtgcatttgggttcaagctctataattttcctgcatgtttcaatatcggtttccgggtctgagccatacattcccagcatcatctgaagcccaagttctattccgaatgattttatcatttccgccgcacgaattacatcttcaaaaacatgccctcttctgttcagttcgagaactctgttactggctgactgaacgcccagctcaattgttttaactccaaactccacacattgctctaaaatttctttatttatatagtcaggcctggtagacattcttattccgattatccgttcgtctttaaatcccgaagctgcctccaagaattctcgctgcagctccatatcaagaccggtaaaacttcctccaaagtaggctatttcaatctgacaatcttcagattttattgttgaaagatactgagctatttcctctttagctttatcaggagaaaccgaactttgaatccctgttatctttctttgattgcagaacacacaatcatgtccgcatccttcatgaggaataaaaataggtatattatattttcgcatagctattccttacttcccttaaccttagcaagcgcagcttttgcggcttcctgctctgcgctttttcggttttttccctcgcctttgccgattacttcatcacggtacagcgcttccacaaaaaacgtcgggtcatggtcaggtccatttttatttaccaaacgatacttaacaacttctctgtttctatcacgcttttgataataactctgtatttcagacttatagttttccagttcaacataagaagtatcgcctatcatgctgcctattgtatccataataaagtcttttgcgctttctattccgctatctaaataaatagccgccagtaacgcctcatatgcgtcagccaaaacggaatctttatcctttccgcctgacatacgttcagactttccaaactttaaatcctctccaagtttaagatttctggcagcaatagccaaagtcttttcacacactgcatttgcgcgaagttctgtcaatactccctcgtccaccttcttatattcattataaatataagtagcaaccacaaacgagagaacgctatcacccaaaaattcaagccgctgattgctttctatatgaagatcattggcaagtgaaatatgcgtcattgccaaatcaaatagttttttatttttaaatttataattatattccattgctatactcctgttcaaaatgcttttccataacataattagtcaataaaacatcttttctttcaacttgttgacgttttatcactttataaccatatctctcaaaaaaaccttttgcagttatagacgcacatgtccaaatccttttaaatcctgactgtatagcttgctcttcgagtgaatccaaaatgatttttccgtatcccaatccctgaaagtctttatgaacatacagtctatccaaatattctccgtctatatctccaaacgcggcaatcttccccattacctttacttctaaagaaaaatgctcagataatgatttgtcccacttatctttatctataccgcccatccaagcggcaatctgttctgcagtataatctcttttgttgatatgtttcacggtatcgcaaaacatactacatatttcattaatatcattatgtgaataacggcaaattttaaccgctttacttttaatatattcaagtatcttttccagtccttcgaaataattatcggttatctcaaaatacggaagttcatatttaatacactcttcctttattctctcattttcattaataaaaaatttaatttctctgctctccgggaattttctatcttcaactatattttcgtattttattatcttatcaaagttttcaataatatattgttttgacaatacaataaaaacaacagttaaatcatcacataaaagttttttaaccttttcacatggaaaatagcagccttccaaaattgtattttgattattttcaatacaggttccgatgaaaccttctataaatccccacatcttttctgctattgtctcatcactgtcaactgctgaaaaaccgcagtcattaaagccgcgtatcaatcccatttttatatggtctaagttagtgcagggaattttatacttttcaatcagctttttagataaaaaagtttttccgctatggctcgctcctcctattataatcaccatataaataacctcttaatctttgtcatataaaaatcgggaggattgaccctcccgacctgatattatgtatttactaatcagtatacttcttaaacacgatagaagcattatgtccgccaaatcctaatgaattcgatatagcataatttatttcagactttctgcccttattaggaacatagtccaaatcacattcagggtcaggggtttcgagattaatcgtaggcggcaaatagtcgtctttaacagcaagtgctgtaattattccctcaactccgccggcagcgccaagcatatgtcccgtcatggatttggttgagcttacagccagcttatatgcatggtccccaaaaacagtcttaattgctgcagtttcaaacttatcattataaggtgttgatgttccatgagcatttatatagtcaatatcttcaggttttattccggcgtctttgacagccagtgctaaacaccttgcaccgccttcaccttcaggagcaggagccgtcatatgatatgcgtcattcgttgagccatatccaacaagttctgctattatgttagctcctctctgaagcgcatgttccaaactttcgattataagaataccactgccttcgcccataataaaaccatctcgattagcgtcaaaaggtgaacatgctttctcaggtatatcgtttctggttgttaaagccttcattgatgaaaatccagccaaagcaagttcatttatagtagcctcagctccgcccgctattataacgtcagcgtctccgcgctgaacggcaagcattgcatgaccaatagaatcagttccggaagcacacgcagaaacagtagtcatattaatacctttacaattaaacataattccaatttgacctacggccatatttgaaatcatcatcggtatcataaatggagaaacctttcccggccccttctcaagcattcttttatgctgttcacataaggtgtttattccgccgattccggatccaaccataacgcctactctagttgggtcttcactgtccatatcaagttttgcgtcctcaatagccattttagctccggcaaccgcatactgtacaaacaagtccatacgcttagcttcttttttatcaatataatctgtaacctgaaagtctttgacctcagctccaacatgacatgcaaaatctgttgggtcaaatcttgtaatagtgccaatgcctgatacaccgtttttaatattttcccaaatttcttctctgcctataccaaccggggtaactcccccaacgcctgttacaaccactctattcatatttatcctcctatttcaatccgatgcacagcatcaaaataaataaccattgcccgcaaaaatatgcaggaaaacaaaatcaaatacgatttagacacggtcaaatcatatagagacttgcaccgcataacatcaagccggatgcaaacttctatataattcataccgagtctggaaacccgcggagattttttaatctccgcagtccagcctattgcataattagtcttgatgttctttaatgtattcaacagcatctttaaccgctgtaatcttttcagcatcctcatcaggaatctctatgtcgaattcttcttcaagagccatcattaattcaacaatgtcaagagaatctgcttccaaatcatcaataaatgatgcttccatagttacagcgtcctctgatactccgagctgatcaactgtgatttcctttactttttcaaaaatttccatttcaattctcctccaaaataaaatttcatttttatttatataaatttatttttactataaatagttatatcacattacaagtccgccgtcaacatttattacttgacctgtaatatattctgatttgtcactgccaaggaatactgctaaattagctatatcctcaacttgtccaaattttttaagcggaatagaatctttgtaagactgctgtatatcctcactgagcttatcagtcataggtgttctgataaatcctggagcaattgcattacagcgtatattacgcgaagcaagctctttggcaacagatttagtaagacctattaagccagccttagaagctgaataattagcctgacctgcgttgcctgtcacgccggatacagacgccatatttattataacgccgtttctttgcttcattaaagtacgtgtagctgatttaataacattaaacgctcccttcaagttaacagtaagaacagcgtcccaatcagactcgctcattcgcataataagattatcccttgttatacctgcattattgactataacatcaacgcttccaaattcatcctttgcaaactttatcagtgcgtcagtatcatccggttttgagacatcacccaatatgtatttagcgtctcctcccaatgcttttatttcatcacataccgcctgagcggtttcagcctggccgtctatatttatatcaaacacgactacatttgcaccctcagcgccaaacttaagagctatttctctgcctattcctctggcacttccggtaactataacacacttatccttaaactccactttcactacctccgattgttaattataattggcagtcaaacttttcaaaaaatatttatctaactctatctgaaaaaacagaacctttattataagcttaatgcctcttttgtcttttctaatgacgccatatcttcaatatttaaaatagttttagtcttatctattctctttacaaaaccgctcagagcctttccgggtcctatttcaataaatgtgtctactccgtcagctatcattctttttaaactttcttcaaataatactgagcttgaaacctgacgaaccaaaagctcttttatttcatccttgctctttatgtaatcacctgtcacgttggtaattatcggaacatccatttcagatacagtgacattttcaagttcttttccgagtttctctccggcaccctttaacatactgcagtgaaacggcgctgaaacaggcattagcatagcgcgcttagcgcctttttcctttgcaagttcacacgcgtattcaacagccgcaacctcaccggccacggtaatctgtcccggacagttaaagtttgccggctcacatattcctttgcttgaagcctgcttacatatttcttttacatcctcaggcgttaacgcaattatcgcagccattgcgcctactcccaaaggaacttcctcctgcatatacttgcctctcttcttaacaagcttaaccgcgtccgtaaactccatgcttcctgaagctacgtgagcagtgtattctccaagactaagtccggcaacaacatcgggtgtaagacctaaactttcagccactcttaaagccgccacagacatagtcaagatggccggctgtgtattctcagttatcattaaagtgtccttatcgccgttccaaaccatatcctttatatcaaatcccaaagcttcgcttgcgctgttaaaaacctcgtcagctacaggaaagttctcacaaagctctttacccattccaatagcctgtgctccctgtcctgaaaataaaaatgctgttttcatatttatcatagcctttctggctcacattgttataagaccgcgtttcttaccgtgagccggataagaccgcttatgtaaaacaataactctatctaatatacaacagtatatttaaaattcaacatccttaaaataatctttaactatctcagcgcatggctgtatctcatgcaccatagctgcgctttgccctgccataagagaaccgttttcaatatcaccgtcttgaaaggcgcgtcttaaaccgcctactccaagtttttctatctcctcggcagaagctccttctttttcaagtctctgatattctttggtcagcttatttttcaaagctctgacaggcgctccagttgaacgtccggtaacaacagcgtctctgtctttggccttcaaaacagcatttttgtaattttcatgtgcaatacattcagttgaacaaataaatctagtcccaacctgtataccgtctgcgcccaaagcaaacgctgccttagtacctctgctgtctgcatatccgccggcagacacaaccggaatagaaaccgcgtccacaacctgcggtgtgagaaccatggtggttagctcaccaatgtggcctcctgcttcggttccttcagctattaccgcgtcagctcccgctttttccattcttttagccatagctacgctcgctataaccggcataattttaattccggcttccttcagtctttctatgtacttgcccgggttacctgctcccgtggcaacaactgccggcttttcttctataaccacttccattacctcatcggaaaacggagacatcagcataacattaacgccaaacggcttatctgttaaggttctggctttcttaatctgctctctgaccacgtcagcaggcgcaccgccagccgcaatcaatcccaaacctccggcatttgacacagccgccgcaagttcagcagtggccacccaagccataccaccctgtataatcggatactctataccaagtaattcacaaattctgttcatattttcctcctaaagaacatgtttacaattcaataagcacactgccccatgtaagaccgccgcccatactcactataaccaatttttgacctttttttattctgccttcctctatagcctgacacaaagctaccgggatacatgcggcagacatatttccaaactgctcaacattggaaaatactcggctttcatcaagacccagcctctttctggcactttgtattatcctttgattcgcttggtgaggaataaccaaatctatatcatcaatcgtatacccagcattttcaaccacttctattgtcgaacttaccattgtcttcacagcaaacttatataccaactgcccgtccatccaaatagttctgtagtttccaaatggacgtctctctttatcaagctcagaaacttttaatccacacacagttaaaacgtcccctgcgtcgccgtcagcacctaaaactgaacccaagacccctgtctcttcatcagtagcctgcaaaattgcagcgcctgcgccgtctccaaacaaaacgcatgtgcttctgtctttatattcagtaattttcgtcagagtatccgctccgataactaacacatttttataaactccgttttcaacaaactgagtagcgacagtaatggcgaaaataaaccccgggcacgccgcattcacatcaaaggccgcagcattcttggcgcctatcttactttgcacaatacatgcgcctgacggcgtatacatctccggcgacactgaagccataacaataaggtcaatctcactcgcatccatgccggcgtcttttaaggcattttctgccgcctttgccgcaagatcagaagcaaatgtattttcatcactcattcggcgttcttttataccaactctttgcagaatccattcatcactggtttcgactataccctcaaaataagcgttatcaagtatcttttcgggcagatatctgcctacgcccacaatttttgcatgctttttactcatatcatcattgcctttcctataatattttcacagcatagatttttaacactattctatgccgaagcatcaatccatccctttaaatcaatatttatttatattttcagaaatagtgtccactagattattgttcaccatatctatagactgtctgattgcatgataaaacgctttcgcattagaactcccatgcgcctttactaccggctttgtacatcctaaaagcggagctccaccgtattcagtataatcaagagttttaccaagctcattaattccgcccttaaccataagagccgcaatcttagttttaaggtttttgaaaaaaatacccttcaacattcgttttattactattcccataccttccataaactttaaaattacatttcctgtaaatccatcacacactacaacgtcaaccgctccgcatggaatttcacggccctcaatatatccagtatagtttatcggtatttctttcaaaagcctgtttgcttctgtaacatcctcggttcccttttcttcttcagaacctatattaactaatcctactcttggattcttaatatgcataattttctccatatatatagaacccattattgcaaactgttttaagaatgccgcgcttgactcaacattagctcctccgtcgaccaacaaaaaacagcctgtttcagccggcattagaggcgccaaagccacgcgtcttactccctttatccttttgactatcagagtggctccggttatcaaagccccggtgttcccggcactgaccataacgtctccctgacctttatggagcatatcaagcccaacccttaaagacgaatcctttttctgtcttatcgcggtagtcggctcatcgtctccgcttattacttcctcagcattttgtatctttatcctatctccgttatatccggccttttttaaatgttcgctgattatatccttttttcctaccagtgtaataatttcaccaaaatcatttgctgccattatacagccctttacaatttcttccggggcgttgtctccgcccatcgcgtctactattatattcatattctcattcctatctatcgctaacacattaatataaaactctcaaaatttcaatacatgttacattcatgtaacatccccgttacttaaacgttaacaattccctgtttttatatacataatctatccctgaaagaacagtcagcactacagagattataaccaatatcattacaagaaaattgccgaatcccccctgcaatggatcttttccaaccattactatttgatttatcagcaccacaataatcattgcaaattgtgaaacagttttaagctttccaaagaagctggctgaaataaccctgttttgttcaagagccagcatacgcataccagttacaatcaattctcttgcaataattattatcaaaacccatgcgtttatataaggcacatctgcagccaaaaaacaaactaatgctcccagtgtcaaaagtttatccgccattggatccataagttttccaaatgttgtaacgctgtttgttcttctggctatttgaccatcaaaaaaatcagtcacagccgccaaaataaaagtcaccaaggctaaatataaaccaacagtgccgcagctcaagaataaaatcataaacaatggtatcagtatcactctaagcaaagttaatttattaggtaagttcatattatttcctccaaaaaacaattttataaatcattaattgcacaagttatacctcagatccaaataaatccatatccattgcctgttcaactttaacatcaacaaaatcgccttcattaagctttcttcccgatttaaaaaacacttttccgtctatctccatggaatctgcataagttctgccgtaataactttttattatttcatcacgcccttcaacaagcactttgacaatacttccgattttgttctgattcttcatatcgtctatttctgcctgcgtaaacattatcatttcttggcggcgcactttttcttcttcatcaacctggtcaggaagattatatgcaggcgtatcctcttctctcgaataagtaaatacgccgagcctgtcaaattcagctttttcaacaaactcattcagctccaaaaagtcagactcgctctctcccggaaatccaacgataagagatgttcttataactatatcgggtattctcctcctaagcttactcaacaaagtaactatttgttccttatctgttcttcgtcccatccgctttaaaattttatcatttatatgctgaataggtatatcaagataattacaaattttgttttcttctgctataacatcaatcagctcatcagtcacaagctccggataacaataatgaatcctcacccattctattccgtctatcctgcaaagctctctgagaagtttcggaagggcatattcatcataaatatcaataccatatctagttgtgtcctgagctattacaataatttctttaactccgtccttagccattttatgagcttcatctaaaatgtcctcaactttacggcttctgtaatttccgcggatagatggtataacacaatatgtacaacggttatcacagccctcggctatctttaaaaaagctgtatatccaggggtggtacgaaccctttcgtgctcacaaagaagcggcttctccgaacatttaacaggtttatcgtcttcgttcaggcagctttctataacctcggctattctgtcatactcgttagttcctataaccgcgtcaacctcgggtatctcagataatatctgctccttataccgctgcgcaagacagccggttactatcaataattcagcattgccggaatttttgtattgtgaaagctcaagaatacagtcaatcgattctcgctgagcatcctcaataaatgtgcatgtattaacgattatgatatttgcatcctcttcattctcacaaatctcataaccggcttcttcaagtattgacagcatttgttcgctgtctatctgattttttgagcatccgagcgacgccatagatatttttttcaaatcggctttctccttaaatttcaatctaatcctctaagtaaaactctatatctaactcatccaaaacggttcttatctcactgagcgaaaagcctcggcgtgccagcatggttctgaatttttcatactcttttcttgtagtaatatcagcaacctgcagcctttgctttacaaattcacgcaaggcattctccgggtcaacatcagcctcatcaaacgcgcggtcaattattgaagacgatacgcctttgcgcaagagttcctgcctgatacgaaaagtccccttgtatcctatgtttacaccatcagcaatataacagtcagcataatgtttgtcatctaaaaaaccttcactgataagttcacttactatactctccgccaattctgaactatagcctttacggcgcagtttatcaaagatttctcttgaggtatacattcttgaagcgagaaatctcatagcaagttttttcccttttaatatctcatccatcatttttatcacttacctaaatagaagtattcaaaacaatttattttttcttctttggtttttctaatcctgcaacaggcttttcgtcaaacatgctctccgcctcttctccaatcataggcagtccggcgctttcacgaatcttattttctatctcatcagcaagctcaggattatcctttaaaatagacttaacagtttcacgtccctgtcccagcctttcctcattataactgaaccacgagccgctctttttaactatatccatatcaacggcaacgtcaagtatatttccttctcttgatattccctcaccatacataatatcaaattcagcttctttaaacggcggagcaaccttatttttaactacttttattcttgttctgtttcctataactccgccgtcgcctttaagactttcgatacgtctgacatcgagccttacggaagcatagaatttcagcgcacgtccgccggtagtagtctcaggattgccaaacataaccccaactttttcacgcagctgatttataaaaattgcagttgtattagacttcgaaataatacctgccagctttctgagagcctgagacatcagtcttgcctggagccccacatgagaatcacccataagcccttcaatttctgctttaggaacaagcgctgcaacagagtcaataactattacatcaaccgcaccgcttcttacaagctgttcggttatttctaaagcctgttctccggtatccggctgtgatactatcaaatcatcggtctgaactcccaaagcctcagcataaatagggtcaagagcatgttcggcgtctataaacgctgcttctccgcccattttctgcacttgtgctaccacatgcagggcaacagttgtcttacctgacgattcaggtccatatatttcaataatcctgcctctgggtattccgccgattcccaatgcaatatcaagtgacaaagccccggtagggattgcctcaacatttgcatcaggcttttctccaagacgcattacagcgccggatccatattgtttttcaatatgactcagtgcaaggtcaagagcttttttcttttcttcattcattacattttcctcatttctataatacaccatataggttatatggtatttatctttatgtgaatttatctaatgatagtattataagttaccgttaaattcatgtcaagcgattttttatgaacatttctatatgttgttcaattgtaacaacaaaaacaccaaataatctgtccatttgacaaaatcatattttatcctataaaaaattattttgactattcatttttatatgtgtataattggctaaaggaggtaatattcatgaatatttcagaagcaataaataaccgtcattcagttagaaaatatactaatcaaattatcccaaataatattatagaggaactaaagtctgaggtagaagtttgcaatcacaaaagcaatctcaatatacagctgattactaatgaaccggaagctttcagtggttttacggcacactacggcatgttcaaaaatgttacaaactattttgccatggtgagcaaatcagatgttaatcttgatgaaaaaataggttattacggagaacacttagtgctgaaagctcaacagctgggtcttaatacctgctgggtagctgcaacatataagaaaaagaaaagcagctatactgccggagacggtgaaaaactggtctgcgtaatcactctaggctatggtcagacccaagggaaaccgcataaaaacaaacccatagaaaaagtctgcgattataatgaaaacatccccgactggtttttagcaggagtaaattccgctatgctggcaccaacagcaatgaaccggcaaaaatttttcttttcactcaatgatttagaagtcagcgttaagtcttttggcggcgcttactcaaaaatcgatttgggaattctaaaatatcactttgaaaccgccgccaatagtataaataaaaattggaagtttatataataactagctgagattatttgcaatcaaagtaccaaaagaatttttcctgtgagcgctgcgcaccaaagctcggcactcgctaagcatattatcaataccattccaattttcattaatagcattctccaacagtttttcctcaagcaggtgcgactgtattactaaactgtaatacaattgtgtatctgcatcgtcactttcacatatcaccgtaagaagtttaaccgtattctcatacttcttccagagctgttttgttgcagcagaccttctaaatggcaatatcaaacggtttgctgccactgctgctagaattcctactgcaatatacactattcgaaccacagccatgctcccaacgtcataccagccaaaaccgttcataaagacagccccgcccaaagcgccgattgttgaacacgcaaatgttccggtataacccgaaaaatagtaactgatatatcccgaaaacatcatgagagctgtacgcccgacagctgacggaactaaagcatatgaggccatacctattacacatccgataacgcttgctgtaaaacgctgtctcgcctttttcccaacatcatcagcatatggcaaagaaactgaggcaatagtaaacaaaagccactttccatggggcagtcccaaaagctgcactattaaagtcgccgctgagagcaaaactgcaaccctaagcgcatacacaacacgaacaggactcagatttaatgccgcttttaaacgcaccgcaaatgataaaacagttcggcggtatttaacccgacgtttaggatctgtcattcgttttaaatgtatagctatatattctacgcacctaaaaatttcctcaatctccactgaagaattacttccggcaaaatcagagaaatccatatcttttaagcaattcacttcacgctgcacaaatgcacggaattccttaagtttttctttaactttctttaaaatctcaattctgtcaggcgttatcggaccggtcatttcatataaaaccaatattagattttctaatcccctggcactgtctatcatggcaaagttggcgtcagacacacataaaaccctttttctgcgctcatagaccattttacaaagcttatacaaatttttgcggacctcttctaaatctgccggtttaccggctccgtcaattaaacactgagtacaaaccaaagcctcgtctattattacagtcagcgaatccctcgttgtatcaacaacccgttttcttcctttgacaaactgatataccattatacacagagcgcccgccagcatactcaaaacacgtttcggcagctgttccaaggtaacaggtccaataaaaatcataaacaagtaggataaaatatatggaaaatatagattactagcgtactcatatgtaaaagaatataatattatcgttatcataataaaattaattataagagcaatccacgggttaagaatcactaccaaacaggcagaaaccgccatagccaccaaaaccgaagattgaatcactaaatgttttaaaggcgtagaagtcaaatctctcatcattgatgaagccatcaatatagttaatataactccgactatattattttcctgaccaaatactgtttgaaacactgatataaacaacactataaaaataaaatccaatgtataagatttaaaattttctttaatattttttccagcgttttttaaattttctataataaaatcctttcccatattcatcctctttcctcgtctaacaaacatttgttaaactaaaatgaaaaaccaaacctttttcaatgatgaaaagattcagccttcatataatattataataacataattctaaaaaagcaatgggatttaaaaaacaaaataaacaataaaataggattgacatacacacattttttatgacggtataaatatttttcgatttatataaaatatctttgttttttattatatttatatttgttaacagaataattttattttttcacgtaacgcaataaagattttttaacctggaaagtatatagcattgaacactgcgttttcagataatagcccacctaacgcggcaaactacgtttgcccttccgaggttcactgaaaatcctgatttttgtgtatttatttataccgaaaactcagtttttctataagtaatcaaccggaattcgagaaatctttattaactgcaatttacaaagtcaacggaaaagttcaaggcttttcatcttgaagcacagattcaagatgaaaatagaaggatgtatatcatcacaactaagtagtttttgatattgaataaaaaaccttaacaaaattctgtatactataattgtcatcacacacttagcatatataggtgagcgtgtgatatgaacatagagtaaattttaaaacttacctaggatgcgtgtcttaccagcaaaaaatctgctttaattatatattaatgttgaagcagatttgtcggaataagttaacattttacatattcacacctcaattggggttactaacacttcaggtttaataaaaaaagtccgtgcatataatatatttgaaagcacacagtaacacttctccattaacacgctatttttattataaaatacaaaaaacagccgcaaatgaactaacttcaaaagctcgatttttattccaacttttaaagcaatctcgaaatgcggctgtttataatttaaaatctaaaatctcggcttccatgaacaatcttatccaaataatcaatagttgtttctctaaccttatcatttggaattttcttaacttcagcggcaataactttgtcgccttttattttggtatcttttgaagcataatcctcaagatactctttaagcgtcaaaagtgcgttaggctgacagcaattctgtatagctcccgattttgccaaaggcataaaacggtctcctgttctgccctgacgataacaggcagtacagaagctgggtatatatccaagctccaacagccagttaagaacctcatccagtgttctcgtatcgcttctgtcaaattgggcagtgttattttcgtcagtttctttctccacatatcccccaacgctggtgcttgacgctccgcttatttgtgaaattccaagctgcagggctttttcacggctcttttggctctctctggttgaaataatcataccggtatatggtactgcaattcgaataacagcaattatcttttggaatatctcatctgaaacagcgtttgaaaaatcttcaacgtcaatatcatcagccggacagattctcggaacactgatagtgtgcggacctaccccaaaagctgcctcaagatgctcggcatgcattagaagaccaacaaagtcatatctgtacaaatttaatccgaacagcacgccgcagcccacgtcatcaatacctccctgcatagctctgtccatagcctcagtatgataagcataatcatgtttaggaccggtgggatgaagattcaggtaattttctttgttatacgtttcctgaaacaatatgtatgtgcctattccggcgtctttcagcctcttataattttcaacagtagtcgccgctatattcacattaactctgcgtatagcaccatttttgtgttttatgctgtagatggtgtctatacattccagtatatattcaagcggattgttgaccggatcctctccggcctccaaagccaaacgcttgtgacccatatcctgcagcgctatcgtttccgctctcacttgttcctgtgtcagttttttgcggcatatggttttattttttgcatgatacgggcagtatacacaaccgttaacgcaataatttgaaagatacagcggagcaaacataactatgcggtttccatatatcttttgttttatctccctggctaactcaaacatctcctggtttaagtcctccagttcacaatccaaaagaacagcggcttccctgtgattcagtccctttctttcccttgctttttcaattattgatttaatcagcgttctgtttgtcttattttctgaggcatatttcagcgtatcgtttatctctccgtcattaataaattcctctgcctttgatgacttcacatcatacttatagttttccataatattatctccttataaaaatttactgtgttttatacttttgtatactgaaccttgacagatacgtcatcaagcatccccagcttgcccgacaaggatgaaattatattcaccggggcgtcaattacaagacttataatagccacaccgcggtttttatacggtatacccattctcccgactatataatcactgtaatcatggattatacgatt

SEQ ID NO: 872 - DNA, 15986 bp, unidentified
  source 1..15986: mol_type = unassigned DNA
tcagatcgccacatcctgccactgtccgccgatcagttcgcgggtggatttgaacccggcctttttcagcagttcgaatgcttccgcacgtccgtcgttcaccaggtcgggatagtggcagtctgagtttaccatcaccggaatatccagctcatgtaagcggtgcagatagtcggtatgcgggtagacctcctgtttcttcacgaggtttttcgtgttgacttcgaccatcaggcccttttcggcgatcaggtgcagacagtcgttgaacggtttttgataccagtccgcttgcaggtcgaagccttcgcatttgtgcccgttcatgtatatcttgtccatgtgcccgacgatgtcgattccgcctgcctcgatcattcgccgtgtggaactgaaatagtgggcgaccagcttgcggatatctccgtcgtagtaggcgtcgacagacttctggtattcccggaaaggaccgtcgatacacaccatattctcttccgcaagcggctgtgcgatcggaagaaagtggatggaaccgatacggtaatcgagcggcagattgcggaagtaggggatggacgcgttgtagctttcgtctaagaaatcgatttccagtcctacgtatatttccaaccggtcactgtatttctttttcagtcgttctatttctgtcaggtattcgggcatgtcgtctttagacatgttccagaatgtttcgaacggcagtggtgaatgggatgaaaaaccgtaggcgcggaacccgtgcgcaacagcgaatttaatgaagtcttccggcgtgctccgaccgtcacagaatgtacaatggctatggtagttactgagttgcataaatttttacttgtaaaggggcaaagataatttttttatcccgaaagacaacctgtttgataaaaaaaggcttgattgctgcctaagggttagcggcagaatcaagccttgaaaaacacgtgaataatgaaaaatcgtatgttttattttattacgttcagttcttttccaactttgataaatgcagcgattgctttatccagatgttccgtttcgtggcctgcggacaactgtacgcggatgcgggcctggtctttcggcactaccgggtagtagaagccggtaacataaatgccttcttcctgcatcttggctgcgaaatcctgggataatttagcatcatacagcataacggcgcagattgcggactgagtcggcttgatgtcgaaaccggctgctaacatcttttcacggaagtagctgacgttgttcatcagtttcgtatgcaaagcatcgctttctttcagcatcttgaacatttccaggctggcacctacgatagcgggagcgacagagttggagaacagataaggacgggagcgctgacgcagcatgtcgatgatttctttctttccggttgtgaatccgcccatggcgccaccgaatgctttacctaacgtacctgtgaagatatcgactcttccgtatacattatattgttcagccacaccgtgtcctgtcgggcctactacaccggcagagtgggattcgtcaaccattaccaatgcgtcgtatttttctgccagttcgcagattttgtccatcggggccacgtttccgtccatagagaacacaccgtctgttgcgatgatgcggtgacgttgtgcctgggcttcttgcaggcaacgttccaggtcggccatgtctgcattggcataacggtagcgttttgccttgcaaagacgtacgccgtcaataatggaggcatggtttaaagcatcggagatgatcgcatcttcttcagtgaacaacggttcgaacagaccgccgttggcatcgaaacatgcagcgtacaggatcgtatcttcggttttgaaatagtcggagatagcggcttccagttgtttgtgcagatcctgtgtcccacagatgaaacgtacggatgacatgccgtatccgtgtgtgtccatagcttctttggcagccttgatcagacgttggttgtcagacaggcccagatagttgtttgcgcagaagttcaaaacgtcgcttcctgcgtttactttgatgtcggctctttgaggagtggtgatgatacgctcgttcttatacaatccggcagctttgatgtttgccaattcctgagtaaggaaatctttcagtttaccgtacataactttgttttttgttagtatttttaattaagttgacaattatatctctattatcgcagacaagtggcaaaatattattcttgaaaccatttttttctttgtctctgatttgtctgccgatgcggcaaaggtcatattttttttgaatatataggctaaaaaatacaagaaattcataccggaatgtttttattctctatacctttgccatcgaaaaaacttaaaagaacatcaaacgcaatgaagaatgtattagtaattggttctaccggtcagattggatcagagttaaccatgaagttgagaggtatctacggtggaaacattgtagcaggttacatccccggacaggagcctaaaggcgaactgctggaatcagggccttctgcaattgtcgacattacaaacgaacagcagattgctgagactgtgtccaaatataaggtagatacgatttataacttggctgcactgctgtcagccgttgcagaagcaaaaccgcagcttgcctggaaaatcggtatgggcggtttgtttaacgtattggaagttgcgcgtgaaatgcattgtgctgtattcactccgagttcaatcggtgtgtttggcaataacacgccgaaagacaagactccgcaggatacgatccgtaacccgcgtactatgtatggcgtcacgaaggtttcaggcgaattgttgagtgactactataatatccgtttcggtgtcgatactcgttccgtacgttttccgggacttatctcctatgtgacacctccgggtggtggtacgaccgactacgcagttgatatctattattcggctgccaaaggtgagaagttcgtatgtccaatcaagcagggtacattcatggatatgatgtatatgccggacggtctgcgtgcagctattgaaattatggaagccgattcgacgaagttcgttcatcgtaactctttcaacattgcatccatgagctttgatcctgaaattatctacaacaacatcaaaaagtatgttcctgacttccagatggaatatgatgtggatccgttacgtcaggctatcgcagaatcatggcctaactctttggatgacacatgtgcccgtgaggaatggggctggaaaccggaatatgatctggattccatgactcaggatatgttggctaaattgaaagaacgtttcaataagtaagaattaattttccgatcattagcagatcggtaggaaagaagcgactgcccggtgtcggacagtcgcttttttgtttggatcgtttttatccagtattgtaggctgtttcaatcataatgtgtctgttgtttgtgcagggaatgactaagtcaaaagtgtatgaaaaattatgttgtaaaacatgaaatggttaaatcaggttaagagaaagcttttttttgtggaaatattatgctgcataacataaactctctatatttgcactgtgtttttcatggtattagatttaaggttaacaatgaagattggctgtccgtgatggatagcctttttttgtttatacccggttgatgttgtttcctccgagaagcgatcattttatccgaattgcccgttcttatggtattcttgattatatttgtatatctgaaaagattcattgtaataaaaatatctttatatggaaatgtacaaagcaaatgacaaccggtatgccgatatggcttataggcgttgtgggcggagcggattgctattgccggtcatctctctgggattgtggcataatttcggcagtgtagatgtgttcagtaactttattcagattgcgtatgctgctttcgacaatgggattacacattttgatcttgccaataattacggtcctgtgtatggatcggcagaggaaaatttcggccgtatcctgaagaaaggtctggggcaatatcgggatgaacttgttatttccacaaaagccggatatgagatgtggcctggtccgtatggcaactggggaagtcgcaagtatctgatggcaagccttgaccagagtttgaagcggatgggattggaatatgtggatattttctattcgcatcgtccggacccacagacgccggtcgaagaaacgatgggagcattggctgacatcgtccgccagggaaaagccctgtatgtcgggatatcgaattacactgccggacagacggaaaaagcacttgccgtattgaaagaacatcgtgtgccttgcttgatccatcaagcgcgttattcgatgctggatcgcaggatcgaaccggacttgttgcctctgttgaagcaggaaggagtagggatgatcgccttctcgccattggcacagggcatgttgacggataagtatctgaacggtattcccgataattcgcgtgcggccaaatctacaggccatcttcaacgtgaacaggtgacggaagaaaaaataaataaagtaagacaactgaatgaccttgccaaacaacgcggacagacgttagcggaaatggcgattgcctggctgttgaaagacgaccgggtgacgagcgtcctggtgggagccagttcggttgcacagttgatagataacctgaaggcgttacaaaatacagccttttcagcggaagaaatacaaatgatagaaaatatattacagtaatatacactgataaatcatcatttattaatccaaacaattaatgaaaccattcttatatcaggttgcatcccttttttattctgaatacggggcggaagtgagccgtctggcctttgttttcccgaatcgccgtaccgggctgttcttccagaaatacttgtcggaagtatctgagaagcctcttttctcgccgacgatcctgacgatcaacgatctgtttgtacagttgagcggaaagcaggctgccgatcggatcagcatgctgtttaaactatatgatatttatttgagacatagcggttcttccgaaacgttcgacgagttcttgtattggggggaaatgctgctgaatgatttcgacgatatcgataaatacatggcagacgcccgcatgctcttcacaaatgtgacggacttgcgtgagatagagaatgattttagtttccttagccccgaacagattgcggctatccggactttctggtcttctttctatccgaaaggagatacgcccaaccaggagcaatttctggcggtctggcagattttatatgccctatataccgatttgcgggaagcgcttgccaccgaaggcaaaggatatgaaggtatgattttccgggaagttgtcgaacagatggagaaagacgaatgttgcgacctgccctatacaaaggttgtatttgtcggactgaatgccctctcggtggctgaagaacgtttcctttccgggttgcaaaaacggggaatagctgatttttactgggattacgcctctccgaaagtgacggacccagataataaagcctcttacttcgtggagcgcaatttgcggcaattcccgtcgcaattaattgaaaatggacaattgactattgacaatgaagatgacgacaaaaagaagatcgaggtgatcggcatcccttccggaatcggacaggcaaagcaagtgtgcagcattctgaacgagctttgcaaggaagacgaaatgagtgcggaagaagcgttgcggacggctgtgattctgccggatgaacatttgttgattccggttctgaatgccattcccgaacagatcaaacggatcaatgtgacgatgggatatccgttggccggtacaccggtcgcatctttgatggaatatattctggctttgcaaaagaatattcgttatgtggaccggaggccggtgttctatttccgggatgtcttgccaatcctgaaccatcggtatatctcgactacttctccggaggtggtttctaatctagtaaaagatatttcagaaaacaacaagatttacatatcgtatgacgatctgaataagacgccattgttgtccatcctctttactccggtgactgcggtggaaactttctccgattatttgattaacgtgttgcaggaactgaataaagctgttgaaggtggaaagttgaaagttgaaagtgtaaatagtgacacggagccactttcaactttcaactctcaactctcaactattaacgacatcgaacaggagtttatcttccattatttcgctacggttaaccggatgaaggaagtcatgcgggaggcgaatgtagagatgaaaatcgacacctatttccgtttgctgaaacgtgtgacggacacaattacgattcctttccatggtgaacctctttccggtttgcagatcatgggtgttttggagactcgtgcgcttgactttgaccggttgattatcctttcgatgaatgaaggaattttcccgttgaggaaagcggctaattcatttattccttataatcttcgtcgtggattcggtttgccgacatacgaacatcaggacagtgtttgggcgtatcatttctatcgtttgatttatcgtgccagccatgtcagtctgctttatgatacaagaagcaacggattgcagacaggcgaggttagccgtttcgtgcatcagttgcattatcattatgaggagccgatacagaataagctggttgtttacaatgtctcttcttccaagactcctgccttgcaggtagctaagacggaggaagtcatgaaccgtctggctgatttccggagtggcgggacgcgagcgatatcggcgagtgcagtcaatacctatctggattgtccgcttaaattctatttctccgttgtcgagggaatacgtgaagaagaggaggtaagcgagacgatcgaaagtaatgtttttggaagtatcctgcataaggtgatggaagaattgtatcagccattctgtggaaagatggtgacggctgatctgctgaaagcgatccgaaaagatacgcctatgttgacgggagcggttgcccgtgcctttgccgaaattttctttaaaacggacattgttcgtccactcaccggacaaaacttcctgatcggcgagatgattcgcaaatatgtggagaaagtgctggaacgtgacgcaaaacagactcctttccgttatatcgaatcggaaaagaagataaaatgcctttttccattgacggataaaagcaatatccagttgaaaggatttatcgaccgtatagacgaggtacgcgatgtcgtccgcattattgactataagagtgggggcgggacgacgcagtttacctctgtagaagctcttttcgacaaagcagatacggatcgttccaaagcggttatgcaggtctttatgtatgcatggatgtataacaggtcagttcagctttcaacagctattcagccgggtatctattatatgaggaccctcttttcttcctctttcgatcctggaatttaccatcgtacagaccggttcaaaacagaacaggttttggacttcgccaactatcgcacggattttgaagacagcctgcgaaattgcttggatgaaatcttcgacacagaaaccccattcgtgcaaaccccgaacggcaaagcctgcatgtattgtccgtttaaggatatttgcgggaaatagtatttttacagatttcccatatattcatccacaatttcattcaggaagcggttgaatggaagaagctttcgaaaacaatcgatggtttcttccatccagtccggctggctgaaaaaactgtcgggcttaatacctataacgctgaagtctttgtgccttaatatatgaccgtaaggagaatcggaggggaaaccggccgggaaaccggccgggatacgttttagcatgtccccttcgagtgacgggtacagagctttgaaggaaggctcttcgatgatggaaacaaattcatctatgttattgtatatttcacgtcgaaggactttcaatatttccggtttgggataccagataccaccggacagtacgcagtattccggttcaagatgaaagtagtaagctccccggatactatgacgtcctccttgagcaatacaggctgacatataagtcttgtaaggcgacttgtcgaggctgaagcggatgtcgcgattaatacggaacagacatttccgggcatccaatccccgtatatcaggatcaaatacgctgattcgttcgattaactcttgtacttcgttgataaaagcacagcgaagtttgtcatatcgttctctattttcatggaaccagacggtattattgtttcgtcgtaaatcgtctaagaatcggataatttctgcattcatattaggatattctttttttattgtatttcgtatctccattgtttcggagtcatctgtttcatctttttgaaatagcgattgaagtagggaatgtcggtgaagccgcattgccaggctatttcgttaatgtccttatccggaaagttgcggagtaaagtgccaacggcctctatccggtattcgttgatgaagtttgtaaacgttttgcctgtttcacgtttgaaaaacgagcagaacgccgttgtgctcatgctgattacgtttgcggcgtccgaaagagttattttctccttgtaatgctcgatgacgtatttgaagatcagttgcatgcgttgcatgtttttggtaatgccgttgaatgccgtttcctgcaaaccgatagggattaaatcggttgtggttccgatttgttgcaggatgcggatcaacatcagcatcctttcgcttgcattcaggaggttcatttcttctaagcaggatttgatttttccggctgtttcgcctgtcagaaggatgccttgctggattgccgataaccggtgagcggcatattcccattcggtaaaaaaagacaggccggtttgtagcaagtcgggattgaattgcacaactatgcatctccgttttccatcaggctcgcagctttcggggttatacatccaacaatgtggttggttggtcgggaccagtacgacttctccctcctcgaacggctccagaaagtcgcctatcatccggtagcctgaacctttcacaacataacatatttctatttcgggatgaaaatgaagaggcatttcgtctttcgggtacaagctggaataatcgtagcgtaatgaggcacaactatcttttttgatttgttcgaattttagtttctcgtgcatgtcggatgaactttctgataaaacacagtaaaattagacaataattgcataatctgcgacaattacacttaataattttgttgtttctttgcggccggaaaaacagaaagatagaattaggttatgaagaaaggtttgtatgcattgtcttttggcacatttgggctggggattgcagagtttattatgatgagtatcttgccggatgtggcggcaggatttgatatttccttatccgaagccggtcatcttatttcggcttatgcgttgggtgtatgtgtgggagcgccgttggtagtggtggtggccaggagttggccgctacgtacgatcttgctcgctttggttgggctttttgttgccgggaatctgcttatggctctgtcggccgattattggatggggttgtgtgcccggtttgtatcggggttgccgcatggggcttatttcggagtcggttcgattgttgccagccgtttggcggagaaagggaaaagcacttctgctgtagctattatgattatggggatgacgattgccaatttgttcggtgtcccggccgggaatttcctggggcactttctgtcctggcgtttggtttttgtgattgcagcgttgtggggtggcgtaacgatttggtttatccggaggtgggttcctgttttgcccgccctgccggcgacgaatctgaaagggcagtttcgttttttgagaaggccggaaccgtggatgctgattgctgctaccatgttaggaaacgggggagctttttgctggtatagctatgtcaatccgttaatgacggaggtgtccggtttcagtgtcgggacaatgcctgtattgatgttgctggcgggtgcgagcatgtgtgtcggtaactatttgggagggcatttgtctgatcgttttacacctggtatcgtagcgatgtccatgcagtttctgatgtttgcatcacttctgctgatttatttttttgcttcgtacggctttttgtccgctttgctgatgtgcgtttgtactggttgcctgtttgcagtttcttctccacagcaattgttgttgcttcaatattctcctggcggagagatgatgggcggggcgatggtccagcttgcttttaatttggggaatgccgtgggggcttattttggaggattgtcgatcgaacatggggcagggctggaaagtacggcattgatcggttcgttttttgccctgttaggaactacggtgtttctggtattcaactatatggtgtttaaacctcagaggaaattacttttaaaggggggaatataatttccgaggatcaagacggtgtttttggacatagaaacagccgtccgaaatcgggacggtgtttttggagataaaaaacagccgtccgaaatcgggacggtgtttttggagataaaaaacagccgtccgaaatcgggacggtgtttttggagataaaaaacagccgtccgaaatcgggacggtgtttttggagataaaaaacagccgtccgaaatcgggacggtgtttttggagataaaaaacagccgtccgaaatcgggacggtgtttttggagataaaaaacagccgtccgaaatcgggacggtgtttttggagataaaaaacagccgtccgaaatcgggacggctgtttggatttataatgtctcttgtttcagttgttcgacgaaacgatcgattcgctgtagttctttcggaatatcgattccctgcggacagtgtggattacattggttgcaactagtacaatgatccgcttggcggagtttcggtacactgcggtcgtacccgatcagataagcccggcgagcttcgcggtagttttcatcctgtccgctctgagggacattcccctcgttcacacatttattataatgaagcaaaattcccggaatatcgataccgtaaggacaaggcatacagtatttgcagtcgttacatgggatggtcggatactgcatcatcaagtcggcggtgtcgaacaagaaacggttttcctcttccgtcaacggttgcaacggacagtaggagcggaggttgtcttgcaggtgctccatgtaagtcatgccgctcagcacggtgagtacgccaggaaacgaaccggcaaaccggaaagcccaggaggcgacgctccgtcccggttcgcgttgcttcaggcgggcgacgatatggtcgtgcacgttcgaaagccgtcctccgaggagtggctccatgatgatggcgggaatcccccgtttctgtaattccccgtacagatattccgcatcggtgtttcgcgggttgatctctttggcatgtttccagtccaggtaattcaactggatctggacgaaatcccattgatattcgtcgtgtttcgaaagtaaataatcgaacacctctatatctccgtgataggagaaacctaagtttcggatacgtcctgccttgcgttcttcgagcaggaagtcgagtatgccgttcttgacataccggttttcataggcttccataccacccatgccgatcccgtggagcagcatataatcgagataatcgacttgtagctccttgagcgaattgttatacatcgcgatagaggcttcgcggctccatgtgtcgggagagaagttcgaaagcttggtggcgatataatatttgtcgcgcggatagcggctgagggcgatccccatagcatgttccgaacgtcctttgcaataggcgggcgaggtgtcgaagtagttcacaccgtgctcgatggcatagtcagtcagccggttgaccatctcctggtcgatttcgtcatcgctgtctcttgcgctgcttttggcaatagtcggcagacgcatgcatccataaccgaggatggaaactttgtcttttgtggacggcgtcgtgcggtatgtcatccggtccgtgggaataggggtggagcttcccgaacctgaggccatcccgctgtccgaactgcacccggagagcaacggggcggtagttgccgtgctgattcctacaatcttcaggaaatcgcgacggtttatcgcttgatgattgtctttttccatatgtgatgattcttttatttcttgatcaaatattccggtgttgttcgtgcccttccacataaatggcgctgaacggacgcgacgggcacaggttttcacaggctccgcagccgatgcatttttcctcgtttacgaccggaagttgaggcgaatccgggtcgttcgggtcttttgccaccatcaagatcgcctgggtagggcaatggcgggcacagttgccgcaagtgacaccatcccggttgacgatgcaattttcctgaatcagtacggcatgtccgatctggatggccgttttgtccgctttcgtgatcggacggatcgctccggtcgggcaaacttccgaacatttgacgcattcgggacgacagtatcctcgctcgtacgatacttctggctgcataaatgtttgaaggttccccgaaggacgcagcacatggttcgtacaaaccgatacacaaagctggcacgcggtgcaatgctgggagaaattggcagcgctcagcgaacccggaggggtgatcggggttgtccggtccggtttctttttatcttcgatgatggccagtccgccgtcgactttcttgtccgggagttgtactttttcttgggctttcaatgcggcagaagtggcaagtaatgccgatacggtaaagaacttgcgacgatcgggcttgtctacgaccggttggttggtctgtgtttcagccttgtttgtttttctgcgtgtatatcggatggctccttgtcggcatttgtctatgcagtccatgcaatcgacacagcggctatagtcgatctcgtgtactttcgcattgatacaggctgctttgcaattacgggcacacaagccgcaaccattgcatttggacgtatcgataaccggtttgaaaacggaaaaacgggagatcaatcccaaaaacgttcctaccgggcagatcgtgttgcaataggttcgcccattccgccaggcaagtatgatcagtataatgaaggtaactgtggcaatgataaaggttgggaggctccgtagccagacttccgtttcgtagaaagcataattgtctgcccgttctgccaagtaggccagaaagttgtttccccattgccagaggggtgcgaataagttagaggcgatacgcccgtaagcgctgtaaggtgcgatcaatgccgcccatgctcctaacccgctgatcatggcaaggataaatatcaccatggctccgtatcttaaccaggacaaggcgggggaataacggaaacggtttttcttccgtttccccgccagccatgaaacaacatcctggaatatgccgagagggcagattacagagcagtaaacccgaccgaaaatccaggtcaatacaatgagaaacagtaccacgccgaggttgagtgccaataccgccggcaggaactgtactttcgccaaccacccgaaccatgcatgcaacgtccccgtgaaatcgagaaacagtagggttacaagcgtaaaacagataagtgcagttgtaagtctgatcgttcgcaacataataaactctttttagatagtctgttattttatgttgcaaacataataaaaggaaatggtttgcaacttacacgaattacggattgatgtaccaatattacggttttgtcaacttctgcaaaaagtctggctgacaaaccttagaacttcaggcaaggccgtccgccaataggtccagctatggccgccgtctcgtactcggaattcatgcctgatccctttctgcttcatgacctggtgcacctgcatgtttccgtccagcaggccgtcgtcatcaccgcaatcaatgtaataacgaattttgggcaagttgttttgattccagtcggaaaggatcttcaagacattgttttgcttccagtgttcgtctcccggcccgaacaggcggttgaataaatccttgtgcgatttgttttttcttgcctccatgactgtgtcgtcgaaaacggcggcactcaacggagcacatgcgcagaacatgtccggatgatgcaagctgtacaggaatgatccgtagccacccatcgacaatccggcaattgcccggctttctttgtcactgcggatccggtatgttttttccatataggggataagttcttcaaaaaacatgtcttcgtaaggtacttttccgtcatactggttgatataccaagtgtcccatgcgtccggcatgacgattatcatcggcacggcttcctcgtttgcgatggcacggtcggcaatcgttttcatttgtcccatctgtatccagttggtttcattgtccgtgtaaccatgcaagaggtagaggaccgggtaattccttttcgaggtgttgtagtcggaaggcaggtagatggagtaggaaactttcctacctaatttgttactttcaaaagagagcgattcgaaaactgtgctctgcgaatatcctgccatattgagtagaaagcacaggataagatggaggtaaattttgtttttcatatattattaataattagatttgcttgtctggacaaagtagaaataagagaagagagtttgtctgaaaacttattaggtttcgacatactctctttttcttatttggaattaatctgccatcggatagggaaattcggtcaaccctttgtacatgaattgataggtcggaacttcgattcccaattcttgggcagttcgtacgacatagcctgtcaatgtttccacttcggtgcgattgcttttttgaaaatcactgtgcatggaggttgtggagttgttaggcatgatcttctgggcgtcgatggcggagaatacttgaccgtccggcagacggatccctttggcttctgccacgcttttgagttcataacctaatgtgatgaacagatcgatatggttatttaccacttcgccaatcgtttcattgaaataggaggtgatagtggcggcggtcgagatcatgaagaatttcttccagatttccaagtcaatgtcatccggtattgtggtaaggatacgggcgttggccaatatatcctgtaagtctttctgtcgtttcttgtttccttgtttacttccgaagaacatccggtcctttatggtgaacttttccactcttcccggtctgaccaagcgggaaccgatgtaaacgcatcctttccaaacctcattgttcggtaatagcttttgtatgcgttccgctatatccgctccgttcagcaggggaatgataaccgtattagggccgatgatcggagtcagctgaactatattctcctccaagtcgtagcttttggtacagcaaaacaggtaatcgactggtcctatttcagcaggattgtcggttgcgagggttggttttgctttgatcgtcaggaatgtatttttgacttcgatgccgttcttacgtatctcttccagattttcaccccgggaaatgaaatagatgtcaatatcttcagagtctttgtaacgggcagctaatagtcctccgtagtagccgcctacagctcctataccggaaatcgctattttagttttattcat

SEQ ID NO: 873 - DNA, 10382 bp, unidentified
  source 1..10382: mol_type = unassigned DNA
ttatttgccccgctccgccatcagcaatgcgatttcctgctcgttgataccgaccatcgcttcgcccaaatcctcggaaagctctgcgagcatttccgcatcgttatagttggtaacggctttcacgattgcggcggcgcgtttttcgggattgcccgatttgaaaatacccgagccgacaaacacgccttccgctccaagctgcatcatcagcgcggcgtcggcaggcgtcgccactccgcccgcggcaaagttgacgacgggcagcttgcctttttctgcgacatattttacaagcgtataatccacctgcaaatcctttgccgcctgatacaactcgtcctttgacatcgttgtaagcctgcgtatctcgctctgcatcattcgcatatgccgcaccgcctgcaccacgtcgcccgtcccaggctcgcccttcgtacggatcatcgccgcgccttcggatattctccgcagcgcctcgcccaaatcctttgcaccgcatacgaacggaacgttgaattgcgttttgtcgatatgatatttatcgtctgccggagagagaacctcgctctcgtcgatataatcgatctcgatcgcctgcaatatctgcgcctcggcgaaatgcccgattctgcacttggccattacgggaatggaaacggccgcctgtatcccctttatcattttcggatcgctcattctcgaaacgccgcccgccgcgcggatatccgcgggaatacgctcaagcgccataaccgcgcacgcgccggcctgctccgcaatcttcgcctgctccggagtggttacgtccataatcacgccgccctttaacatctgcgcaaggttcttatttagttcgtaacgttttttatgagtttcttttttcatgatagtgtcgttctccttgactttcgttttcgtttattatatcatttatctgataatgcgtaaataatcagttttggagaattttataataccagatgaactatcatattgaaaaatccaaaaagccggcttatattcagctttacgaacaattacgccgcgatatagtcgaaggagtttatacttataaaagcaagcttccttcaaaaaggatactcgccgaggaaacgggcgccagcgtagttaccgcggagcacgcatacgcgctgctgtgcgaagagggttacgtcgactcgaaagagaaaagcggatactttgttatctttcgggatacggatattttttccgttccgccggataacgaggcgatatcccctgccgctgctttcacgggagatctcgtacagactttgccgttttcgacaatggcaaaaattatgcggcggacgttaagcgaatacggagaacaaattttttccgtatcgccaaacggcggacgcatggagcttaagactgccatagccaaatatcttgcgcgtagccgcggcatacacgccgagccgcagcagataattataggctccggcgcggaacatctttacggatttatcgccgaaacgctggggcgcgggcgaatttacggcgtggaatatccttcctatgaaaaaatcgaacaggtttaccgcgcctgccgagtcgaatacgaaagcttgcctcttggcgcaaacggcatcgaaagcgaggctctcggcaggtcaaaagcgtcggttctgcatattaccccctatcgcagctatcctagcggaatcactgcctccgcctctaaacggcacgaatacctgtcctgggccaatcagtcggaccgatttattgtcgaggacgattttgaatccgaatttacggtttcccgtaaatcggaagacactgttttctctcttgcgaccaatgaaaacgtaatctatctgaacaccttttccaaaacgatttctccgtcgatgcggttgggttatatggttttacccaaacaactcttgcccgtttacgaaaaaaaactgggattcttttcctgtaccgtcccgacctttgagcagcttgtcgttgccaagcttatttcgagcggagaatttgaaagacacataaaccgcatccgccgactgaagcgcaggatactgtcgtctgaaaaagccgaccagacctaaccgccgcagcccgcgtcttttattccgctcggaacaatcttcagccttaaagatttcgcggtgaaacgccgttgcagctcgcttttccgccgctttttgcaaagcattatttatcgcagtcattaagcaagacagctaaatattttatttttattacggattcctcgcatccgtttctgacgcgccggcccggattgtcacgctaaaataaagaaccgcagacaactcctttggtttcaaaacgttatctattgcggaataaatagaaccggtttaaccgctaaaaaaccgtgtcggacctatcaaaagttcaacccagtcccgcttggcagaagcagtataaatcacttgattttatctaacgtctctcaaattgacagaaaccacaataatcgtgtttaaaaacacaaaatacactataaagagtgtgttttaaatttaagtggataaaaacgctaccctcaaaaccgagcagaaggattgcagattgtggactttcaaacgcgaggacaagggagtttactgaggagtaaacaaccgaagtccgagacgtaaagaaagggcgcaatatgcgcacttttcctaggtttgacagagcgtgcagaaccttagctgaacactctgaaaataaaaaactgtattgaatttttggtgttcaacacagtttcacttgggtttagtagataaaaatgctaccttataacatattttttacataaaataaagtcgactttttctatttctagaaaatgtcgactttttatcgtggcggagagatggggatttgaaccccagtacgggtatcagccgtaacacgatttcgaatcgtgcgcattcaaccgctctgccatctctccttaacgcgacgaatccggcgaaaaatgccgccgaaaaccgctcctttatttataacacaaaaataaaggttttgtcaaacaatatcgacttgattgtactacaaaagtacttttccgtgccgccgtacgcaagcagcgcaacaaagcaataaacctgcggctccgctatcagccgcgtaaatttcggtttttctccgcaaaataatcaaagcggtcctctgcgatgcgctccctgatccgctcgaaatatcttgaatcgtttttgactccgcgttcgattttcatttcattttccagtattttacgataaataaaccttaccgttcttccgttaaacccgctcatattaaatccgtttccagtctccttttcgttataataattatataactttataacgttaaagtcaataatataagtcgggcgtacaggtcgtatattaacgtaaaatgtcgaaaaacgatgtttttttgaatttttcccgtttaatgcttatataaaaataacaagcatgcttttcaacgcgtctcacacgcggtattcgtaaacataatcgtccataaaaaagccctcgcctatatccgttttaaccgaatcgatttttttaaagccgaatttttcgtaaacttcgaccgcgcgcgcgtttctcttattgacggtaagaaaaacccttttcagctttctcagcacagccgtttttgcggcaaaattcaagccggccgttccaagtcctttgccgcggtattcgggcgacagataaagctttgaaagaaataacgcgccgtcggacgtaacgcaatgcgcggtgtaaccggcgcgcttgccgtccgcagcgataaaataatattcgtagccctcctcctctgtctgccggataaaggccgcgcgcgactgaaaacgcccgagcatataatcaacctgctcaagcccgatcagcttgtcaaacgcatcatgccacagccggcgggccagcctctcaagctcggtaaaatcggatttatccgcctttacaaattcaactttcatcgcattcctccgtttaacgcgaaaaattccgccctgcgctaagccgctcaataaccgcgcttaacgtgccgcgaaatcaattatttctgccgttttgtacaagcctgacgccgcaaaatcaagctgtccgcgatttcaaaattcagatttcgatcgcaaccttcattactccgtcgcgcctgttttcaaaaagctcgcaggcttccgccgccgctgacagcggaaacgtgtgcgtaataagcggcgccgaatttagacgcccctccgatattagccgcagaatttccgaacagtcgcagccgtccacgccgccggtcttaaaggtcaggtttttgccgtacatttcgggaagcggcaaaacctgaggggaatcatacagggctatcaccgtaactacggcgttgggacgggcgcactgccacgccaaacggaaggactcgtttgttcctgccgcctccagcaccgcgtccgcgccgccgcggtcgctagcccgcaaaatatctgccgccgcctcgggactgacggcaagcgccgccggataatgcctgcgcacgaaagcaagcctgcgctcgtcggtatcgcagatgattatctttttcggatttttaagcattacgcatagcagcgtgcagattcccgcaggtcccgccccgataatcagaaccgtatcgtccggcgttatttccgcaattttagcgccccagtagcccgtagccagcacgtcgcccgccagtaacgcctgtctgtccgataccgaatcgggaattttacttaatcccgtatcggcaaaggggacgcgcacatattcggccagtccgccgtctatgcggcagccaagcgcccagccgccgtttttatcgacgcagttgtttacgaagccgcgcttgcagaaataacattcaccgcaaaaggtttctacgttgacggcaacgcggtcgcccggtctgagtcctttgacgccgcttcccgtttcggcaattactccgaccatttcgtgtcccagcgtaacgcccggcaacgcgcgcggcaccgaaccgcgctttatatgaatgtcgctgctgcaaatgcttgccagcgtaaccttaactacagcgtcgcggctatgcagaatatgcggcgccggtttttccgcaaatccgaattttcccttttcaagatatgtaaaagcacgcattttttacctccctcagctttccttacaagccttcagaataacagttccttccctgatataaagcgtctctacgcgcgtaaatccggccttgaacaaaagctcggtttcccttctcaatgtcagcggaatatctatatgcactaacgctccgccggcaacccggctttttttgcgcctgtactcgtattccgccctgcaaaggcgttcctcctcgtcgcagcaggcgatataatcgcactgaagatagcttccgcccggtttgaccgcgcggtaaattttttcaaaaatcctaattttatcctcatacgtaaagtgatgcagcgtttcgacggaaataaccgcgtcgtataattcatcgtcaaacggataccggaaataatcgtctttgataagtcttacgtccttatccggataattgccgcgaagcttatccagcatttcggccgacatatctacgccggtgacggccaagcccggaaacctgcggaaaacgtacttaagctccagtcccgtgccgcatccgatatccagcagcgaatttataccggcgtccagaaaatcggccgcatgctcgtaaatttccggaaaattaccgagatgcacgctttcgtactcgttgattctggcggcgaaaaactcggccatgccctcgacgggagcctttctttgttctttaagccggcgtctgagccgtttcagatattcttttgtttccttatcggtgcgtattacgcttttaagcataaataagactcctcatctgtccggctttcttttgacggccagcagtctcatgtaatccccgaacgcttgttttcccgacggctgaaacataaccagcttgccgccgcggtagtccgcagccgcttcaagctcctttacggtcgcctccgacagcgaaggacgaagctcctctattttttcaaattcctttgcgctgaaggcaatcaaaagccccaaacgcagcttatccgcgtaaacggcgcaaagtcttttgccctcgcagcggtatttatactcgcagctccagccctttcctccgtaaccaaaagcggcctcgttaacgtatttttcgcaaattgcgccgtccaaagcctgaaatacgccgtacagccgctcgcccagcaacgaatataaaatccttttatccaatatatccaacggcatgataaaaactccttgctgtcttttattatatcatctgcgcgcgataaaatcaataaaacaagcccggtgccgcccgccgttttcttccgttttaaatcgtgagtatcgctgcccgttccgctcccggcgcagtccgcagcgcttcgaattaatgtaaaattaaataatattcgcgtattttccggtcaaacccttgacaaaaccaccgacttttattatactcgtatatgctacttgaaaagctttgtcgtcggggtgtagcgcagatggtagcgcgcatggttcgggaccatgaggtcgtgggttcaaatcccgtcactccgaccaagataaaaagtcgacattttctgaaaacagaaagtgtcgatttttctttatgtaaaaaatatgttataaggcagcatttttatccgctaaacccaaactgaggaaaagggcgcaagacgcgcccttttttcatgtctcagtcttcggtcatttatgccacagtaaacctcctttgaaagaacgcaatctgccgcccttccgataggttggaaagcatttttccaccaacgcgattaaacagtacgaataaactgtaaaacgccgtaaatcagaacgatttgcggcatttttctatcgttcaagaatgagcgtcttgaaatccgagattgaaaaccggacaaaagtatttttttaagactgtttttgccctctttttaagagaactagttttatacccgcatataaatttaaatcagtttttatcatagctatcagaacaaaaaagcaacgcaacaaaaacttcgttgcgttactatatcaggtcggcgccgaataaaacttaatgacgcggctgaaactcatacggcttacttcgcactcggattaaatcggagtcatattcggccattgtatgcgttgctcacgattgattataaggtttttataatggcgcgccataataccaaaatttaatgacttataatttttgcctaaagttttgattcaatgttttgccgttttcatttagtccctttttacagttgtatttacaaccgcagtatagcataattctaaaaaatttcaaagcgtttagggttgtatttatgtccttatgtacaaaattatatttgatagaatagaggtgtaaaaacaaccataggagaacgtatgaaattaagcacggcagtcgcgttaagagtaagcaatattctgcgagaaaagaatatgtcgcaataccgtttagaaaagaacatagcgatgccgcacaatacaatgaaaactctaatgggcgaacgaaacaacagtgttaatctaaaaaccgtaatgcaaattattcgtggtcttgaaatgactacggctcaattttttgacgatccgctatttgaaaatcccgatttagaaatagactgacgccatatcgcaaataaaaaagaaaccgcaagctgtattacaaaatctaataagcattgtctgccgaaaaaatcaatcttaaatttaatgaatacaacgtaaatttacaggcaatgcaaataagcgtcagcgaatagcaatatcaataaggatttcaggtatactatgttagatttattagacggaaaaaagatttacgataaaatcgacgctctgcgattagaaaaagggtggactatttatgagcttgcaaagaaagcgggagtagcgcccacaaccatttataattggcgggacagagcgtcctcgccttctttatatttattagaagcggtatgttctgcttttgggataacggtaattgattttctattggatgaagacgagcttttggctcttacggaagaacagaaagaagtgatacgattgtggaatacattgtctgccgaaaagaaaaaatccgtcttaaatctaatgagaacaatgtaaaactattgaatttaaagaattatcccatacgggtttatccgccgggttattatttttttcaaagatattgtttgcaggtttacttacggttagtttagttacttttttaaatcaacttttttgtacgattaaaaacaggcaaaaaaacgttttgcctgttttttgttttggaattttcccctaaagtcgtatccctagcgctttgcttgctgtttaggaagaaattttttctcgattgaattatcgccggccgtcggcaaaagccggatatttcaacaaaaatacgcgcggccggtttaggcgtaagctgcggcagcataacgaattcattgctttacagtcgccttaaagcccggattaacgcaatttccgcgcgtttggcgtttttatttaaaccttgcagcggccgctcaagcgttttccgacgaaattatgtcgattatctcgcgcatatccgttactacgtatttgcaggcggaaaaatcgctgtttgcggcggttgccgtgccgcggtaaccgatgcacgggatttgtgcggcggcggctgcgagactgcccgtcctggaatcctccactacgaaacagcgtcccggctctgcccctagcttttcagccgcgataagataagtgtccggcgcgggcttcgggcgcggaacctcgtcgccgcagacaatcgtacggaagcagtccgctataccgagaaattccagcacgccggaaacgtactctctcgaggacgcggagccgacggcgacagaaacgccgtttttaccgagaaatccgagcagcgcggaaagatttctgctttccggcagatttttttccttaatcaaattaagaacttctcggaattcgccggccacaagctcctttggcgaatcggccagaccgtaacgggatttaaaatccgtccagtaatccagctttcttgcgcccagcactatctccttttcagccgacgcgggcacgcccaacgccgcaaaaaaacgcgcgcgggctaaagtatgcagcggctcgctgtccaatattacgccgtccatatcgaaaagcacggcctgagtctttttcataagttcctcctgacaaaatacaaccgactaaaatcacggtatttacaagaagcgcgtacctaaccctagtccccgtataataatatttaaggctttacgggcggataatatatttgcccagcgcgcgtttttcgggcgaagaaagtatttccttcagttcctcaagcggcgcgacggcggcaaccatacccgaaacgtccaaagaccgcgcgtttatcagattaagcgcgcgcccctgcgtataaggattgacgtacgacgctttaagcgtaatttcccgcttgaaaatttcaaacggctttatcgcaagcgcggcgtccggcgccgtcaggccgaacatcataaccacggaagccttaccggcgatatctatcgcctgcgcgattgtagaggtctgccccacgcattctatcacgcaggagagacggctgattccggcgcggcgtatttccgctttgacgtccgtgccgaacggatccagcgtcaggtacgcccccagacgggccgcctcctcgcgcttaacctttgacggctctatgagcgcaacccttgccgcacccgcgcgcatggccagctgaagcatgatcagccctatcattccgccgcctatgacggcaacgtcgtcgcccggacggatattgcacatgtcgataccgtgcagacagcaggcaaccggctcggtcatcgcgccctcctcaaacgaggtcgtatcctccagtctgtaagcctgacgcgccggcacggcaacgtattcggcaaagcctccgttgacggtagtgcctatccccgtcatatcggtgcagaaatgtcccagcccggacaggcagtaagaacattcgccgcacaaaacgttgggatcgacgcataccctgtcgcctgccgtaaagcccttgactccccggccaatttccgttacctctcccgcaaattcatgtcccaaaacggtaggcggacaagtttgcgccgcgccctcgtcgcccgaaaaaatatgtacgtcggtgccgcaaaccccgcaggcgcgcacgcgcaccaaaatctcgccctccttgggtacgggcttggcgatgctctccaccctgatatcgcccttaccgtaaaaaaccgccgctttcat

SEQ ID NO: 874 - DNA, 17142 bp, unidentified
  source 1..17142: mol_type = unassigned DNA
gagatcggtctcggcattcctgctgaaccgctcttccgatctatacaaaaaattaataattatacggaggttgcacaatgtattcatttgatgaagttttaaattacgaccctgaagtagcgaaagctatggaggacgaactcacaagacagagaacacacattgagcttattgcatcagaaaaccttgtaagtaaggccgttatggcagctatgggaagcccgcttacgaataaatatgcagagggttatccgggaaaacgttactatggcggatgcgaatatgtggatgttgttgagactcttgccattgagagagctaaaaagctctttggctgtgagtatgcaaacgttcagccacactcaggtgcacaggctaaccttgcagcattctttgcaatggtagagccgggcgacacagttatgggtatgagccttgactgcggcggacatctttcacacggttcacctgttaatatttcaggtaaatatttccacattgttccttatggtgtaacttctgaaggttttatagattatgatgaagtgttaagaattgcaaaagaatgtaagcctaagatgattattgcaggtgcaagtgcatatgcaagaacaatcgatttcaagaagttcagagaaatctgtgatgaagttggtgcttatcttatggttgatatggctcatatcgcaggtcttgttgcaggtggtatgcatccaagcccgattccttatgctgatgttgttacaacaacaacacataagacacttcgcggaccaagaggcggcatgattttaagttcagccgaaaacgcagataagttcaagttcaataagtcagtattccctggtatacagggtggccctcttatgcatgtaattgctggtaaggctgtatgcttaaaagaagcattagatccaagtttcaaggtatatgcaaagaatattgttgataatgcagatgcactttgcaagggtcttatgaacagaggttttgatattgtttcaggaggaacagacaatcaccttatgcttgtaaatcttattaataagggtgttacaggtaaggaagttgagaagcttcttgatgctgcaaacatcacatgtaacaagaatacaattcctaacgatcctgcatcacctttcgttacaagcggtatccgtcttggtacagcagcagtaacaacaagaggattcaatacagaagatatggacgttgttgcagaagcaatcgctcttcttgttgatgatgttgaaaagaatcaggcaaaggctatggaacttgttaagggacttacagacaagtatcctctttatgaataattcaatttcatgaataattaaataaaaaattgtataacacatacataacaacaagccgcaggacagataatgttttgcggcttgttgttatataatttacgcgtgtaacgagccaaagtccgtgcttgcacgagaccttggcgactgccgcgataacttgagaaacttgcggagcgtgtttctcatagttatggctttgtgttgcttattgtaaagattggggggggactttgtattaatttaactgaaaaatacagatatatttaatgaattacatgaaagatattataaaattaaatgatttttaataaatataaaaaaattattgaaataatataaaatatgcttgcattaataaaaagattatgataacatcaatttatagcatagattcgtggaaaggggaaggatgttaataaaaatataatttggggttatataaaattctattttattaatgttattgcaaaagtggcaaaaaacaaaagagatgtgttatttgataatttatatgtgcgtgctatagattatcgataatttggggtttgtgaattggtataatctgtataaattgtgggatgatgcatttctacctaaaaaggagaaatttgtatgaatttaaaaaagacaataaaagttatggggatagctatagcatcgcttatatttgtttcagtgccggtatcggcatctgttggaaattaccattttgttttatatggagatggagaaaacagtggggttactgattgtcagactaagcctgatgattatgattatgcatttataagagttacagattcgaatcttattgattctgatgaatgttacatgagcattttgtctagagattacagtgctcttacgtcagaagttaatatggttgaagccggcaacccgtgtcatccgaggtatgatttaggaaccataccaggagccggaagtgagtgcagactcaaaggggttacatataagtatgatgtaactattgagggaagatgggaaacttaatggatgattaggatatgcacgttttgtgcgtatactgatttgtattgtttgtgtaaattaaaattagtttggatgcctgtcaaggtatccaaactatatttggaggttaataatttgtataataaaagaatatttttatatttttgcattatactaattttatttacctgttcagggtgtgcattttttccagatggttccagatatagtggtgaacaggtgactgcggaggtagttactgagaatgataatgttaccggcaaattaggtgataatatattagttaatgcggatctaaaaattcctgatgttgcagtatggaatacatataatgcaagtgcgaagatttacgatgaggaaaaatttataaattttctttcagatgttaatggaattgatataaaagacagacgcgaagaaaataaatattataagtttagtgacggaagcagtgttagttttagctcggaatgtttgcgttatgagactgtaaaaagtggtgaaaaacattataattcgcttgttagcgaatattatggattggcatttgatataagtgatagatttcctttaaacgaattagaaggtttttcaaaagaagagtgtattaagacagcaggtcaggttgtagaaacacttggagtagaaacttatggtgaacctgtaattataacaatggatgcagatagcagcaatcgatttcttaatactgagggaaatgaatatttaaaatatactaatttaaagagtgaagaaggagatggaacgtggacaaaagatgatgaagtgtattttgttgaatatcagttatcaatagataatattccaatatctttacagaaagtatcgtcttcaacatcaagctttgcaggttcatttatagatattgttattggaaagaatggcataatgtatattgaaggcagaggtgttaatcaatatgatggagctcagagaatagagggctcgttaattgatgttaataaagcgtttgatgtacttgcgacatcgagtaaatacatgaataaatttaccgttgataatgcaatggtagtaagttgcgaactttcgtattccacagtaggaacttcaactctttataagccatattataaatttttaataaaatatactgaaacaactgaaaaaaatggtcagatttcacaaaagaatcaagttagatatgtatttattaatgctatagatggaagcatgactgaatgaggtggctgtatgaaaaaaatttttaataatgcagacacgttaggtgttataaggcttgaatttcaaagaatatttacaggctggaatttttatgcagcagttattgtaacaacggcattggtgttatatcagacattttcaaagaataattatgcaggaagtgttatttcaggattggtaaagatgtcggcattgagttttatatgtcgtcttatgactatgtcatcagcatttccggcagcaagcagttactgtgatgattgtattggaaaatattataatcctattgttaataggagcggaatatcaagttatataaatggaaaatttataagctgttttttgtcatcttttttggtttgttttatatcccttattttatatacaataattggaagtatgttgtttattaatgggataggaacacagataaaattgtataatgagcctaattcaatattttatggaatgataaagtgttcaggattgatatatgttatttttcatatattgatttattcgggaacaatagcagttttttcactttatggattggttatatcagcatatatgactaatcgttttgtggcagttacagcaccattgctctcatgtattttgttggatgagattacatcatatcttccgaacttttgcagtcttttttcgtttggaaagttaagttcaaaaatcacagatactcctgtaaaatttattgctttatatacagcggtaatgctggtttatataattatagcaaagtatctttatacaaaacgcgtaaggaggaaactgggaaatgaaatcgtttagaatatgtaatcagaatatacgaaaatggactggaaataaaaggattcttatgattctgatacttatgcttttttttacgcgtgtttatacgaaaaatgttgtcatcttggcaattaatatggggaagacaatatctccgtggcttttaccgtttctattgaacaggagatatatgaagataatatatttgatattggttgtgtttatattttgtgatgcaccgtttattgatactaatcagccgtatgtttttttgagatgtaatagaaatatatggagtattggacaggtattatatataataattggttcatttattatggtaaccatgctatttgtttctacaataattgtcaatataagatatataagatgggacagcacatggggagatgtaataagttatgcatcagtaactaatgttttggcaaacatgggactaagcaatgataccataggattttccggtaaaatagtaaagtatttttcaccattacaggcaatcgcatttacaactcttcttttatggatgagttttatgcttattggacttataatatatgttattaatattattacacgttcacagttattagggatactgacggtatcgtttctggtaatgttatcgagtggagtggatatgcttccgggttcgataaaagagagggcgatatggttttctccttttagttggaatacgctgaataatattaaggtaacagctacaagtgaattacctacaatagattatattcttggcatgtatattggaatgatagttatattatgtattattgcagttgttgcaggaagaaaattggttatagatgtacatgaagaaatgtagtggaggagtggcaaatttgaaaactgataatatatcagaggataatagtattataaatgttatacatgtgacgaaaaaatttggacaggcagttgtgcttaatgatgtcaatatatcgtttgaaaaaggaaaaatacacggtcttattggtagaaatggttcaggtaaaacaatgctgatgaaatgtatatgtggatttgttccaataacacaaggggagatttttgttaatggtaaaatgataggaaaagacatagatgttccggataaattgggagctataattgagacacctggttttttgtataattacagcggttataataacttaaagttcttggcagctatacaaaataaaatcagtaaagatgaaatttgtgatgcaataaaacttgtaggacttgacccggacagtaagaaacatgttggaaaatattctttaggaatgagacagagactcggacttgcacaggcacttatggaaaatccggatatattattgcttgatgaaccaatgaatggtttggataagcatggtgttatggaaatgagggaactttttaaaaagcttgctgataatggtaaaactataataatggcaaatcatagttcagaagatatagaagcgttgtgtgatactgtatgtgagatggatttgggcgttttagagagaataaaataaaaaaggctgtgccttaacgactaaaaattgttaaggcacagcttctttgttatgtacaaaattaattttactttgtattgttgtttttcttaacttcttcctgcttcatagcacgaacctttaatgaaagaccgaaaagattaatgaatccttctgcgtcatggtggtcatagaggtcacctgtcttgaatgaagcgattgattcgttgtagagtgaatatggagaagttgtacctgctttgatgatattgcccttgtaaagcttgaatttaacttcacctgttacatattcctgagttttatcaacgaaagcctgaacagcttcacgcagaggtgtgaaccattttccttcgtatacaatctgtgcaaatttattgcccatatcaagttttaacgctgttgtatctctatcgagaattaattcttcaagctgctgatgtgcttcgtagagaattgttccgccgggagtttcataaacgccacgtgatttcatgcctacaacacggttttctacgatatcgataatgccgatgccatgttttgcaccgagtctgttaagttcacggataatatcagatactttcatctgtttgccgttgactgatgtaggaacacctttttcaaatgtcattgttacatattcagcttcatcaggtgcatcttcaggacgattgccaagaacaagaagatgtttgtaattaggctcgtttgctggatcttcaagttcaagaccttcatggctgatatgccataagttacggtcacggctatagcttgtatctacagagaatggaagatgtatgccgtgctgtctgcaatattcaatctcggcttcacgggaatcaagaccccatttatcatttctccaaggagcaataatcttaatatcaggagcaagtgctttgattgcaagttcaaaacgaatctggtcattacctttacctgtagcaccgtggcagatagcaacagctccttctttacgtgcaatttcaacaagcttcttagcaataagaggtcttgccattgatgtaccaagaagatatttgttctcatatacagcatgtgcctttacacaaggaacaatatattcgtcacagaattcatctgtaatatcttcaatatataacttagaagcaccgcatgaaatagcacgttcttcaagtccatcaagttcttcgccctgtccgcagtctgcacatacgcagataacatcgtaatcgaaattctcctttaaccatgggataatagcagtagtatcaagaccgccggaataagctaaaacaactttttctttcataaataaatcctccttattattgcggggaaaataatgccgcatttataaatatacgacagaaatctgttctcctcgtgttgtgaatctcatgtgttttataataatccaatcataataaaaaagcaataggcaaaattatttttatgcagaaaaatgtgaataaaatacataattcatgcataaatataaaaaatatgcaaataagactttacataagaaaaaaagttgctataataaaaaacatacacaaaatgcatgcagatgcgattggaggaagtatatgataaaagtaggaattatcggagcgacaggatatgccggaaatgagattgtaagattattgcttggacataaggatgtaaagattgtatggtttggttcgagaagttatatcgaccagaagtatgcagatgtatacagaaatatgtttcagcttgtagatgatgtctgcatggatgataatatggaagaacttgccaatcaggttgatgtaatatttacagcaactccacagggattatgtgcatcacttgttaatgatgacatattaaataaggtaaagataattgacttgagtgctgatttcagactcaaagatgtaaatatttatgaaaaatggtataaaatcgagcataaagctcctcagtacatagatgaagcggtttatggactctgtgagattaacagggacaagattacaaaggatacaagaatagttgctaaccctggatgttatacaactacttcaatccttacactttatcctatggtaaaggaaggacttattgaccctgatacaattataattgatgcaaagagtggaacttcaggtgcgggaagaggtgcaaaggttgccaatcttttctgtgaagtaaacgagagcatgaaagcatatggtgtcggaacacacagacatacacctgagattgaagaacagctcggatatgcatgcggaagagatgatttaaagctcatatttacaccgcatctcgttcctatgaacagaggaattcttgtaacagcatatgcaaatcttaaaaaagatgtaacagatgatgatgtaaaggctgtatacgataaatattataaagatgagtattttgtgagagttctggataaaggtgtatgtcctgagacacgatgggttgagggaagcaattttgtcgatataggatataaggtagagcctagaacacacagactcattatgatgggtgctttggataaccttgttaaaggtgctgcaggtcaggcggtacagaatatgaatcttttattcggacttcctgaaaatgaaggactgcagcttgcaccgatgttcccataatagtagatattttgtgggattaaccggacagcaacgaaaaataaatcacacaatataaatacaccgtaataaattcagcgtgaggagattaatcaatatggaaattatacagggtggcgttacagccgcaaaaggatttaaggcggcaggtatgaatgccggaattaaaaacaagacaaaaaaagacatggcaatgattttttctgaaaaaccatgtgttacagcaggtacatttacaacaaataaagtatttgcagctcctgtaaagtgggataaaaatattgtatataacagtgaatattcacaggctgttgttattaacagtggtgttgccaatgcctgcacaggcgaggagggcgacaatgcatgccttagggaagcacaggcagtatctaaggcacttgggattcctgaaaattctgtgcttgttgcatcaacaggtgtaatcggaatgcagcttcctatggatacaatggtagcgggaatcaatgcacttccatcaatgcttgctgatacacaggaagcgggaacacaggctgcagaggcaattatgacaaccgatacaagatctaagcaggttgccgtgacagttgacataaaaggaaagaaagttacagtaggcggtatgtgcaagggtgcgggaatgattcatcctaatatggcaacaatgctttgttttatcacaagtgatgcaaatatcgaaaagagtgcacttcagaagatgacaagtgcaatagtagatgattcatttaacatgatttccgttgatggcgatacatcaactaatgatactgttcttgtaatggcaaacggaatggcagaaaatgaatgtataaaggaaaatacacctgagtacgatgaatattttaaagcactttcatatatacttacagagctttcaaagatgatagcaggagacggtgaaggttgtacctgtctttttgaagtaaaagtaattaatgcaaaagaaagacaacaggcaagaacacttgcaaaatcaattgttacctcaagtctgacaaaggcagctatttttggacatgatgccaattggggcagaattctttgtgcaatgggatattccggagcagattttgaacctaaaaaagttgatatttactttgagagcagtgctggaaagttaaagatagttgaaaatggcaaggcaactgattatagtgaagaagaggcaacaaagattctttcgcagaatcctgtaacggctatagctgatgtaaagcagggtgatgtcaacgcaacggcatggggctgtgaccttacatttgattatgtaaaaattaatgcagactaccgttcataattaaataagaaagaattttaaggagaaattattgacatggaaatgaatgaagaattaaaaaaagcacagattctcgttgaggcactgccttatatacagaaattcaacagaaaaataatcgttgtaaaatatggcggaagtgccatggttgacgaggaattaaagaaaaaagtaattcaggatgttgtgttgttaaagctggtaggatttaagcctattatcgttcacggcggcggaaaggaaatcagtaagtgggtatcaaagacaggtggaaatcctcagtttatcaatggcctacgtgttactgatgaacctacaatggaaattgctgaaatggtattaaataaggtaaataagagtcttgttgcacttatagaagaacttggtgtcaaagcgtgtggtatcagcggtaaggatggcggcatgttaaaggttgaaaagaagctttcaggtggcgaagatataggttatgtaggtgaagtaaaagatgtagatactacaattataacttcacttttaaaagatgattttatacctgtaatctgccctataggatatgatgatacatttcactcatataatattaatgctgatgatgcggcatgtgcaattgcaagagctgtcaatgctgaaaaacttgcatttcttactgatatagagggtgtatacagagattatgaagataagtcttctcttatttctgaacttacaactgatgaggcaagagaacttcttgctggcggaacaattggaggtggtatgcttcctaagttaaataactgtatagatgcgatagagcatggcgtttcaagagttcatattcttgacggacgcattccgcattgtcttcttcttgaaatatttactaataagggtgttggtacagctattcttagtaaagaagcagagaaattttttgatacaaatatctagttaagggagaaaaatgatggatacaaagacaattattgaaacagctgaagaaaagcttattcatacatataaccgttaccagattgtacttgacaaaggtgatggagtaagactttatgataaagatggaaaagaatatcttgattttggtgccggaattgcggtatttgcattgggatataataataaagaatacaatgatgcagtaaaggctcaggttgacaagctcatccacacatcaaattatttttacaatgagcctgcagtaaaggcggcccaggccgtaacaaaggcttccggcatggacagagtgttttttacgaacagcggtacggaagcagttgagggagctataaaacttgccaaaaaatatgcatatttaaaggatggctcaacagaccatgaaattattgcaatggaacattcattccacggaagaagcatgggggctcttgctgtaacaggcaaccgtcattatcaggaagcatttggtcctatgattccgggaataaagtttgcaaaatacaatgatcttgaaagtgtcaagtcacttgtgaatgataagacatgtgccattatcttcgagacagttcagggagagggcggcgtatatcctgccaaaaaagaatttatcgaaggtgtaagaaaactctgcgatgagaaaggaattcttcttattcttgatgaaatccagtgtggcatgggacgtacaggttctatgtttgcatatcagcagtatggtgtgaagcctgatattgttacagttgcaaaggcacttggctgtggcgttcctattggtgcatttcttgcaaaagaaaatattgcaaaagcacttgttcctggagaccatggtactacatatggtggcaatccgcttgcgtgtgcggcatcagcaaaagtatttgaattatttgaaaaactcaatgtacttgaaaatgtacaaaaagttggtgcatatatggctaaaaaattagagcagattgttcaggattatgatatagtaattgagcacaggggcgtaggtcttattcagggaattgagttgtcattaaatcctaaagatgtgatttccaatgcacttgataatggtcttattctgttctcagcaggcacaaatgttataagatttgtaccaccttttgtaataacagaaaaagatgttgatgagatgatagttaaattaagaaaagcccttgatgaaacaaggagttaattattatatgaagcagttaaagagagcagcggcggttttacttgcagtttgtctgattttttcgcttgctgcgtgtggtggtgtcaatattgataaaacggcaaaaaatcttcacattgagcaggcagagaatataagagtatggtattgtgacgacaggtatacagattatctgaattttgttgcggatagatttcattctgcaaacgaacttgttacaattgaaccggttttggttgattctgataactatcttgagaatatatatgaagagagtgtacgaaacggtaacgtggcagatgtatatcttatgcttacagatgagcttgaaaaagcaagcatgatgggtcttacagttgagaacagtacatattctgatttgtatacacaaaaaaattatggaaacagtgcaattgaagcagcatcatataaaggtaaactttatggatatcctgtcacatttgatgttccatttcttgtatacaataaaaatgctgcatcttctgtagaaacattttcacagcttatagattattgtcataattatacagttaatgatgataatcagaatgttgagcagctcgtatcatgggatgtctcagatatgcttgttaattacgggtttgtgtgtggttcggttacaataggcggagaaagcggagatgataatacaaagctcagtgctgacaaagatttacttaaaaaatcgctgactgaatttgtaaaattaagagacgaatttggtattgtgcgtgccgagacaacgcttgattcatgtgctgatttatttgcacagggaaaacttgcatatacaattacagatgtttcgcatcttaatacaattgcggagtcaggaatttcatatggtgtatgtaatattccggcactttcagatgatatgcagattgaaaatatttccgaaaatttatgtgcatttgttaatccgtattcatccgatgtccagactgcaaaggcagttgccaacgctatgagctatgattatgctgctgctgtaaacagcacaacagggcttttaagttcaagaactataagcattaacagcaaagaatataaggatacatatgggaaaatatatgaaatatattcaaaggctgatgacaaagcaaaatttatgggagctgcatatttttatacaaaatttgatataatgcttcatcaggtatgggatggaactgatatagaaacatcagtaaattcatttttatctgaattaaaagtccaataaaaataaagaataaaaaacctgttatgagtacataattaagtattagattgaaaataatagtaaatttaattcttaggaggtactgatggcaggttttttgattgcaattttatcgggtgcattaatgagtatccagggagtgtttaatacgggagttacaaagagcagcagtatatgggtagcagctggattcgtgcagattacagcatttcttacatgtgctgtgatgtggattgttgacggaagaccgcagataatggggctgtttaatgtgtcgccgaagatatcgcttctgggcggtgttattggtgcatttataacatatacggttgtaaaggctatgtctgatcttggagttgcaaaagctgagattaccattgttatcagccagattgcggttgcctacattattgaattgttcgggctttttggaagtgagaaaaaagatttttcatggataaagctgttaggcattgcggttgcagttacaggtgtagtaatatttagtatgtgtggtaattcaaaagagtaaaatcatatgtaaataaaaatatacaataatttaaattcatattagtaaaggagagtacatggaagatttatttaaaatatgcggaattgttaatttgaaaaaaggtgagggacgtactatcaaagccggcggaatgtgggtatatgataatgagatagaaagcatcatgggagatgctcctgatggaacacttgttgaagtgcatgattttgacggatattttatgggaataggttttattaacagaaggtcaaagcttacagtcaggatgatgagcagacatcagcatgttattgatgaggattttattgagcagagagtgcgtgactgtgtcgagtatagaaaacatacagttgatatgtcttcatgccgtcttgtatttggtgaggctgatttccttccgggaattgttattgacaagttttcggatgttcttgtggtagagtctcttgcgttgggaattgacagattcaagccaatgatagttgataaacttaaaaaagttcttgatgaaaatggtatgaatatacgtggtgtgtatgaaagaagcgatgccaaggtacgtctgaatgaagggcttgagcgttttaaaggatttattggcgaagagtttgatacaaaagttatgatagaggaaaatggtgtaaagtattacgttgatgttcaggatggacaaaagacaggatttttccttgaccagaagtacaatcgaaaagcaatatggaagatttgtccgggtgcaaaagtattagactgctttacacatacaggctcatttgccttaaatgccggaatggcaggggcagccagtgtacttggagttgatgcatcagaacttggagttgaacaggcacgcgaaaatgcgaagcttaacggacttgaggacagagtttcatttgtatgccgtgatgtgtttgaacttctgcctgaacttgaaaagaagggcgaaaagtttgactttgtaattcttgacccgcctgctttcacaaagtcacgcagttcaatcaaaaatgccgtaaaaggttacagggagattaaccttcgtgcgatgaagcttgttaaagacggcggctaccttgctacatgttcatgctcacattttatggatacagaactttttacaaagacaatcggcgaggcggcaagaaatgtacataaacgtctgcgtcagattgaattccgcacacaggcacctgaccatcctgtactttgggcatcagattcttcactttatttgaagttttacatcttccaggttgtggacgaacgttaggcgtaggtgttttgtcaggaaaatgaatatgctttgtttcataaaggattgatattatatgtataatatactgtaaaaaaattacgatatagcatataatcactgtaaaaaagttgcaacaaacggatgctgtatgtataatataaataaaagacatttgcaaaggggtatatattatgttggagaagattatatttgaaaattttaaatcattcagacaaaagacggaaataagcctcataaaaacaaattatacgttattgccgtataatgttgcagacaatggtgtgttaaagggatgcctgtttgttggaccgaatgcttcgggcaaatccaatattataattgcaattaaatatctgctggattccatgtttttgaatcagaatatgaatgcaaaagtttacagatgtattttctctgaaaaacgcagttattttttggattattattttttgattaataatgagcatataagatattttattaagattgacgataaatttaatattacggaaaaattatttattgataataaattgaaaatggagcgtattggattatcggcgaaatcatatatagctgatgaagaaggtgttatttatgatgagaatgatatagataaggagacgctttttttaagaacattgtattttaatacaaaattcacaacaaatgaaacattgaaaaaatggattgaatatttaatgaattccgtatatataaatctatatgaaaaaaaggttataccgtacggaaaaactaattatcaattgtttgaatatttaaaagacaatggtacagtaaagattaatgatttttttgacagatataattttaagcagcaaatagaatatgcacattcaagcgaaggtaataatgtgagaattacctatcgcggagacgaaagtgacaagtatattttttataaaagaaaagggattaatgaacctattccgtttggtgaggaatcgcttggaaatcagaatcttttaagaatgttaccgtcgtttttgggggtggttgaaaacggcggaatgttgcttattgatgagttttcaagtggatttcacaatgatttggaaagtatgcttatcaagtattttcataaggaatcaaaaaattcacagatgatttttgtatcacattcgactaatctgctttctaacagtctgctaagaccggaccaggaatatacggttgaatttcaggataaaaacggaagcaaagttaagaggttctcgactgaacagccacgttcggcacagaatatcgaaaaaatgtatacaagcggcgtgtttggtggcttgcctcagtttgaagaggtatagccatgattgaaataaatgataaaaagagtattggaagggtactttttattgttgaagggagtaaaacggaatttgcaattcttagaaaaatattttgtgacatattaaaatatgaatatattgaaaaaagaagaaaccgccctgatacatttaaaagtaaaaataacagtacgtcaaaagttgcagtaataaatacagaagaaagtaatattaactatattacggatagcgaagaatatttagatgtattgtttgaaatgttacggaaaaaatatgattttcctgttgataatgcggcaatatattatttgtttgacagagatccgaaatcaaacacagatgttgaaagaataaaaacatatattgatacattaaaagacccatatgataacggaataacaaaagccggaatgtttctgcttagttatccaagcatagaggcatatacagtatcaggatttgagaaaaattcctgtgaaatgagaaaaaatcttggttctgagctaaaaacatatataggggagaataagaatattcagtttaataaattcaatgagagtatagttttaaatgcggctgatgaatttttaaagtatttgtttaatgaaaagttaaattatgatttggatgatttttcgccaactagtaaagaaatatttagcaggcaggaaaaagagtatctgtcgggtaacggatataaattattttcgatgcttacgctggcgtttatgcagctggggataattacacatacggaagctattacataa

SEQ ID NO: 875 - DNA, 19367 bp, unidentified
  source 1..19367: mol_type = unassigned DNA
  misc_difference 3797: note = a, c, g, or t
  misc_difference 3798: note = a, c, g, or t
  misc_difference 3799: note = a, c, g, or t
  misc_difference 3800: note = a, c, g, or t
  misc_difference 3801: note = a, c, g, or t
  misc_difference 3802: note = a, c, g, or t
  misc_difference 3803: note = a, c, g, or t
  misc_difference 3804: note = a, c, g, or t
  misc_difference 3805: note = a, c, g, or t
  misc_difference 3806: note = a, c, g, or t
cgccattatcagacagcgtgttcttcagcacaaagcctgccatgcaggactttccaccattcaccagatattcatgtacggctttgaaaccttctttgccatagtaatcatctgcattgatcacaatgaacggagtatcaatcacatttttcgctgcaaggacggcctgtccagtcccccacggctttgtccggccttccggcagagttcccgggatatcgttaatatcctggaaagcatagtccacagttacattatgagcagcacaaatagaggaaatacggtcaccgatgacctctttgaattctttctcgatatccttacggatgataaatactacatggttgaaaccagcctctatcgcatcatggattgagtaatccatgatgatatgtccagcatcatccaccggctccaactgcttgattcctgttccgaagcggctaccgataccagcagccatgataagtaatgttgttttcattgttatttctcactttttctatcaaattgattctaccatagttttcattcttcacatctctgccaatcatagatcgttgcctgctgctcacctcgtagcggtgtgtgattatccgagcagctaccgtgtggaaatccacacggttttattttgccaagcacaggcaataattcgacagtattcggcttttgggtcaaatttcgttcattttgtatttacattttagtaccagggggctggcacaaagtgccttgtattctgcggagtctttgtatgcaatcacaaagtatatattctatcgcgcaaagaaaaattacttcgcaaaccatccttatcgtttgcgtttttattaaaaatccaacacatatttctacaaatttattgatatgcaaatattgatgtgttgccattataaaaatcgaatttcgaccaaaaacaattagaaaatgcttcagaatttcgattttgcttagaagctttgcaaggtatagtgtggctatactgcccataatacctaatacaaaagatataatcggtgttcccaattcaagaccagaatactctatcggcttcgcctcatttgatacaataaaaatcacaccccacatcaaggctagtttaaccactgattttctatcctcatgaactatttttaagaatactttctgaagaccaataccaagagaaatccaagaaaaagctacaatgcctcttacaaccgctgcaaaaacaattacgcctttaaattcagagagcaacaccaactttgaacaaactgctccgatgaaataagcgcccccccccacacagcaaataaaatttctcgcttttttggccaatgagcaaaacaaaagccaagccaatagtaagtgcgctcaaaaaccataatacggatacaccataaaatgaaattgtatatacaacttcattccacaactcatgtttcgttcgcgttccttcaacactatatctcacgatatagtcaaacaccaagtatattccagaccactcaatgtatttagtcaagatctttttaatctggatagctttacgagctctcgttctagcaatattataaacaataccagacaagataaagaacaacggcatgtggaatgaataaataaaattccgcaacgaggcacttacacacaaatgtcccgtaataaccagaaccattcctattccttttgatatatccacttcttcgatccggttcgatcccgtcatttttcttcactctttctttgccttgtccagcgtaataaaaacactattccttcctcttttagcagcatcaaaatcaccaaatatgttattgctgatataacaatgtccgctaaaattcgcacagcaaacaagtgaactccactcaacaaaacacaacaaatcacaattgctatactacctaaagccgtatttcggattgtcttgaaaattcctgacaatttcacatattttcgtgcataataagcctgaattattagcgcagttccttccgcaagcaatgtcgtaaaggcagccgcattttgcgcaaaaaaaggaattagtataagatttagaattagattaactgctgcactaatcattgtagccttaaaaatgattttttcatccttaaatggcatcaatatgcactgtccaacaaaggttgccaacacacagaccggtaatgctgcgcacaaaattacaagtgattctattgctcccatgtacgactcatctgccaaaagcaatatcacttctcttctaagcataataacgccaaccgttaccggagcaatcaaaacaataacagtttgtaatattgtttttagctgtttattatattcactctgcatattgttagcaatataataagaaagcctcggaatagctaccattaaagtggatgttgccaccgtctttaaaacggtatatattttagtagaaacgctatacagaccgacattataatcggaacagatgaatcccaacactgtaacgtccgaattcacatatattgtgcacgctaatgctgtcgaaaaaataatcagaattggcttcagatgatgtcttagatttagtgactttcttaaaccaaatcgaatctttttttgagcgcagacacagttaacaacattcgcaccaacatttgccgtaactgtaacgactgcatatggaataacgtcaccttgttttctcacaaaaacgaataaaagcacaatagacaacatctgaactactatgctacgaattgttaagaaaagatagtcctcataaattccaaaaatccattccgtaccgatcgttgtaaaaataatttgaacgctaaatgtaagcaacagcgccgtgtatccatggaatttaggcaccgtaagcagacacataaagaaaacaacatatacaatcgcagtgacgagcatgttgattgacaggatttctccacagaatttctttagtttttcttgattgtctcttattcccgctccttctctaacagcatagctagatattccaagttgtgcgaagagtgcaaaatatccgataactgaacttgcgaaattgtactgacccaagtctgtcacacttaatgtttttgcaacataaggaaacgaaatcagcggaaaaacgattcccatcagactttttacagcatttaatgccatatttaatttcaacgatttttctttcattattttattttttccctgctatatgtaagagagaatctcgatacctttcatatgatatctctttatcaaaattactttttacaaatttcttctctgcaatcgacatggtggtcagcttatctgcactatcaaagaaggcatctaatacacgaatataatcttctgctgtctggcaatgaaaatattctttttcattttcagcattgattccttccattcctatttcatttgtaagaagcggtacacccgcactaagtgcttctaagaccttaacctttattccagctcccataaccagaggtgcaatcatgcatgcacaattttgcaaccagggtcttatatcctttacaaatcctgtaactattactctttcgtcttgttgacttaggaaaaccagtttttcgtctggatgtgatccgagcaaaacaaggttccacgacgtatcttttaatttacaaaatacattttcatagaaccaaagtgcgctttttacgttttcaacacgattcaatgcgccaaaaaacacaatattctttgtcgttggtttccatttaactgtactgtagtcatcatagtatggaacaatcgaagaaaacttatctttacactgcggcatcatattttttgcacgttttaannnnnnnnnntctctgctgtgaaaaaatgtcatatcgcattgagcaagcgctcccaattccaacctctttaaatcttctaactttttagccgtgaagcctttttctgcagcttctaccttacgttgaaaaccaactacactcaggtcatgttcagatgccacaattttgctgtcagggaaatagttgtgaaccaactctcttgtcagtacacactgtgtccattctaaaataatgatatccggcttatatttttctctcgcaagttcagccaatttcttttttaatagaaattcatcgtatgtattatagaatccacaatacttctggagcggccaatatttcgtagccttactcattataaacctcaacactttgtcttttaccgtatatccgtactttgccggtactagacgatacggatatgtatgatccaatttgttaaagtcttgttttgtaacaaatgtcaataaagttacttcatcatccttagcaaacgaatttaggtaataatatactgtcttaccgcctgcatggctcacattctcataaggaaaaaaagccgaaataaataatatcttcatataaaatcctcattgggctaatatcaaacgattcaatgcccgaatcactttcttatttagtaaatgttcagcaaaggaaagtaaaattgttatagcaattactgttcctgcataagcaatcccagcggtatcaactgccaaaaagtgctttaccacactcattacaaacccgtgtgtcaagtatatttcataggagaacgctgcaacccacttcaaaaatatactgttcaggctaaagaagtaatccaccatcatcatcagatagacagctgctattagcgtaacctgctggatcaacaccttagcaacttctcctacactgtttccatactttatctgtaagaccgtaccagctcccaaggctataaggcttacaatcacactggttttatcataatgtttaatccaacaataaatctgctctttatatcttgcaaccaaaatgcctaccaatacaataagaacagcattataccaatatacagagtagtttctaaacaccccaaacattatatatcccaccaacagcagtgtcatcacatatagattacatttccttgaagaattcatttttgaaatttcaaagaaaacatatacgataataattgcggcagaataccaagaatacttaacaatcggatccccttctagggttgatgccacaatatcaaaaaaagcaatctgttccgccatatattgaccgtagatccaatatagcaaactaatcgttatatatggaatgcaaattgtaacgacacgccgcagcaaagagtgtttcttatgctttgccgcatatgtctccccatactccaatccataccctgatatcaaaaaaaagtatccaaccaataggtatcctgaaatcacggagatgtaacccaactgatgaaaaaatccatcagcgaacttctgagtagctatatggtgggcgattatcagcaacgcacacattcctcgcagctgatctgtattttgcttttcaaaccatgcttccaccgatcgtgtctttctgtatcttatacccgccaaagaaagtccaccgattactaaataaatcaaaagctgtgtcatatcacattcctctttcgagctgcttcattttgtcaatcagtgccaattctaccgccaacaaacaataagtgtaataatataacatgtacggtacgagtatggatactgcaatcaagtatataccaataccaaccccacactcgattccaaaatccaatttcctttgcaacttatatgtactgatggaaatatataaacacattagaatattacaggcgaccccaaaaaagccataaaaatacgctaatccaaaataaccattatcaacaatataaaaatcttttgccctactgattctcacagccgatgaactttgaatgttcacatatcctttaccaaatatcatactagggatatcttctgtaacactttgtatataaaactgctgtcctttgtatcgaacatcagtttgactttgataagaatcgattccttcccgaaatccctctaaatattgatcaactatggggatcggtgcataaagcaacacaacagcgaccgcaaaaatagaaacagccgctttccatttttgcctattgaaaagaatcaacagaatcgtcagaaccaatgccagaacaataatccccgatcttcctttgattacagcaatataataaaacagatgaatcgcaaatataaatccccatttccaacaaggacgtttgattatcttataatacgcataaaacatgctaaaaagtgttcccacttcattaaagcgtagccgcacttggccaaaccgatagtcatagtccactatcagaaacttaaacggaaagactaaatattgaatgctgtaaatcgttgccgcagcaattccaactcccagcataacatttatcacccatttaaatccccctttgcggctcaatatcacattttttatcgggaagtaggccagcaaaataaggtaatatctttgcggacgcagtcccataaggatgctctgtccataactctgctgcgaacggactgcagaacatactaccatcaaagcaattgcagtcagaagtatttttgttggcttatctgtatttggtaatccaacgcctttatagtacagtaaatacacaaaaaacattacaaccgcaataataacagccaaatccatctctgtgattggcaaattcaccagataaaaaaagtgttctcccgtcaaaaccaacaatagaaaaaggagctccataaaatcaatttttcttattctcatcttgttatggctcctttcttagttcctgcacgccaaatttcacatagcttttccaagccttccaacaagatggatcttttctccaaaatatataggtttccaatactcgaatcacgaaaactaacacctggtacgattttttccagtgtctatatttcctcataaaatacaattcacttttaaagttttctgtccgcgtcaaaagatttaccccaggctttgttgaaccgccatgttgatgcaaaacctttgcatcaggttcgtactgtaacctcaactgtgcattttgcgatttttctgcgataatatattcctcgtaatacaaaaaagtaaacgggtcaaaaaaatgtattttttcaaagtccttcatacgcgccgcaaatattgcacccgatagccaataaacatcttgttttgtctcttgttgttcctgccacttcaaccactctgcttgatttttcttaaaaatccgcccaatcaatgtttcgcgacacaaatactgccacctatctgggctcttatgttttgctgtaagttgtatttctccttttgtaccgaccatgtgcggtcctacaaatgagatgtctttgtcattttgtaaatcctctatcatcaggtcaattgcattattcatcaagaatatgtcgttattcataatgactgcaaactgactttcatcttgcatcgctcgttgtagcaacttgttattccctcgtgcataaccaagattttcctcagatgcaattagtgtaacatcttcagcttcttcgtaatatctctttagttcatgcagggactcattttttgaaccattgtccaacaaatagatatgataatccaccgttgttttttcgcgcagaatatctatacacttttttgttttttgatatgtattatagtttatgattataactgcaactttgctcatcttcgctccttcattttttcaaggtaaatctcagtcacatcattggcccatttttttaaaccaaattcctttacgagaaagtcttcgacatgtgctcgattcttttccttctttacgacagaaagaatcgcattacttaatgcctctggatcttcggccggaataaaaatcactcccggtatcttttcgtaatataattgaccaccaattttcgttgctaccacgttgcacccgcaataggcggcctcgggtatcgcataggcaagtccttcttctctggatggtgatacaaaaatgtccactgcacgataatacgttgcaatatcctgccgcggcggcaaaaaatgcacccacttcggtagcatatttgttcctgcaacctttttcaatttatccttgcatatatcctcattaatagaacaaacaatgtacaaattaatttgataccctttgttaactaaatcattgattgccttatatgttatatctacacctttcctctcaaaatcggctccaaacatcattaccgatattccctgatctagtcctattacttcatactcatctaatctactaaaactgattgcattattaacacatctgacatcaatcttggggaaatctctttttattgaatttgtcacagattcagagcatccaatcattgtcgcactacgataaaaaatatttccatatatcttcctcagtggatgctcattataatcggaatggttatgaaaatgtcttattaataccggccttccccccccccccatattccacaaagaagtaaggattgctgtatgcattcttattccccaaaagtgcatatgaacaacatcaatattgcaatcctttacaacttttcttatccgcttcacattgttagaaaagccttctcctaagtaaaacacatgcttattatctttattgatactatcaatccatgaggctgactttgtttttgtttcatcagcaaataaatagaagttttcgacctctgcaatatcattattttcaatcatatccaacgaatcaataaaatttcctctatagggtgcagagtaattcaaaatctgcaatactttcattatattctctcctccatctcatataactcgtgcaacttatgtgctgtaactttaatgtcaaatatccgcgctttttccactgcatttctgctcattgcttctatacttccatcacacaacttttcatacatctgagaaatcatttcagcaagtttcccagcatctacatctttttcaagaaagccctctcttccacttgtaatcaattctggaattgcgcctttttcaaacgcaatgcaaggcaatcccgtcgccattgcttcaacaagtgtaattccaaatccttcgggacaccttgctggatggacaaatacatctgctgcatacagataatctcttactcgattactttttccttcaaatgagattttgtcttggactcctaactcagcggccattcttttgcattctagcatatcagttccttcacccacgaaaaacactttaactttaacattttggggtaaatccgaaatcgcttgaattaaaagatcgcagcccttttctgggacaattcgtccaacgtatatgattcttaaataatcctttctttcgcgtttgatatactgaaatttgtccaaatcgactccgttatagacaacttcaatcttgctgtcctcccctggagttaattgcaatgctgttcctttaacatattttgagattgcaattccgccttgtgccatagaaaagcactttctgtaaagcattcgattgacaatgcccttccagccaacacccattgcgcctaccatgtcacagtgctcatacatgaaaatttttgctgtcggaatttttttctttaagaataggagaattcgaaactccataaaacatcctgtatgtgacactataacatcgatgttatgttttctacaaatatcaaggtactcttgctttgcctttctatctgatttatgcgaagcattaaggacatagacaggtattccctctgctttcatttcatccgccacacagccgccttcaaacaaaaagacaaaaacattttgatcctgcgaatacttactaatttcccggctcaacgtagcaattccaccaaatccaccggataactgcatatgtaaaacgttcattcttattttcctcccctgaccagcgatctgattttattgttcactttgcccctcattgttagcatatgaagtaacattttttctattgtacaattcgtttttatactataatcggaaaggctttctatatcgtctacattatctgtttcacaaattttatcaggcataaaaacatattgcttgggaatctcattgtatggacactgataatgtctctttgaactatgaatgtaaatatacctgtgctcgcacagtgcatttttcttatttcgatatttttctataatttcgcctctcgcaaaacaaaaaatttgctgcgtatgattctgaacttgaactccatacatgcgttttgcgtacacatactttgttaatcgctgatcgtatcctgatactatatctaaaaaaggaatatattccagcattctccaacttctttttttatacattgcatatattccaggcgtttcatcaaattgaaaaattctaggcgaagaaaagacttcatgataatccatgatatccggacattccataaatcgcctattgatttcatctgtattcctataaatgctcaggtgtcccaacggtagaattttatcgtatccttctaaaatttcatctgtgatatacttccggatatttcccaacaccatatccgaatcacagtatccccaaaaatcatattgccttaattcttcctgaaaaatcaatccgtacgcaactttgtaatcgcataatttatacggcgtgcccaattcaacatcaaaattaaaaattctatctgctacatctttaatgcattttagtgttgtatgcaatatttttacatttggcggacaaatatctgctatgatttcctgatccgttacaaacaggaaatcaattgttttattatatccacaactatttagccagaggtaaaattccgactttagttctccaaaataacagcttatcaatctaattttatacattagcctattttacctcctatcacttttcttacccaaagaatctatcttccagcatcaagcacaagcagtgatacactggaagatgaagttcctgaatcatatatgtttctgtctgcggtactttgatacaaacgtcactcatcagttccaatttgctgctctttgcaccagtcaaaccaatgaccttcatacctttggcatgggcagtcgttgccgcatacaaaacatttttactgtttccacttgtagaaatgccaagaaacacatcccctgctttaccgtaaccattaacctgctgtgcaaaacaaagcaacggctcgcagtcgttcatatatgcagtagataatgctgggtgtccatccaacgcaatcgcgggaagtgcaccttgtaaattttccgcaagaacagttcctaattcctgattttctgccataagcttttccgcaaaatcagctctgggctttctcggcattttaaagcctttcattagttcaccaacaatatgctctgcatctgcagccgaacctccattacctgccacaagcagctttccaccatttacatagcactcttccaaaagcagatatgcagagataatactgttcttttctgattcaagtgaagggtaacgttccactaataaatcaatatgcttcatcaatcttttttccaactcactcatttcgataccctttcttttatttcagacactgttctacaaactcttttaatgtcggtattgtcactgtctgaccataagattcacgaccaatcaacgctgttctgcatcctgcattataaccggctttgatatcgttttctccatcaccaaccatccacgactgtgaaagatcgatattgaaatcttctgccgccttcaacagcataccaggcttcggtttgcgacaagtacaatcaatttttagctctggtctctccccttcgtatcccttatgaggatgatgagggcaatagtaaatggcatccaaatatgctccttcttttccaagaagtgtctccatcttattgtgaatttcttccagctcttcaaaagacacttcaccgcgagcaattaccggctgattcgttacaacaactgcaagatagccagattcattgattttacgaactgcctcagccacaccatctatcagttcaaaatcatctatatttcgaagaaaaccaacatatttattaatagttccatctctatcaagaaatactgctttttgcttattttttagatttttcccggatactcttccttctttataatccgcgcatacggagtaataccgttccggggtacccatatctttcacatattctgggctgtcataacagaacatctttcctgtcccggctaacggttttaataactgccgatccaaatcaacttttaccggtttaccgtttgcaccgatcttgcctattgaatccgcatcaatatcaaccagttccagcactttcgggctgataacatgcaatcctgcattcactcggtttctataatactgcggccgctcgtcttcttttgcaagccacttttttacctctccatttttatctgcaacgattaacccgctatcatatggatggctattcgggtgggtaaaaagtgtaaccattccaccatgttcctgatggaagccaacaaaacgattaaaatcaacatcaaacactgcatctgcatttaaaagtagaaaatcagatgtcagattatctttaattttgaacaaggcacctgcgttgcctaacggttctttttcaaaatagtactcaatatgtacgccaaacggttttcccgtcacaggggatgtaccagatccatccccaaaatagtccataataatattaccaagatgactcaccgtaataataatgtcagtaaacccttggtcacgcagacactccagctcatgttccagtactggtttcccttcaattttaatcataggcttcgggatatcactggcaactgaagaaatacgcgttcccttgcctcctgccattattactactttcatctcttcattcctcactcaaaattagttctttggttcgtaggtttccggtgtataatgaatcaccctcgtaccaccatcctcaaatgcaaacggaatatgcatcaggtcacgcatcgcccaacgcaccgcatcctgacgttcaggctgaacatagaatacaaggaatccgccaccaccagcacccagcaattttccgcccaatgcaccagccgccacgccttttgcataaagttcatcaatactatttgtagaaacagccgatccagtttgacgcttaagtttccaagtgtgatccagcattctaccgaaatcatccagatctgcattcttgtctgtcagaacacgctctgcatcatcaaccagagcaagcatctctttcaactgagcagtcttatcttgttttcctgctgcatttgctttctgcacatcagaagagaaacgggtaaacccagtgaaaaacatcatcaaattctgattaagttgcttctttctctccggtgaaataataaccggcaggacttcatatccatccgcattaaagttaattcggttaaatccaccgaaagaagcagcgatttgatcctgccatccaccagcttcctgacagagattacgctccagataaatcgcttcatctgctagtcttttcttgtcagcatacttaccctttaaagcatagaaggcattcagcattccaactgcgaaagaacttgatgttcctaggccagaacgtgctggaaggtctgcttcatatgtaagacgaatctcgtgcatgtctagcattttcatagcattgcggattgcagggtgctgaatgtcatcaatgtttgtcactcgttccgtctttgaataggacaattccgttgaatagtcaaaaaaccttggtaaatggcgtacatttacatagcaatacttgtcaaatgtggtagataaaacagctccaccgttttccctaaaaaaactttccatatctgttccgccgccaaaaaaggacatgcggaatggtgtttttgtaataatcatatgcttcttctccttattttcaaagatattcaccattgcgtaatatctccagcttattctacccttctacagaataaacagcagcagagtttgataaggaagtaggaacatccaccatttatttatgaatatcccatcttcttaataacttttgctggactcccaactgctacgcaatagtccagcacatctttagtaaccactgaattggctccaatcgcgcaatgcttacctatctttacgttacctacaatcacagcgttaattccaatgtatgaaccatctccgatagacactttctgtcccttttgtacaattccttgatcaataatcggaatatctacattacggtactcatggtcgcaatctgttatatacacattgggcgaaaggagtactttttctccgatttccagagaattggcaatagatatccggcagcgttcaccaatttcggagccttttccaattcttaccgtacccccccccgaccagatttgggtataagggcgtaccgttacggaatcttcaaaagtaatatggtgttttccttttaaactgcaatgcttgccaatatacacacgctgtcccgcagttacaccaaagatttttgctcgaatcaatccaaggcattctttgattgtccctttaagtcccattcttatgatacctttctaataaatttattcggatacagaaagaactctaaccacttcgttttcttcataatccaagcagctataattggacctgcaaagctgatgccaagtcccagcatcacatgaatcacagcactttcgatgccaatcttcatcaggagtgatctcaatggtgcagcaaacaacgtgtgcatcaagaaaatcggcattgtgtactttgcaatgaattccatgcctctaccgaacttttcctcaaaacccgccgccatcatgataacagccacacaagccaataatcccattgcgaaagagaccacactaccgctgatttccgctgtatacaccaaaatactcagaattataaaaagcaatccacatatcattcctaatacttttttgccctttggctgtacgttaaacacacaaatgctcatgccgagtacaaaccagatttcgtttgacagaaatgtcgaaactgcgtaaatttcatacccaataccggttaaaatcaaaagttttgcaaacaaagaaattattattcctactgctgccgctcttgcgctgctaaaagtcggtgtgacaagaaaaataaaaaagagtgcatacaaataccagtacggtgaagtcgggtgaagaaataatgtatcactcaaacctccaatctgatcgttaacactgcttgaaaataacttttttagcacccatgtagcagttgtaaaagtggcatagggtacgccgagtgccaatgcctttttcgacacattcttgcaccaactactcacgctatttacattgctgtacttctgatataggtatccgctacaaataaagaacagcggtacatggaagtagtaaattgttgtgttaaaccactggtacaaatcattttcaggcagaatattcgccttcgtcatgctttggaagaaatgacccagcacaaccaatatacaggcaatgacttttacatcatcgacccatttttctcttgttcttaccgctgtcttttcacccattacttcgtctccatctgctgtgcgatatcggcatccacaatttcctcgccggtcttatgcttcagctgctccttagaagcttcactcagaccgttgttgatcacacagttcatgtcgcaggtgctgcacttatccagatcttccttggtaacttttccatcacggtagtcacggcaaatcttcagctcatacatgctgtacggatgtttggtgaacagagccttgaacttgtgaaccagaacccaggtagccggcttccagatgtacttgtgcatcgcaggacttacgctgccgatcatccagcagtcacggtcgcagcaacgaacctttgcacgaaccttctcagcctccgggctgttccacagctcatcccaggtctgattgttcaggttacccataacctctttgtccttggtgccgttgcaaggcataacatcgccatacggatcgatgaagaaggtatcgaagctcatgtcgcaaggcagcagacgcttctgaccgtagatgtagttgatcagaccgtgattaaagtatgcacggaaccactttttcgggctgttgctacggagcagttcattgaccagattctcgaagttctttgcaaccatcggacgatcgtggatgatattcttcgcctcaacgaagtagaagctgttatgcagagaagcagttgcaaactccatgcccatctcatcggaaatcttgtacagcggaaccaggtcaggagcattcttgtcctgaacagtcataccgaagccaacgtccttcatgcccatctcacgcagcttcttcagtgtgccgtaaccacgctggtagccgttctgcagaccacgaatctcgttgttggtctgctccagaccttcgatagagatacgaataccgatctgcggaaactctttgcacaggtcaacgatgcggtcagtaaagaagccgttggtagagataacgatacgatcagacttcttgtacagttcgcgcacgatatctttcaggtcagtgcggatgaacggctcaccgccagtgatatttgtgaaatacatcttcggcagtttcttgatggtttcaatgctgatttcctcttccggcttggaaggtgctttataacggttgcacatggagcaacgagcattgcagcggtaagtgacgatgaccgtaccatttaacttcttttcttcagacatgattaactctcctaactctctcttttaagaatgtttcgactttatttaagaaccacttggcacataccgaaaacacaatcgaaccacagatgactgcaacagctgtgaagatatatgccagcagatcattttcaaatagatgaacaaggtgtagcttctcaagcacacgataaattaccatgtggcacagataaatctcgaagctgataccaccgaggaacttggcgactggattgaccagtacccccccccgcttacatccgagggtatagaccagtgctgccacacagaagaacagcatcgtgagcgtagaactgcctaatgcaaaataagcagccgaggcaatcagcagaatcgctccggcgataaccttgtgcttcgatgcgaactcagccaactcttttcgatagaggaagatcaggccgcccgcgatgaaatagactgcactgtacagaatattcgaccgttcattaaaattcactgtcaccctatctgcaatgtggttttcatcaaagaaatatatactgcacacaaagttatagattgcagcacagacaaatgccgaccatgcacgcttcttattctcaagcaggaaacaaaagaatgggaacagcagataaaatacaaaaatgactgccagcgtccaactcacaccgataaccgatatattcatattcggcaaaagtccctggcagagtgtcaggtttgcaaagacctcatacaacgcacttttactaggtgatattacgaagtccaccacacagagcaatgcgaaatatggccagatcttgctgtaccttttggtgtagaactctcccacaccgattttctgttccttgaatttctggtagtagccgcagcacatgccaaaaccgctgaccatcataaaaaggaacacaaggttcgtaaaggatggtataagctggtcaaatacaaatccacttgcttcatattttccatttgccagaatgtgcatcagtgcaattcccaatatggcataggccttcaagccatctattccctcatatctctctttcatcccgcaagcatcccccacaatgtctttgcatatttttcctctgagcattcattctcaaggaaacgcttgaacttctctgcgctagaatcagcttcttctctatgcttcaagaagtactggattgtatttttccagtcttcaatatcccttccacacaaagcacctctgccatcggcgaaatactcctgtgtagttaccgtatccgacgtaattgccatcttcccattggcggctgcctggtaaaaagcaatcagtccagccggtgcctccgtatccaacggcgtaactaccaactgtgactgacacatgaactcaaggaattcctgttcaggaatatccgacttcaccaccatatttttgccgaagttatctttgtactcttcaaacctatccctcggcataacacagttgaatgtaatttctggcatagcctgtgcaattctaatcagaaactcccagtcgcgaccgttccgtccgccgcagaatacactattcggcactacttcgccttcatattcaatgctgtaaccaccatgataggtgtcatgtagcagcgtgtacctcctatggattccgagcatttcgttcaaatgctcaccgtacttcttagaagtcaccgtcgcctgaaccttttttgatttcagcatcggcttgtataaaaactttgccagcttgtttttcgcagttgctttatctttgagcagaatatttagcgcaataatctttctatttttgaactgtactttacacaaccaccagcacaaaactgccatgaagtcgtaccaacagatgatagtgtcaccctcccccgactgcttgatcatatccttgcaagctgccagcatttctttggtggaattacatttctgtggaggataaatctgccgaatcttggctgtttcatagccgttcagaaatgtcatattctgtttatccgctgggttatcaaacagcatataaaccatcggcctgccctcctctcttactggtacaccttcataattttctcgtaatactcatcaatggtatcgaagctaatgtccttacagttcgcactgtactccacacacagcttcttatcaccccagagcttttctatcttttctttcaaatctttcccgttaccgctctcaaacagctcgccggtcttgccaacttgaatcagttccgggataccaccgatgtctgctcccagcaccggcgtgccgtacatctgggattccatcacagagaacgggcagttctcataccactcagaagggtaaatggagaaccgtgcctcacggatcagcttctccagtgcctcgcctttctggaagccgacgtttttgatgttcttaataccatttactgtctcttccagcgggccagtaccggcgaaaatgaactgcacatccggcagttccttacagaccttgatgagtgtgccgatgcccttctcctcagagaagcggccaaagtagaggacgtaatcctttttctccgtttctttccactccaccttgtcgatgaagttgtgcattgccacggtcttggtcgcaaacagcggattgctgtccatcttgctcttcatgaactccgagcagcagatcatggtgtcaatgtacttgtaggtgcccttccacttccagaactcagcctccatcatgccgatggccgacttcgcagtggaaccg

SEQ ID NO: 876 - DNA, 7577 bp, unidentified
  source 1..7577: mol_type = unassigned DNA
atgcaaatggcagtaattgaactggaaaaaaacatttcatatatagagccgacgcaaaatccattgtcggcaaatgtcgtgctgattgaaggagaaaataatctgtggctgtacgatgtcggaaataatccgtgtgtgccacagattatatctgcttttaacacttcaaataagaagataaatgtgattttgtctcattttcatgcagaccatataggtaatcttgataaaatcagctattcaaatgtgtatcagggcagattgacttataaatatacgaaaacaggtgaaatactggaaaatgatttgtatttttgtgatggtaatatgaatcttcatatttttccactcccgtcaagtcatgccaaaggttctttggcattagaaataaatgaaaaatactgttttttgggggatggtgtttatgcaatgcaaaaaggtgaaaaaaggctttataatgcaggaattcttaaagaagaaattgaaattctaaaaaatataaaagcacaacattttatgcttagccacagaaatccttttgataattcaaaggattcggttataaggctgcttgatgggatatatgccaaaagaaaaagcggagagccgtatatttccggcattgacggggaatgagaggtattaagttagtcgtatcagaaagtatgcagagtatatttatgtaatctgcacactttacatttacacaaaataggtatactatataattaaaattccactatatacaggaggagaattatgaattattctattaatacaaaatgcgtacaggcaggttatacaccgggcaatggcgaaccaagacagattcctattatccagtcaacaacatttaagtatgatacaagcgaagatatgggaaagctttttgaccttgaggcatcaggatatttttatacaagattgcagaatccgaccaatgattatgtagcttcaaagattgcagcacttgagggtggtacagcggcaatgcttacttcatcaggtcaggcagccaatttttttgcgttgtttaatatatgcgaagcaggaagccatattgtttcttcatcatctatttatggtggaacatttaatcttattgaagtaactatgaaaaaaatgggcatagatgtgacatttgtagaccctgattgcacagatgaggaacttaatgctgcatttaaggataatacaagagctgtttttggagagtcaatagccaatccggcacttacagttcttgatatagagaaatttgcaaaagcagcacatgaacatggtgtaccgcttattgtagataatacattccctactccggttaatttaagacctatagaatggggagctgatattgttacacattctacaacaaaatatatggacggacatggtgcagctgtaggcggtgcgattgtagacagtggtaagtttgactggatggcacatgctgacaaatttccgggactttgtactcctgatgagtcatatcatggaattacatatgcagagaagtttggtaaagagggtgcgtttataactaagtgtacttcacagcttatgagggatttgggctgcattcagtcacctcagaatgcttttattttaaatctcggtctggagtcacttcatgtgcgtatgccaagacatgtggagaacggacaggctgttgcagaatttcttgagaagcaggataaggttgaatttgtcaattatccgggacttccatcgaataaatattatgaaatagcaaagaaatatatgccaaacggaggttgtggtgtagtttcctttgaattaaaaggtggaagagaagcagcagaaaagttcatgaagaatcttaaacttgcagcaattgagactcatgtagcagatgcgagaacatgctgcctcaatcctgcaacatcaacacacagacagatgaatgatgaacagcttgcagcggcgggaattccggctggacttatacgtatatcatgtggtcttgaagataagaatgatttgattgccgatatcaagcaggcacttgatgctatttaataaaaatttaataaacatcttcaaataagcttgaagagcatgttaattaagtaatatttcaaaaggagaagctcacgggcttctcctttttgaactcaggttattcattatattaaaatcttgcaagcatacggcttaggattttatcgcatataaatgtataagcagaactaaagatatttgcacttattcttaaaataacagcgtattgggcaccgaaaagccctgctgcaatagatagtgcaccaaatgtattaaaagctgtctgccatgcatatcctgctgaatatccaacgccgataccaccgattattcctatataagggtacattgatgaaggcaggatatagtaaaggacaaggaaaagaaggcatccgactatattaaaaagtcctcttttcacagctcttggctttatgtcatttgaaaatggaaggcagactgacatacatgcgatacctgcccacatggcacgagggaggttgagcagtgacattgcaagtattgaacttgatacaataaaagttagtttaatataccattttgtgcgtgatgaagtaatattaaattctgaaaataaatttttaaaagtacgatggtaaggtctgtttttctgatttttgtaaaaaacaatcatgcatataagcatgcctgctgacaaacctgcaattcgcataagataatcgtgtccgcttacatcatatcccagaagcaggagataactgagaacaaatgttgaatggttatacataatgacattatggcagctgaaaatcataatgagcattatacataagaaattaataaaaaatgccggtatggcaggcaccatatttgcaagacgaggaccggcagctaatattacaaatatacctgcaattgaaataagtccgtgatttgtctgaataccaaaatcagcctgtctgagtacaagtacagaaagcagaacgcatacaccaacgacgctgttactgtttcctgtcaacatactgaaaatagttacaattgcaacgcagaatatcattacaagataaaccttgaaattatatattaaaatatgtctgaatttttcttttttgtcatgtgtatttttgattaactgcttagaacctgcagaactaagctgtaattcctgataaaatgtcatagaaatctccttgtgatgatgtaaaaataatccccacaatagatagggttgaataatataacattaatgacggattatgtcaaataattttaattttacatgtaaaattttagatgcaaatttaaataataagtaccaatgcaaaaataaaagttatataataaaattatagggaagaaggggaatgacagctgcctgacaaaaaagggagagagtatcaggacagctatcggagtttatgaaaaggttttatctaatgtctttcgacattgtctatattacagataaaatgtgattaataattgttgattttatgaaaaaattgtgaaaaacatgaagtgtctcgaagaaaacaaaaaacaggatacagaaaggcggttaatatgaaagttggaattataggaatgggaaatatgggtgcaaaatatgccctgatgatagcaaaaggtgatgtcaaaggcatggaacttgctgcgataacaagagttactgatgaaagatgggatatgattagacaatatgtttcacctgaacttatgaagtttaattcgggtgacgatatgtatgccgccatagatgacaacagtttgtcagtggatgcagtaataatagtaacaccacattattcacatgaagaacttgttaagaaagcgtttgaacgtggaataagtgtactttgtgataaacctgcaggagtttattcaagacaggcaagaagtatgtgggaggcatatcagagtgcaaaaaaaagctgtccgaaacttcaatacggattcattttccatcagagaacatttcctgtttatagaaaaataaaagaaataatcgataataaaacgtatggtaatattaaaagggtaaactgggttattacagactggtacagacctgatgcatattatgaatctggtaaatggagagcaacgtggaaatatgacggaggaggaactctgcttaaccagtgtcctcataatcttgatttattgtcatggatatgtggaaatccttcagatgttgccggattttgcagcgaaggcaagtatcatccgatagaggtagaagatgatgtcacggcatatatggaatgggagaatggtgcaagcggagtgttcattgcatcaacaggcgaggcatccggtgtcaacaggctggagataagtcttgataatgctcttcttgtatgtgacaaaggccagcttcgtgtatgtgaacttgacaagccggaaatagaatacagaagaggaaatggtgatttatttgctaagccaaagtatgagtggaaagatataaagacagagccaaatgatggtgcatatgaaaaactactgacagaatatgcagcgggaaggtgtgttgcaaatggagacgaagctattaacagtctttatttatccaatgcgatatacctttcatcatggaaaaacagaaaagttgcattgcctgtaagtggcagcagatatgaacttatgtttgaaaaacagtttgaaaaagaacttgaaaaaaagattaataaagctataagacgtaagtgatagaatagcagaagccgcggttttatataactgcagcttctaaagatttttcgagatttttcaattcttttaattctcttattgtaaaatatccacatacaatggcggcggctgcatcggcgataggacctgcatacattacgccatcaattcccataaaaatagggaaaataattataagcggaagcaggaacaatatctgtcttgtaagtgacataaatacaccaagtcttgatttacctatagaattaaagaaatttgatgttacaggctgtattccgttgatgattgtcaaaaacatatatattctgaaatacctttcagaaaacttaaaatataattcacttccgttaccgaatatactgataatctggcgtggaaatacctgaaaacatacaaatgcaataagcgataaaccggaagctgcagcaagtgccagcagatatgttttacgtacacgtttatatttttttgctccgtaattaaagccgataacaggctgtgttccctgagatattccgattacaaatgacataaatatcatatttacttttgtgataattccggcacatgcgagaggaatatcaccgccatatacagacattgcaccataatgtgcaagtgtgttattcattacaatctgaacgactgtcattgcaatctggttgaaacatgcacttgctccgaggataaaaatatttttccaatgatgcaatgaaactgtaaagctgcttttgcttaattttatatttttaaaatgaaacatatagcgtaaacttatgcaaaatgaaattatctgtccaataatagttgcaagtgcggcacctgtcattcccatcttaaatacaaatatgaagacaggatcaagaattgtatttacaattgcaccgataagcattgatgtcattgaatagtttggactaccatccgcgagaatcagcttgctcattcctgtattggctatcagaaatggaaagcctatagcagtaatacgcgtatatgcctttgcatatggaagtacatcaggtgttgcaccgaaaaatttaagcattggcgtaaggaatatggtggttataagaaataaaaatattcccattatagccataagaattattccattgccggcatatttttctgattctttcttttcacctgcaccaagatgcagtgagtaattggttgcacaaccaattccgagcaggagtgatatagccgtgcatgttgttgatagtggaaatgcaatatttgttgctgcatttccaagcataccgataccctgaccgataaaaatctgatcgacgatgttgtataacgcagtaacaagcattgatataatacatggaattgcaaatcctacaagaagttttccctcgtttttgtacccgagtggattttcattttcattattgatgctcattgtgtgttatcctttctgataaaataatcaattattcttcaaatgaaacaatctgtgttgcattattataacccagctgctgcatttttttctggagattattaagagctttatcatattttaagaaagcatcatatgtatcgttaaaatatgagagagcttttttgtcgtccccatcttcttttgcctgccatgatagagtggcaaagtgatgaagaacttcatgtgttttgacaagctgaccaaattccggactttcagtaagacggctgtcagtctggctgttcagccattttccaagcttgcatcccaaagggttatcaacctgttttttctttaagtgttcaaatccgacaatattgttgtatacacgccatgtaagaacatagtgatctacttcaaatacacgcatccagtcctgctgtgtgatattagaacatccacgaaccaggtcacttctggtcttgtcaagataacgtcctaatttaaatacacgttgtcctgattgtatacattcatcagataaaatgttataactttgagaaatattttcaatttgttttgctaatgattttgttacaccggtctgcgtgtcaatgtcgttaaatatactgtcaacgcttacgcttatgttgtccatctggccattcatctgctgtatggcggcaagcgactgctcaactttcttatttccttctccaagtgtgagagttgtctcatccattgcagaggcaagtgagtcaatgctttctcttaattcagcaacatattttacaatatcttcggctgattgtgaagtgtttgaagataaaattcttacctgttcggcaacgacagaaaagccttttccggcttcacctgctcttgcagcttcaatagaagcatttaaagcaagaagattactctggcttgcgacattttggacaatgtcaacaatttcttctattttattgatttttcctttgaaatcctggacattctgattgatagtattgattttttcagatgatttattgacagctttaatactgtcattcatgtctgtagttatattttgtgaaactgatagaattttgtgagtgtttgtgcggatatctcccattgcatcagaaatgttttcaatagaactttcgagatgctggctggaattttccatgtgctgtattgattttgtctgtgattcgacctgttccagagtattctttataagagtgttgtcaccgataacacccattgtttcattgagacgcattacaacagggttatttacttctgtaaaaacatgcagcattttattgagtttttcaccatattcggggttgttaaagtcaacaggattaacaccgctgaagttacctgcaataattttatcaatagtatcaagtatctgtaccgcatcatggtcagacaaaatctcatccttttttttccttttaaacat

SEQ ID NO: 877 - DNA, 5780 bp, unidentified
  source 1..5780: mol_type = unassigned DNA
acagcggtgccacctacatggacggcaccaccgacatcacccgcacctacccgcttggcccgctgaccgaggacgaaaagcgcttctacacatggactctgcagagccacatcgaccttgccaaggccgtctggctggattactgcgagtgtaagatgatcgacaccattgcccgggaaccgctgtggcggcaccttatcaactaccgctgcggcaccggtcacagcgtcagctttgtgggcaacgtgcacgaaggcccccacagcctgcgcggcaccaactccgtgcttatgcgcccgggtatggtgatcaccgacgagccgggcgtttacgagaccgacctcgtgggcatccgcatcgagaacgagctggtgtgcgtgcacaaggccgataaccagtacggtaccttccttggttttgaaccgctgatgttcgtgcccattgccacctctcccatcctgcccggtgtgctggataaggacgagatcgcatggctgaacgattaccaccgtcaggtgtttgcaaagctggcaccgcacctgaacgacgaagagcgcagctggctggcggagaagtgtgccgccatcggctgctgagaaagcgcaaaaaacacccggagccgtgcaggagccagagcggctctcggcggcagccgggtgctttttatagggtcacagcttgcagcagtgcgtctgtggggtgtccagcggcggaagagtgaactcgttttcgccaaagggcgaacgcaggatggccgcccgggtctccgggtagatgcccagttcggtatagatgctcttgtacaggcccatcacccgccgccgcagcgaaaggatgtcggcggtggtcactctggagtgggagacgctctggctgttctgcaggtagtaatagccgatgtccgggatggaaacggcggtgcgcacatagcgcagatattcggtgttaaacagctgatcctccgcaaacaattctttgcggaaatggaggctgtgcttccgcaggaggtcacggcggtagagcttgttgcaggggctgccatagtagaaggtgtttggcttctggatcagatgctttgcgtactcctgtccggtgtacaccccggcaggcagatagccataggcccgggtgcggggcggattgcgccggagcacatgctgcagtgccttttcccatgggcggatgtgctccacatagttttccgggtacaccatccagaagggcgcgatcacaagatcggcggtgtgggcctcggcggcggagaccagcttttccgtaaaatcgggggccagccagtcgtcgctgtccacaaactggatgtatttgccgtgggccagcgcaatgccctgattgcgggtatccgctgcgccggtgttggttttatccaccagtgcaatgcggtggtcgttggcggcaagggcgcggcagacggcaagggtgtcgtcggtggagccatcgttcagcagcaggatctcaatgcttttataagtctgggtgcagatgcttttgacacagcgggcaatgcacccggcagtgttgtacatgggcacgatgatgcttacaaggggaaattccataggttctccttttctcagatgcggctgtgggtgcgggcaaatgcgtcggaaagcttctgcaccgggccgttgggcagagggctttcaaacaggctcagatagatgccgtgcagccgcaggcggaatttatcgtacacgcccagctggatgcacagttccttgtaggtgtggtacatccgactgcggtggcgcagcatgtccgccgcgctcacctgcgtatggcatacgctctgcgggttctggatgtagcagtaggcggcttcgtcgatggcggcaaaccgctgtgccacctgcagataccgggtgttgaacagctggtcctcggcgtataccacatgctcgaaccggatgtgcgccatctggatgagatcccggcggtagagcttgttccagagcacgccgtagtaaaaggcagcggcattgccggtgagctgccacaggtaatccaccttgttgtacaccccggcgggcagcaggctgtactcccgggtgtcatagccgccatccttgcggggcaccatcatccggtagggagccagcacaaggtcggcatggctgcgctgcatagcagccaccaggtttgcggtgcagcccggcagcaggtgatcgtcgctgtccgcaaactggatgtattcgccgtgggcaagggcaaggccgcagctgcgggtgtctgctgcgccggtgttgggcttgtccaccacacggatgcggctgtcggcggcagcaagcttccggcagacagcaagggtgtcatcggtggagccgtcgttcagcagaaggatctcaagctccgggtagctctgggatgtgatgctctccacacagcgggagatgaagcccgccgcgttataggcgggcacaataacgctgacaagcggctgcggcatggcgggtccctccgttttttcttttttcgatgcagcaaagttttatttatcatactccagccctgcgcaaaaatcaaggcgggcggctggcggaaaggagaatgtgagatggtatttcacattgcggtatgcagcccggacgcggccttgcgcagcgggctggaacgccagtgcatggaatattttgcccggcggcaggatgcgtgcatcgtgcagcagctgccggatgcagatgcgctgctgcgccgggacaccgagggagaacggtttgacctgtatctcatcgagctgggcgctgtagcggccccggcagggctttcggcggctgcggagctgcgccgccggggccgcagggctccgctggcctttgcggcccgcacaccggcccacgcctacagcgctttccgggtggatgccatgcagtatctgcttctgccggtgcaccagcaggagctttcggccctgcttgcccgcgccaccgagccggagtacggcccggcaatgaccgttgtcaccgccgaaggcctgcgggcgctggcctatgcgcagatcgaatatctggagtgcacccaccatgtggtgcacttccatctgctcagcggcgaggatgtggtgtccctttcgctgcgggtgtcctttgccgaggtagcaaagccgctgctggaagacgggcgttttttgcagccgcaccgctcctatgtggtcaatctggcggcggcacagctgctgacggcgggcgagctgcagatgtgcagcggtgcgcgcatccccatcccgcgcggacgggagggtgcagtgcgcgaagccttccgcagctggatcgaccggtaaaagggtaaacaaaaaagagccgctttcacggctcttttttcgtgcccggagatcaggcatcgggttcggttttgtgtttcttttccttgtcggaagcatccagaacaccaaagccccagcggttggccatgtccatgatgatcttctggggagaaccggagggataggcgttctcggagaacgcggtcaggaatttatacagctgcggctgcacctgatcgtacaggcccagctttgtgtacagctccttgtaatagcggaacacctgcagtttgttctgcacgatggaagccagattgatctgggtgtggcagatgctctgggggttctgcacatagtggtagcccgctttggaaatggatacgaaaacattggcgtacaaaatgtattccaggttgaaaaccaggtcttcggcccagcgcacctcgctggtgaactgaagatgatggtctgccagaatatcccggcggtagagcttgttccacagcacgctgtagaagaaggatgcgggcttctccatcaggcgcagggcaaaggtatcgcggtcgtagatgccctcgggcaggaagccgtattcacggatatcatcaggctttttctcggcatcgatgccaaggttctcctgcaggttttccagtgcctgcgtggccttggaagagttggcgggaatcaccatccagtaaggtgcaatgaccagatcggcgttgttcgcttcggcagcagtcaccagccgctcggtaaaatcagggtcgagataatcgtcgctgtccacaaactgcacatacttgccccttgcaagggacatgccgcagttgcgggtctccgacacaccggaattggatttgtccaccagaacgatgcgggggtccttttcacggaattgctcacagatggaaaagctttcgtcccgggacccgtcgttgaccagaatgacctcgatatccttccatgtctgggcacaaatgctctccagacagcgggcaacactattctgcacgttgtacacaggcacgataatgctgacgagtgggttgttcatgacggaaggtctcctctttacggatattatacctttatattgaaaatcacagagtgtattctcacaaatgaggacacttcccccttggggcagtcctatttataatatcatactcttcttgcgcacaaaatgcaagagcaaagaaggatcagataaagaaaagaaccgcacgctgcggcccttttttcttacacacgtgtccagtccagcgcatcccaccggggcacgaactggctgcagatgcggcgcatctccggctcgtcggcggcagaggtgcggtctgcgatgccaatgacgtaatacccggccttgtgggcggtggcggcggcgtatacggcatcctcgcacacggcgcaggcggcggggtctgcaccgcccagacggctcatgcactcaaagaacacctccggacggcttttgtgcagcacgccctgcgcttccacgatgaaggagaaatactgcgcgatgcccagccgggtaagcacggtgcggcactgttcggcccaggtgttggagcagatgcacatgcgtgcgccctcggcctgcagctttgccagcatcgtgcgcacgccgggtttcagctccacggtctcgtacaattcggcgatcacctcgcgcatcacggaaaaatagctttcctcggtcagcggcaggccgtactcccggatcagatactgtgcgccctcctgcattcccatgttcagcagtgtggcgcgcagatccccccgcggggtgcggccatagcggcgcagcagtgcgtcgggggcaccctcccacaccacggtcatgctgtcggtcagggtgccgtccatatcaaaaatccattgcttgcagtgcatgagaatgcctccttttgagatcctgacaagtataccatgtttctttgccgggagaaaggcatcaatttacaaaaaacggaagaaatttctctggaaatatgctataatctgaacaaaaccggaaacgatcaaaggaggcggatgcaatggatgaacgcagtgctccgtgcaaagctctggtgctggcgggcggcggagccaggggcagctatcaggtgggtgtgtggcgcgcgctgatggagctggactggcacccgcagatcattaccggcaccagcgttggcagcctgaacggtgccatgttcgtgctggaccagtacgagacggcccgcgatatgtggctggccatccgcagcaaggatgtgatggagctgccggaggaggatgccgacctttcggccctgcaccagttcctgcgcagcgtggtgaaagccggcggcatggatgtgaccccgctggaagagatcgtggagcgggtgctggacgaggatgccctgcgcgcggcgcccatccgcttcggccttgtcacggtggagcagcggggcttaaagccccgggagctgacgctggacgagatcccggcaggaaaggtcaaggactacctgat

SEQ ID NO: 878 - DNA, 17744 bp, unidentified
  source 1..17744: mol_type = unassigned DNA
atgaaagaaaataagataaaaaaagcaaacacatccccggaagggcaggctggttctgagaacatgagcacagcagatgtagatgcagtaatgaagaaatacgaccgcgaatccaatattcgtgtgtggaccggcaaatataagctggctgtacgcggcctgctggttgccttttctctgtggtgtatctatgttaccttatttgcaaccttcctggaggaaatccgactgacttcttttctggggctgatcattcttatcggatttcttacctatccggcgaaaaaaggagacatcagagaaaactacatgccgattggcgatattatttttatgatcgcaggcacaggtgcttttctgtattttactttttctgcaaatcagatcatcaatcagggtaccagatttgccccttatcagattgtgatcggtattatcggtattgctgcactgatcgagcttaccagacgatgcgtgggcctgccgatcctgtttgtggcaggttttttcctgatctatgcactggctgtagggcttaccaatccggcattttggggaagagtgaaattcctggtgcggaatcttttctacacaaaagagggtattttctccacacctgtaaatgtatgctctaaatatattgtggtatttattattttcggtgcgtttctggagagaacaggaatctccaacttctttattcagctggctaactgcattgcaggaaaatatgcaggtggaccggcaaaggtagcggttatcagttctgcactctgtggaatggtatccggttcctctgtaggtaacacagtaacaaccggttctgttacaatcccgatgatgaaggacacaggctacaaaccggaatttgccggagcagtagaagctgcttcttccacaggtggacagatcatgcctccgatcatgggagctgccgcattccttatggcagattttgtgggtgtaccgtactccaacattattgtcagggcgattctgcctgcattgttgtactttacaggaatctttatttctgtacatctggaagcaaagaaattaggactttccggaattccgaaggaaaaacttccggtatttaagcttctgatccgtaaaatctatctgttattacctctggtcatgctggtaatctgggtgtccggaaactatatgaccatgcagaaggctgccagctatgcaatcgttctttctgttatcgtaagtctttttgacaaagaaaacagaatcagtgttaccaaatgtattgatgcgctggaagcaggaggaagaggtgttatctccgtagcagtagcctgcggtgttgcaggaatcatttccggttccatcaccatgacaggacttgccaatgacctgatcaacggaatcatcagtgttgcaaacggaaaactgatcattgcactgcttctgactatgctgtgctgtatcgtacttggtatgggtgtacctaccactgccaattactgtatcatggcagcaacctgtgctccgatcctggtacgtatgggagtacctacactggcagctcatttctttgtattttactttggtattgttgcagatatcacaccgccggtagcgctggctgcctacgcaggttcagccatagcgaaggccaatccgatgaagactgcatttacagcctccaagctggctatcgcagtatttatcgtaccttatgtattctgcttcaatccggcaatgctgctgatcgataccacaccgcttaaggttgttcagatctttatcacctcactgattggtgtgtttggattgtcctcctcactggaaggcttcctgtcagtgaaaatgtctgtaccggttcgtgtcttaatggcagcaggcggactgatgctgatcgatccgtcactgatgactgatgttgtgggaatacttctgatcgtgggatgctgcgtatggcagacagcgcagaagaagaaaactgcatagagaagaataaaaaaaccggcaaaacacctgtcatttgggtgtcctgccggatttttttatttagaaatccagttctttcagataccgtccaagtgcatcctgccaggtggggagtggtgtgaaaccattggctgtcagtttgctcttatccaggcggctgttaaacggtctggctgctttggaagcgccatactctgcagttgtgacggagttgactgtcatgttttccgggagatattccgggtgtcccatggcagcggcctgacggaagatttcttttgtgaaatcataccagctgatatatccgccctcattggttgcatgataataaccgtatttttcagtttcgatcatatctaccagaagtcttgccaggtcataggtataagtaggtgtaccgatctggtcattgactacggagagagtatcatgagtttttccgaggttgatcatggttttgataaagttcttgccgtttttgccgaatacccatgcaatacggacgataaagaacttatcaactgtgccggatacggcaagttcaccgtccagctttgtctgtccatagacatttaatggtttatagtccttgcagtcaggctcccatggagtggttccctgaccatcgaatacataatcagtggacagatacagcatcttgatgtcaagctctttgcacacatcagcaatattctgagttccggttacatttaccagacggaccttcggctggttatcttcatcttcggcagcatctacagctgtccatgcagcacagtggatcacagcatcaacatttgcttctttaatgactttttctacagaagctttgtcagtgatatccatctgaacataaggcattgtggtaactgcagtgccatcagcgattccgctgtaggaaggagcaatgtcgcttcccacaccttcatagccgcgtttcgcaagttcgttcataacatcatgtccaagctgaccgcctacacctgttacaaaaattctcataaattatgcctccccgcggtttgcgtacattttttcatagtagttctggtattcaccggagatgatagtttcccaccattccttgttatccagataccatttgattgttttcttgataccgtctgcgaattttgtttccggtaaccagccaagttcgttgtgaatcttagtcgggtcgattgcataacgcatgtcatgacctttacggtctgctacgtaggtgatcaggctttctggtttgccaagttctttgcagatgatcttaacgatatcaatgtttgtcatttcattgtgtccgccgacgttgtaaacttctccaacacgtcctttgtggatgatcaggtcgattgcgcggcaatgatcttctacatagagccagtcacgaacgttttcgcctgttccgtataccggaagtggtttgtcatttaatgcattggcgatcattaacggaatcagtttttccgggaagtgatatggtccgtagttattggagcagcggctgatggttacaggcagtccgtaggttctgtggtaagccagcaccagaaggtctgcagaagccttggaagagctgtaagggctgcttgtgtggatcggagtttcctctgtgaagaacaggtcaggtctgtctaatggaagatctccgtaaacttcatcagtagatacctgatgataacgtttgataccgtatttgcggcatgcatccatgagaacagcagtaccgataatatttgtggtaaggaaaacttccgggttttcgatggaacggtcaacgtgactctctgcagcgaagtttacaaccatatcagggtgttcttcctcaaaaagtttgtaaactgcttcgcggtcggtgatgctttcttttacgaaacggaaatttgggttgtccatgacaggtgcaagagtggaaaggtttcctgcataggtcagacagtccagacagatgatgcggtaatccgggtatttttttaacatgtgaaaaataaagttgcttccgataaatccggcaccgccggttacgataatgttcatagtgattctccttaaaaaatatataatatgaatatctgtaagattctgttatagagtcaggcagataaaattatccgccttgctgcatggcgggtgatatatcaaataactgtttgaaaatttgatatatcactcacttgactgcgaattcggttgtacaggtctaaaagcttcggttagtgcaatacatccagatatttaccgtccagaacgtcttttaagtactgaccatactgatttttcttcagtatttcataaaccttcagcacatcttcctttgtaatccagccattgagatatgcaatctcttccaggcaaccgattttgcggtgctggtggctttccattgtttttacaaagttggtggcttccacaaggctctcgtgtgtacctgtatccagccatgtgaatccctgtccgagaagctctacgtttaattcgcccttttccagatagatgcggttcagatctgtgatctcaagttcgcctctggcacttggtttcagattttttgcatactctacgacgcgattgtcatagaagtataaacctgtgacacagtagttgctcttcgggtgctccggtttctcttcaattgagatagccttgccttcatggtcaaattctacaataccgaatctctccggatcatctacatagtatccgaaaacagttgcaccctcgccggattctgcgttctttacagcagctttcagtcttttcttcagtccatgtcctgcgaagatattatcgccgagaaccatggcaacagtatcatcaccgataaattcttcgccgatgataaatgcctgagcaagtccgtccggacttggctgtactgcataggtgagatggacaccgaactgatgtccgtcaccaagaagttcctcaaaacgaggagtatcctgcggagtagagatgatcaggatatctcggattcctgcgttcatcagtacagacatgggatagtagatcattggtttatcatagattggcagaagctgtttggatgttaccattgtaagcggataaaggcgtgtgccggaaccgcctgctaaaataatacctttcatgtgtattctcctttgttattggcagtatgcggtcggagcgatattctgtcagttatctgtgtaaatgataagcaaaatatcaggcgactgcggtactaatcaacgggtttctgattgtcagtctgagttacgatatcatcctgactctggtgattgtattataaaaggtgaccttaggtcaccttcaagcactttttacaaaaaagttaaattttggttatttttcacaaagaaaaatgccggcatccttggtaataaagaacccatcctttgtctttcgcgatacaaatccccggaaatctttgtatttgtccagaagatactgattctgatttccatggcaggagaggatataggaaatcagcggttctgcatcggggacaagaagagagtccttatagctttcccagaaaatacgggaaaaatacggtgccaggatatctgctccgttttctctgccaaaacgctcatagagtttgtctgcggagagaacgatccggtcgtcaaaatcccggaccagtctgctgacttcctgcatgtgtttttttccataggtactgcagatcagttttccgcccggagtgagcacacgttgaatttcgctgcatacagcagagatatcttcacagtaaaaaagcacatggtttgcaatgaccagatcaaagcttctgtcttcatgaggaattcttgcacagtcaaatgcctcgaaggaaaaacggctgtctttgcgtccgatagcacgtctggcatcacgaagcattccggatgaaagatcagaaagagtaacggaaactttaccggggaggctggaaatattctgtgtccacagaacaccgtcgccgcatccaagttcaaggatacgcatccccggatgaatctgacactgctcataaacccatggaaaccatccctgtttattctgggaataaaggctgtgcagattaatgcgtgaggaaatgttggaggcgttctggtattgatttttcatgcttttctccatgcctgtcaggtggatcaggtcaagcatctgattccagtctatggaatgatgggagcggatcgcatctgtggtatcctggattgccttttccaccagctgcatttgttcgatacggtcacgtaccagctttagctggatgttcagggaattttccataaaatgatagtctgagtcgtcaatggtcatttcccgtatgtcatccagggagaaacccagatatttcagaagcaggatctgggaaagtcttgcaaaatcctcatctgtataaaaacgtgcgccggattctgttacataggagggtttgaggatattctgtttgtcataatagcggatagtgcggagtgttacatgtgccatccgtgcaaattctccggaagagtagtagccgtcttttttcattgtaaaaccttctttaagaaaaatagtcttgcccgcaaatgcggatagaaacagttgttcagcctgcatttgcgtattgctgatatgtgtagagtataacatagctgaccggcaggctacaagcatcaggtattaccggatggataatactatactggctgaatggtaagtcagatggtgatttttgacattttttggaggatgctaatccttgtcttttgacagaaattatggtatgttaaataataacaatcaaaactgattttcatacaaatcataatctggcagttctgccatattttttccaaaatacaataaatattaagagagaacagtaatgacaatatgaaaggtgcagggacaggaggagcctgatgattaatttatttgattttacttactgcggagactataatcggcagattcagaacctggcaaggatggtgccggagaagtggagcttttcggatacagatgataacggaattctgaaaggatacctggaacatacatttaaacgcctttatgaagaacagaaggtgtgggagaaaaagaattatgccatatttaatacaggactctttaattactattatcagccgatttatgcgtattttattcccaatctggtcccggacaggcagccctggtttctggatggcttttatacagaatactatttgttaaaagaaggaatcacctgtctgccggaaaaggcatgctatgtggaaaatccgtcagatcttgtgtttgatacaaaacttccggtaattccacagtacgagcatattttcggggatgaggaaaatgctgcccgtcttccaaaggaagtacgtgacagcagcatgaaaatgcagctgtttgacggcgcgctgaaacagacaaaaagaatgcttgaggcagattacagaacggcaattccacagtattataatcactcaattcaactgctgctcccaatctgtctccgccatccgggaaaacccgaccttgcactggcgtgtatgaaaacttcggacggaagcaaatatctggggcgtacctgcctgactctcagaatggcctatcataatgccagactccttgcaagggtggaccgaagctggctgatgacttctgtatctgcctgaggtttgacatgtgtggttcgctttgatatattatagcagcgaagcagatgattttatctgtctgactgaaatgatgtcaggttagatatttttacggattgttctgctgctatagatgaaacaacagaaaaaggtgggtgagaaatcaaatgcgaaataaaagtctggatgctgtaaaggccattgctgcgtgcctggtggtatgcatccatgtaagctttccgggacaggccgggcagcttgtaaaagtactggcaagatgtgcggtgccgtttttctttatggtatccgggtatttctgttattatcaaaattgcaatgcctcaaaaagaatattgtctaaaatcctgcatatcatgaagctttttgcagtttcagttgtgttttattttatctgggaatgttttatgaaagcctggaatggggagagagtatggacatggataaaagggcttgtgagtacagagcatctgaaggaatttttcgtgtacaacagtacttctccggtaagagcacatttatggtttcttcctgcattaatttactgttatctgcttgctctcctgcttgaaaaatggagaatgcgtaaggctgcatattgtatggcacctgtattgctggcaatacttttatggagagcggagttttgtgtcttttttgacatattttatcacactatggaatacagaaactttctgtttacaggaatgagctttttccttacaggtcagatgatccgtgaatatcaggataagatagtatgcaaacgtcaggagcaatggggattgaaagcagggatgattttcggtgtggcactcagcatgatggaatatgctttccgaggggcaggagaaatttacacaggaaattgtgttgcagtgatctgtctgtttctgtggcttattttatatggaagggaaataaattttccctctgtactggtggaaaccggaagaaaatatgctttcctgatctatcttcttcatccagcgatgtcagaccttctgaaaaaatgtgcagaaggtctgggagtcagcaactgtcagatttatttttggctgcgtccggttttagtatatatgctgacagtggtgacagtttccggcatatctgcggcctctgcatatgcaaagcaaaatattttgcagaatgatcatgtatagtcaggggatgaaaatcaggaatgaattttggctgcattactgagaatagaatgaatggtaatataataatgtagtaattctattttcggaaactgcgggaattataactgttcacataatggaaaatgtgatatagtaatcagtaaatcttatgaatgcaaccgtcaggtgtttcgcagaatggcggattgctgaacagttaccgaagaccattatgcagaaaatacaaaggagagagaatggcagataaaaatcaggacaagaaccagagtaagaacagagcagaacaggcagaagagcacgatgaaagcgtgctgaatccggagattaagaatgaatcggatttgtcaaagaaagaaagacgtctgattgagaaagaaaaattaaagggaatgggaccaaagaaaaagctggaatatatctggatgtattataaaccggctattttcggagtgatcgcagtgattgctcttatattcggaataaaggattactatgaacagtccaaaataaaaacagttctgtccatgacagtggtaaattcaatggcaaatgatacggaaactcctgagcagaaaatcaaagaaacacttgggtacaaagatgatccctatagtaaagtagagataggcgtgaatcttactacggactctgaaatggcagaatttgattataatgcacagatagcttatatggcacagatccaggcaggttccattgatattatggttatgccggagaagctttatcagactttgaagaagaatgagccatttgcagatttgaaggaattgatgggtgaggaagcttttgagaagtctggaatgcagacagatactacgcacatttccattactgacagtgagcttgaacaggaattaggtgtaatctacgatcctgtatgcattgcagtgccgtattcagcaccgaatcaggaaaacgcagtaaaatggataaaaagtcttgacagcaggagataaattatgatatgttaatcacaccaaaactggtgtggatttttcagtcttgtgacaaacatgaactcttttcgccgcacgattatcatacagcaatgtagagataattgtgtggcgttttttgttgcaatgaaacagagaaaggaaaaaagaatgaacaatacttttatgaagaaaaaaccgattctgccgcttctggcatctatggcaatgcctatggtactgtctatgctggtgaattcactgtacaacattgtagacagcttttttgtggcaaagatcagtgagcaggcgatgacagctctgtctctggtatttcctgtacagaactttattaatgcagttgccattggtttcggtgtgggaatcaatgcacagatttcttttcagctgggagcaaaaaatattaaaaatgcgaatatagcagctacccatggtatgctctttaatattatccatggaattatttttacagtaatctgtattccgtttatgcctgtatttctcagtatgtttacaaaagagcaggaagtgatctcatctggtgtgcagtattcaaccattgcatttgcattttccacagtgatcatgatcagcctgtccttcgaaaagatttttcaggctgtgggcagaatgaaactgacaatgatcagtctgatgatcggttgtatttccaatattatcctggatccgctgctgattttcggagtggggatttttccggaaatggggatcagaggtgcagcactggcaactggtcttggccaggtatttacagttattgtatatctgatcgcatataagaagtgtagtattccggtggagatcagcaggaaatatctggaacttaacaggaacctggacgggaagctgtatatggtagggattcccgcaatcctgaatattgccctgccgtcagttctgatctctttcctgaatcagatattatcggctttttccggaagctatgtagtggttctgggaatctattataagcttcagacttttttgtatctgcctgcaagcggcattgtccagggaatgcgcccgttgataggatataattacggagcaggagaaataaagagggtaaagaaactttttgggatttctgtgcttctgaatggtatgatcatgctggtaggaacgatcatctgctttacagcatcagagacattgatgggaatgtttactgagaacccggaaactgtaagacttggcactgcagcattacagattatcagtatcgggtttatcccatctgccatctctgttacagcttccggtgcattagaaggactgagcaaaggtgctcagtccctggtgatttcgttattaagatatattatagtgatcattccggcagcttatctgctgtgctattttgccggggcagatgctgtgtggaatgcgttctggatctgtgaatttataacagcagtagtagtaggtatcgggataaagtattactggaaccgtctgctgcagtagacgatagtgataaagctgctaagtcaggctgcgcctgcttcagcagactcagcatcagactctgcttctgaggcattttcatcagtaacatcttcggcatcggaattgcttccgccgctgagaacataagtgatgacttcgtccggaacgcctgcattggacagattatccataagtgtagtgaggtcgagtgtagctgcgtaggcactcatatcatcttcattggttacgtcataaacatctccaagagccgtaaggtccggaatttcaacagattcgcctgcaccggaagtaacagtgaagcttccgagagtgcttcctgcactttcaacggacagtgcaacagaaccagaatcttttgctgaatttaaatctaatacaagtgcaaagttctcgagcatggaaagagaagaatctgtatcttctgaagaatcagcagggaaggtgatagtatagttaccgtttaagtaaccttcttttgcagattcggtgtcgtagtcctttacttcgataacagctgcggctgtatcatcctgagaaattttataggttccgtttaatttaccgccatcaatctgaccggatccggacagggagagtgtgccggaatcatctgtttcaatggagagaagatagccaaagtctgagccgtccctggtcatctgccagttcagaacaggagttattttatcaccttcctgaaactcaattttacgtcctgcaattctgccggtttcatcaacccagattctggtgttgagatgagaatcatcggaatcaccggtatctgcatctttcagaaaatcaagaccgtcttctacagctttggtaaagctttcatgcaggtcctcattacttgagagtttctctgtccaggtatcgaggatgttctcaatatcactgtctgattttgcttcttccaggattgcagttgcagtttttacagcgtcttcggctgaaatctggccttcatatactgtacagtcctgactgatatcacctgctgtcagagtttcctgactgctttcgccttctgttacattgtcaaaaagcatagatccgtatttatccagaagtgtttctactacagaagcttctggagctgctgctgacagatcagacatcatggaaacagtcaggctgagactgtcagaataagcggaagcgaaattgtctgtcggaatatctgcatctgaatcatcaggggttaattcttcaagatcattttcaatattggcagcctgttggtctgcggcttcttccagattggtcttgaaatatttatcagagagttcagggatgcgcatataaatatcctggctgtccggatcaagataatattccagagtacagattttattatcattaagaaggaccttcatcagaataccttcttttccttctgtaaaagagatatcattggaaagtgtgacattgtccagccaggagacatcaaatggtgcgacaaaccccagcaatgagcgtccggaatcttcaaatttcagaatcatgtcactctgcattcctgacatcagagactggctttcttctatagatgtagcgtaagaagatgccatttctgtgaccttttttgcccatgcatctttttcaatggaagcgtaactgtctgctgcaaatgctgtagatggaattgcagcagtaccaagaagtgctgcagtacagatagcggttgtttttcttaaccattttttccttgttttcataaagggcctccttccgttctgttatgaatcttatgtagtggaattacatttcaggacattcattttcagatatgtcgtttgactgaaataataatctatagcagtccttgtaaatgatttttcaaatacgctctatattaagatgcattattttagaggattgctatatatcaattttaccagataaagatagaaaaagctatgttttttcgacaatatggaaaaagatgttgattttagactaaattatttctatagaaaaataacaaaatatagacaaaaactatatgtgtatataaataattgatataagaaaatttattgacagatttatgtgaaaaatatatactactattcatatcaaaacactatgaaattagtaaaaacagggaaacgatatatcacagaaaacataccgttagtccggagattattatattttacaaggggaatatgctcatggaatttcagactaaattattacacggaaaagcagtagacaattatgcgaatggttcaacagtgccgcctatcagcctggcaaatgcttttgcatatgaatcttcagaacagttggaaaaagtattccagaatcgggcaccgggatttgcatataccaggattgcgaatccgacagtagatgcgtttgagcgaagagtaaatgaattagaaggcgggattggaggtgtagcctgttcctccggaatgtcagcggttacattatcattacttaatatcctgcaggcaggggatgaggtaatcgcaggaagtgcattgttcggaggtacactggatctgcttcatgatctggaggcattcggaatcaaagtacattttataccgagggtagagaaggcgctgatcgagccgtttcttacagataagaccagagcagtgtttggtgaaatagtaggaaatcccgcactgaatgtaatggatgtccgggaaacagcagattttcttcatggaaaaggagtaccgctgattgtagacagcacaacttcgactccgtatctgcttaatccgattcagtatggtgcggatgtagtggtgcattctacttctaaatatataaatggaagtggagatgccatcagtggaattatcattgacagcggaaacttttcctggagtccggaacgttatccgggaatgaaggaatataagaaatacggaaagtttgcttatcttgtgaaactgaggaacggaatctggcgaaacatgggcggctgtctggctccgatgaacgcttatctgaatattatcggaatggagacacttggtcttcgtatggagcgggtctgtaataacgctttccggcttgcccaggcactggagaagctggaaggtgtatctgtcaactatccgctgctggagtccagtccatatcatgaactggcagaaaaacagcttagtggaaagggcggagcgattctgactatccgtgcaggttccaaagaacgggcgtataagctgatcaatcatctgaaatatgtaaagattgcaaccaatatcggtgatgtgagaactctggtgattcatccggcgtctacgatttatattcatagtacgccggaagcaatggcagaggcaggagtgtacgacgacacaatccgtatcagtgtgggtatcgaagatataaaagatctgatacaggatttcacagaggcagtggagagccttggagaagaataattcatgatatacacattatcaggcgctttggtcggaacatgatagtaaccggacagaggcgctggtttaaaaacagaacaactgacagacagtcagagacaagagaagccccggaagttcaggagtgtccagttaagtggaactcgatgatcttccgggcttttttgcagcaaaattttttcagatattgaatctgtttccgaaaccgtttcgttataaaaaatagcggttaaaaattaacaactatctgcgggcgcgtttttcaatcagtccgaggagtccgtacaggataatagcgatgatgcacagaatgataatggacatcagtacccaggtaagcttaaaggtctggctggaatagatgatcaggtagccaagcccttttctggcaccgataaattcgcctatgataacaccaaccagacacagaccaatattaactttcataacactgagcagtaacggcacagaagacggaagaataatcttcataagcttttctttcttcccaccgcccagcgtctcaatcagcttcagtttttccgggtcagcttcgccaaaacctgtatacagattcaaaatcgaaccaaagatagcaaccgacataccgcagacaataatcgtccgttcgttggcaccaagccatacaataagcaaaggtgccagagcagatttcggaaggctgttcagtactacgagataaggctctgtgatcttcgcaagtctgggacaggtccacagcagaaccgccatccctgcacccagaacaacaacgaacagaaaactgaccagtgtttccgtaattgtaacagagagatggggaaaaatagagccgtctctgcacatactgcagaagctgtgccagatcattacaggactgctgaagataaaagaatcgatcagcccggtcctggcggagatttcccacaacaccagaaagaaaagaagaataaatatccgcaaaaaaagaacaagtttcttttctcttttctgatgtcggatatactgttgctgatgatatgagatttcagacatcatgattcagctccttccagataagattgaaataagatttaaattcaggcgcatttctggaaaccataggagtacggttttccagatcaaaacaaactggcacaatcttacgaataatggcaggccttggagaaagaatgataacccggtctgccatgctgatcgcttctgaaatatcatgggtgacgaggatcgcagtctttttttcctgacgcaggattctgccgatatcatcacttacgctgagtctggtttgagagtcaagtgcagagaacggttcatccagcagaagaagttccggctttaatgccagagtacggatcagtgcagctctctggcgcattcctccggacaattcagacggatgagcagagcggaatttgtccaaaccgtaatctgagagaagctgatttacataagcaagtttttcggcagtgagttccctgcggatttccagtccgagaagaacatttttataaattgtccgccactccagcagatgatccttttgcagcatatatccgatacggcagtcaccggaagttaccggtgtgccgtccagaagaatctgtccctgttccggccggagcagaccgcagatcagattcagcagcgtggactttccacagcctgacggcccgacgatggcgagaaattcacctggcatcagttgaaaggatatatgagaaagggcaggggtttcccctgataaactgtggtaggagagactgacatctgtaatatccagcagtggtttcatacagatacctccatattcggtgaatagtaacgaatattttcataatttatgatatgcagaaatgtcagggtatgatataatagatagactatagtatttttgctgctatagtatttgagggcaaatgttctgtaaggaatacgttactgtttactatgtgtttcatatcagaaatatacatatatcagacactgtgacatacatgaattgggtatagaaatcagacgaatgctgtaaaaaaatgtataagaaagtgtaagcaaatgagaaacaaaaagaaagcaatatttaacaccatttttctgatccttatattttccattaccgtatatatggtatttaagggagaggatctgggagagattattcatacagtacggcaggcagatccggtttacttactggtcagtgtggtttgtgtggtactgttcatacttggcgagtctgtaattattttctatatgatgcggactctcggagcaaaagtaaagatggggcattgtgctctgtattcttttgtgggattctttttcagctgtatcacaccgtctgcatccggcggacagccaatgcagatttattttatgaaaaaggacaaacttccgattcctgtcactacgctggtcctgatgattgtcacaattacttataaagcggttctggtagtgatcggaattgtaatctggatttttggcagaggctttctggaaggatatcttggccagtacatgtgggtgttttacctgggtgtaggtctgaatattttctgcgttactttcatgatgatccttgtatttgcacctggactggcgaaatggatcatggtaaaaggtctgaaacttattgaacatttccgtttccttaagccaaagacaacccggcttgagaaactggaagcgtctatggaccagtatcatgaaactgcggctttctgggcaagtcacaagctggtgatcctgaaagtgttactgatcactatggtgcagaggattttgttatttacagttacatactgggtataccgttcgctgggatttcatggatattccattataacccttacgattttgcagtctgtcatatctgtctctgttgatatgctgcctttacccggaggaatgggaatcagtgagtctctttatctggtgatgtttgcaccggttttcggagaagcattacttcctgcaatgctgctcagcagaggaatttcctattatgcacagatgcttatcagtgcagtgatgacctgtgtggcgtatttcataataggaagaaaagaacaagaagaaaagtag

SEQ ID NO: 879 - DNA, 8966 bp, unidentified
  source 1..8966: mol_type = unassigned DNA
atgaagcttccaggttattatacgtccggtcagtttgcacatatggcagaggtatcggtacggacaatccgctattacgaccaacagaatattttaaaaccttcttatattaatgaaagcggtgcgcgtttttataccgatgaggactttgtacggctccagcagattttattattgaaatatctcggtttttcactggaagatatccgtgaaatgacgattaatgataccgactatcacctgatgcagaatgccttaaatctccagttaaagctgattgatgataaaatcgaacagatgcagctggtgaaacaggcaattcaggatacttcccgtgaaatttccaaaaatcacaccgtaaactggagccagatgctgcatctgattcacctgaccggcatggaaaagagtttaaagacacagtatcagaatgccagcaatatttctgcccgtatccgtctgcatgaaatgtattcccaaaatcagacgggatggtttccatggatttaccacaactgtaaaatcacagacggcatgcgcattctggaaatcggctgtggggacggtacactctggaatgaaaatatggcaaaacttcctcaaaatatttccgcagtcttatccgatatttcagaaggcatgctgcgtgatgtcagaaggcgtatcggcagtgattcccgcttttcttttcaggcatttgactgccaccggattccatttgcctcagacagctttgaccttgtgattgccaatcatgtactgttttactgtgatgatattgcaaaagtctgccgtgaagtatcccgcatattagttcccggaggaaggtttctatgcagtacctacggtgcttcccatatgcaggaaatcacggcactcgtccaggaatttgacagccgtatccagttatccggtgatgccctgtatgcaaggtttgggcttgaaaacggtgcggaaattcttgccccgtatttttcggatatttcaacgcggctctatgacgatgccttatatgtcacggatgcggcaccactgattgaatatattctctcctgccacggcaaccaaaaccagtatctgttagaacgttatcaggatttccgccgctttgtagaaaagaaaacctgcaaaggctttcatattacaaaatcggcagggctttttatctgccggaataaaatatagaaattctttcataaaattttccggaaaaagcttgaaggtgacgtaacgtcatcttttatactgggtatattgacaaaatttatttgcctgattttagaacaaagcatttactgtttctacaaaagactggaggttttatgaaaggaattattttagcaggcggttcaggcacacgtctttatccgctgacaatggtcacttcaaaacagctgctgccggtttacgataagccgatgatttactatccgctgtccgtactcatgaatgccggcatccgcgacattttaattatttcaacaccacaggatttaccgcgttttcaggaactgctgcgcgacggcagccagtttggtgtccgcttatcttacaaagaacagccaagcccggacggactggcacaggcatttattatcggtgaagaatttatcggtgatgacagtgttgccatggtactcggcgataacatttttgccggacacggtttaaagaaacgtttaaaagccgcgattgaaaatgccgaaagcggcagaggtgccaccgtttttggctactacgtagacgacccggagcggttcggtattgtagaatttgacaaaaatggcaaagccgtatccattgaagaaaaaccggcaaagccaaagagcaattactgtgttaccggcctgtatttttatgacaaccgcgttgttaaatacgctaaaaatttaaagccaagtgcgcgcggcgaacttgaaattactgatttaaaccgcatttatctggaagaaaaccagttaaatgtcgagcttttaggacagggttttacatggctggataccggaacgcacgaaagccttgtcgaagctaccaattttgtaaaaacaattgaacagcaccagcacagaaagattgcctgccttgaagaaatcgcttatttaaacggctggatttcaaaagaagatgtattaaaggtttatgaactgttaaagaaaaaccagtacggacagtatttaaaagatgtcttagacggcaaatatatggatgtactgcactaaaggaggatttatgactattattgtaaccggcggtgccggatttatcggaagcaactttatttttcatatgttaaacaaatacccggattacaggattgtctgcttagactgcctaacctatgccggaaatttatcaacgttagagcctgttatgaacaacccgaatttccgttttgtaaaggaaagcattacggaccgtgaggccgtttaccgtctttttgaagaagaaaagccggatatcgttgtcaacttcgctgctgaaagccatgttgaccgctctattgaaaacccggaaatctttctggatacgaacatcaaaggtactgccgttttaatggacgcctgccgcaaatacggcattacacgttatcatcaggtttctaccgatgaagtatacggcgacctgccgcttgacagaccggatttattcttcacggaagaaacgccgattcacaccagcagtccttacagttcctcaaaggccggtgcggatttactggtgcttgcctaccacagaacttacggcctgccggtaacaatcagccgctgttccaacaactacggtccatatcatttcccggaaaagctgattccgttaatgattgcaaatgccttaaatgacaagccgcttccggtttacggaaaaggtgaaaatgtgcgtgactggctctatgtagaggaccactgcaaggcgattgatttaattattcacaagggacgtgtcggtgaggtttataatatcggcggccataacgaaatgaaaaatatagatatcgtaaagattatctgcaaggagcttggcaaaccggaaagcctgattacttatgtaaccgaccgcaagggacacgatatgcgttatgccattgacccgacaaagattcacaatgaactgggctggcttcctgaaacaaagttcgcagacggcattaagaaaaccatccggtggtatctggacaatcaggactggtggaaaaccattatttccggcgaatatcaggattactatgaaaaaatgtataaaaaccgctaatagaaaggacataaatttatgaaagtgcttgttaccggtgtcaaaggacagctcggacatgacgttgtaaatgaacttgaaaaacgcggacacactgctgtcggtgttgatattgaagaaatggacattacggactttgccagtgttgaaaagacactgacagcggtttctccggaagcggtcattcactgtgccgcatggacggctgtcgatgccgcagaagatgccgaaaatcaagaaaaagtccatcttgtcaacgccatcggtacggaaaatatcgctaaaatgtgtaaacatctggatattgcctgcatgtatatttcaaccgattatgtatttaacggtcagggaactgacagctggaaaccggactgtaaggactatgcaccgttaaatgtgtacggacagagcaaattagacggggaactcgccgtttccggtctgctttccaagtattttatcgtccgtattgcatgggtattcggtctaaacggcaataactttatcaaaacgatgttaaaggtcggcgcaagccacgataaactgacggttgtcaatgaccagattggcacaccgacttatacgtttgatttagcacgcctgcttgtcgatatgatcgaaaccgacaaatacggttactaccacgcaaccaacgaaggcggctttatcagctggtatgacttcgcgacggctatttttgccgaagctgtggctttaggacacaatgaatatgacagcggacatttaacggttgctcctgttaccacggcggaatacggcatttccaaagccgcaagaccgtttaacagccgtctggataagcacaagcttgttgaaaacggatttactccgcttccgacatggcaggatgcactaaaacgatatttgaaagaaattttgtaataacaagggcatgaaaatgcccgtggaatggagaagtgtgaaaaataacgctgatgcgcttatttttcacacggagatttgtttctgagcgaaaacaaatctccatgattgcagatgagaaatcgcctgcgcgaatttctcatcgcatcttcgcaacaagttgctcagaaaaggagataatatgggacagattcaggttgaaaaaaatgcaggcggaattgaaggcctgtgcgtgattacaccaaccgttcacggcgattcacgcggatattttatggaaacttacaatcaaaaggatatggaggaagccggacttacaatgcagttcgtacaggacaaccagtctgcttcttcaaagggtgttctgcgcggtttacattttcagaagcagtacccacagggcaaactggtacgtgtcatcaaaggctgcgtttttgatgttgccgtggatttacgtgaaaacagccagacatacggcaagtggttcggtgtggagctttcagaagaaaataaaaagcagttttatatcccggaaggctttgcacacggatttttagtattaagcgataccgcagaattctgctataaatgtacggacttctaccacccgaatgacgagggcggtctcgcatggaatgacccggaaatcggaattgtatggcccaagcttaccggctcctataacggcaccccgtccggagacggctatagccttgatgacggcacgaagctgttactcagcgataaggatcagctgtggaagggattgaaggatacgtttcatttcgcataaagtgtaaaaataagaaagcagtgcagtaccaaaaacgcctcaacgtgttacttgacttcggcttattttggtactgcactgcttttatttacgctttggctccatgaggggagagcatggcagtcggaacattataggcaaaaatttaccgtgttacttgacttcggcttattttggtactgcactgcttttatttacgctttggctccatgagggaagagcgtggcagtcggaacattataggaaaaaatttaccgtgttacttgacttcggcttatttgggttcttccctgcttttatttacgctttggctccatcatttacagttaagcgaattttctgcctgttaataattcaaatgcttctttatattttgcaattgtcttatcgattacatcgtccggaaggaggtagtcgctgtccggatttgcttttaaccagtctcttacgaactgcttgtcatatgacggctgtgactttcctgcttcgtatccttctaacggccagaatcttgagctgtccggtgtgagcatttcatcaccgataacaacgttgccgttctcatccagaccaaattcaaactttgtatctgcaatgataattcccttgcttaatgcgtattctgcgcacttcttgtaaagcttgattgtacagtccttaatctgtgttgcataatctctgcccttgcccggataaagcttttctaacacttctacgctctgctcgaaagaaatattttcatcatggtcgcctaattcagcctttgtacttggagtataaatcggttcaggcagtttttctgattcctttaaaccttccggaaggctgatgccacaaacagtaccgttcttcttgtagctttcccagccactgcctgtaatgtatccacgcacgatacattcaatcgggagcatttccagcttcttgcacagcatgctgtttccgtcgtatttttctgactggaaaaattccggcatatcttttacatctacagaaaccatatgattctttacaatatcctttgtgtaatcaaaccagaactttgacatctgtgttaagattgcacccttatctgtaatcttattctttaaaatgtggtcgaatgctgatattctgtctgttgccacaagaataagattctctccgatatcgtaaacttctcttacttttccttctttgaatggtttaaattcctgcattttctttatatcctccattttttacaatttactttagtatacaatattcgacaccggtactcaagccgtattttatgaaaatatgccaagcgcaggcaatttctcatctgccatcacctgacttcaaaactgctgtgttccccgctgataaatttcattgctccgataatcgaattttctgccatattggatacggcttcatccgtgtaaaatgcggtatgcggtgttacaacgacattggaataggaacgcaggattgctagctttggattgccaagcggttcacccatacggttaaaataatacagtccgctctcatgttccacaacatctaaccccgcaaaaccaacttttccattttcaatgccttcaattaaagcatccgtgtcaatcagcgcacctctcgcacaattgattataatgacaccgtccttcattttctgaattgcctgcgtatcaatcatgtgataattatcatctgttgccggtgcgtgcagtgtaataatatcactttcccgaatcagtctgtcaaggcttacgtattctgccttttcccttactgcttcctgctcgtaaatatcataagcaagcattttacagccaaaaccgccaagatggtcaatcaccgtttttccgatgcgtcccgtaccaattacaccaaccgtacagtcgctgaactccctgccgatttttcctttgagcgtataatcctgaatcgcggcacgttccataatgtgctttgccttacggcaccccatcagcattaacataatggtataatccgccacactcgccggattgtaagttacatgagtcacacccatgccaagcgtatgggcatattccgtatctatatggtcatacccaatcgttcttgatgaaatacagcggattcccgccgcataaaacgcatcaatcatcggcttatccataattgtcgtgataatatccacaacatcatagccctttgcaagctctacattttcaaggcacggtgtctgtgtcgtatacccgaattccacaccgtattccccacagaacttctcaaaaaaggccagttcatcatattctctcatactgtatacaaaaagcttcattatactactcctattctgagcgatttctcatctgccattaggcaatttgttttcactcggaaacaaattgctgtgtgaaaaatctttcatttatggatttttcacactagtcggcatactctgacgtaattcctaaatattcttccagtgaaagtccactgttatacacctttgttgccatgtcaatgcctaagtaacgcaggtgccacggctcatactgatagccggtctgtgcatcttttccctttggaaaacggataataaatccgtactcctgtgcatgctgttccagccatgcactttccttcgtattaccaaaggaatcatcaatcgtatttaaatcaaagcagagtcccgtctggtgttccgaatatcccggtcttgacgaatacgtatctgccagtgcctttccatcactctttacataattgttatacagtgtctgctgacggctgtatgagcggtaacctgaagaaatgtaaatatttaagccctgtgcggcagcggctttctgcatgactgcaaaggcttctttgacttccggcagcaaatcacccggtgcatagctttccggcagggaataagacttattggcaatcatcacgccgccgatatacgtcacaccgtctaccacctgaatggcatagccctttgccgtcacactctgtacctgtgtgcctgcaagtgtttctccggctgcttctgtctgagatgtctgctggccctgcacagtatctgtaccgttttctgtctgtgataccgtctgtgcagaagtatcattctgcaccgtctgtgtctttttatgatgtcttataatgccagccactacaagcactgccacaagcacaagcgctgctgcaagcactgccgcccgcgccgcggcagtctgtctgcgcctgcgtgccttttcacgttttctgttatctattcttaccggttttgtacccataattcctccgattcatattaggatagcttctgtaaaaatgcttttgttctttcattatccggattatcaatgacatcttccggctttccctgctcgacaatcacaccgctgtccataaaaataacacggtctgccactttccttgcaaatgcgatttcatgcgttacaatcaccatcgtcattttttcctgtgccagctcacgcagtacctttaagataccggctgtaatttccggatccagtgccgaagtcggctcatcaaaaaagagcattttcggattcatggcaagcgctctggcaatcgccacacgctgctgctgtccaccggataactgtcccggatagctgttttctttttctgcaagtcctacttttctaagcagctcccttgcctctttatagacttcatccctgtcacgcttctgcacatgtatcggcgcatccgtcacattttttaaaaccgaataatgcgggaacagattaaaattctggaaaaccagtccaaaattattctttaactgtgccagctgttgtctggatacgtaatgggtggcttctccctccgcattatccgttgccgcttccccacagtatttcaaaacacccttatccattgtttcaagcagggttgcacagcgaagcagggttgattttccggagccggatggtccgataattgctacaacctcgccttcttccacttccattgatatatcttttaatacttcaagctcgccaaaacttttgccgacatgcttcatctctaataatttcat

SEQ ID NO: 880 - DNA, 8711 bp, unidentified
  source 1..8711: mol_type = unassigned DNA
ttagaaatctgttaaatcagcagctcttctctctaagaaagcagtcataccttctgttttgtcatgagtagagcaggttacgccgaataagtttgcttccatctcaacagcgttcttgatgtccatatcataaccgttgttgattgctgcttttgcaacggaaacagcgtagcttcctttggagatgattttcttagccatagcttttgctgtgttcattaactcttccggagcaactactttatttacaagaccgatgcggtaagcttctgctgcatcaacggaatcgcaggtaaagatcatctcttttgcgcgtcccatgcctactaaacgggcaagtctttgtgtaccgccgaatccaggaatgattccaagacctgtctctggctgtgcgaaagtagcgttgtcagatgcgatacggatatcacatgccatggaaatttcacatccaccgccaagtgcaaaaccattaacagctgcgatcgttacctgacgcatgttcattaatttgaagaatggtacggaagctctcataccgaaagctcttgcttctgctgcggtaaagtttaccatctcagaaatatcagcgcctgctacgaaagatttgaattcgttgcctttcttgtcaggaccgccggttaagattacgactttgatgtcatctcttgcttcgatctcagttaatgctgtgtttaactcgtctaatgtctcactgtttaatgcgtttaatgctgctggtcttgaaattgtaagaacagcaatctcctcagcaacttccagttttaaattgttaaaatcgctcatcgtttggaaccctcctgaatagtttgataaaaaattaacaatatacgttattaatagcgtacagcttttccctgaatttgtcaatagattatgggaaaaattcactataaatttggtagaaaaagtgctatgataggtggtatgatattttgacaaagacacagaaaagaggaaaaaccatggacacaagcaaatcatacttatctaaggtagtaaaggagatgccggattcagggatcaaggacttttttgatattgcaaatacgatggagggagcattgtcacttggtgtcggcgagccggattttccgacaccggaacatgtcagggaggcagcgattgcttcaatcaaaagaggtgagacaaagtataccgataatcgcggtacggtcgaactccgtgcggcagctgcagagtatttagagaagtttggacttcattatgacagggaaaatgagatcctgatcacgatgggagcaagtgagggtattgatctggcgcttcgtgcactggtggatccgggggatgaggtgttagttgtagaaccttgctatgtttcctatattccgtgtgtggaattgtgtggcggcattccggtttccatcccgttaaaggcagagaataaattccgcctgacgaaggaagaacttgaagaaaaaattacagataaaacaaaagtactgctgatttcattccccaacaaccctaccggagcgatcatggaaaaagaggatttagaagcaatccgtgaggttgtgaccgcacatgatatttttgtgattacagatgagatttatgcagagctgacctatggcaaaaagcatgcatctattgcggcgctgccggatatgtatgagcgttgtgtggtattaaatggtttttcaaaagcatttgcaatgaccggatggcgtatgggtattgcagcgggtcctgcggaagttatttttcatatgaataagatccatcagtttacgaccatgtctgcaggaacaacgtcacaggtggcggcgcttgaagcattgacgagtccggttcgtgacgaagagatcgatgtgatgcgtaaagaatacgatgagagacgaaagatcatggtggacgggttccggaatatggaactggatgtgacagaaccggaaggtgcattttatgtattcccgtcgatcaaaaaaacaggacttaccagcatggaattttgtaaccgtctgctgcaggaacagaaggtggcagtcattccgggagacgcatttggaagttgtgcagagggttacatccgctgctcttatgcttattccaaagacattattaagaaatgtttagagaagatcgcagtatttgtcagccagtttgacctcaaataaggtactggtttgaaaaaaataagcgcagacatgaaggctgctatataacaaagaaagtttgagacatacatgttaaaagattacgacttaaagcaactggtatccccattattgcaatggtttttaaatcatgcccgtgtattgccatggcgagaggaaccgactccataccgggtgtgggtttcggagatcatgctccagcagacgagagtggaggcggtaaagccgtattttgagcggtttaccacggcactgccggatgcaaaggcacttgcagtgtgtccggaggatgaacttttaaagctttgggaggggttaggttattataaccgtgtcaggaacatgcaaaaagcggctgtggaagttgtggaaaattatggtggacaacttccggcagattatgagaaactgttgaaactaaaggggatcggccattatacagcgggagcggtcgcatctatcgcatacggaatcccggttccggcggtcgatggaaatgtgctccgtgttttaacgcgcgtttctgcggatgatacggatatcatgaaacagtcattccgtaatgagatggaaaaattattagaaaaattgatgcatggggcagacggcagaaatgaaaaaaatgtatttccatggatggaggatgcagatgatctgagggcaaaggtatatcatcagaatcttgccggtgcgtttaaccaggcactcatggaacttggagcaacgatctgtgtgccaaacggtgcaccgctttgtaccgaatgtccatggaaggatttttgtgaggcaaaaaaacaggaactgatcggacagataccagtcaagagcaaggcaaaaccgcgaaagatcgagaaaaaaacggttctgattttaagggatgatgagaaggttgcaatccggaaaagaccggcaaagggacttttggcaggactgtatgagcttccgaatgtggaaggaaatatgggacaggaggaagtactttccatggtaaaagagatggggtatgcaccgatccgtattcagccgttaggtgaggcgaaacatattttttcccatatcgaatggcacatgacaggttatgcagtccgtgtagaggagccggaaatgcatccacaggtgaagtgtgaaaaaaatcgtgcagatggattattatttgtggaagcagaagatgcaaaagaaaaatatgctattccgtccgcttttgctgcgtatgcgaaatatataaacattcttcttggaaatgaaaagaaagcttaaaagaaaatatttataaaaagagggagccggtgcaacagcaccggctattcattatgaaaaagagtgtgtatgaaaagtgaagtaattcactatttgctgggaggaaccttgcttatcggataagcaaggctacctgacttacatcaggtatgaaaaaaagttctatgaaaaattttaacttgttgccttaactttgaatttagtatatcggggaattgtgaccgccgtatgccctgtttgtgagaattatgtaaataaaatatgaacaactacatactttggcagaaattaagaatatctaaagaaaaatttgattggtttgcggtaggaaaatgtgtataatagaatggctatggtaaaacaaagtggaaaacaaagtggaaaacaaggaggattacatgtacgattgtatcgtgatcggcgcaggaattgcgggtgctgtcagtgcgagaaagcttgcagaggaagcaggaaagaaagtactggttttagagagacgcagtcatatcggaggtaactgctatgatgagccggatgaacatggaatattaatacataattatggaccacatatttttcatacaggaatagaagaagtatatcagtatctctcaagatttacggactggtatgtattcggacatgaggtggtagcaaaggtcggggatcgtctgatcccggttccgtttaatttaaatacgcttcatatggtatatgaaaaggaaaaagcagatgcattagagcagaaactgattgctgcatacggagagggaagccgcgtgccgatcatgaaactgcgggaaaatgaagatccggacatccgcgagatcgcacagtttgtgtacgaaaatgtatttttaaaatataccatgaagcagtggggacaaaaaccggaggatatcagcccggaagtgacaggccgtgtgccggtgctggtttcttatgacaaccgctattttcaggacaaatatcagggagtgccgaaggaaggtttcacaccgatgtttgagcgcatgttagaccatgagaacatcacggttgagacaggtgttgactgtaaagagagattacgttttgaagaaaatcagatttattttgatggaacaccgtttgacggagaggttatctatacgggcgcactggatgagttgtttgactgtcagtttggaaggcttccatatcgttccttaagatttgactttgaacattatgagaaagaatcttatcagggacacagcgtggtcaactacacggtcagtgaggattttacaagaatcacagagtttaagtatctgaccggacaaaagaacacggacggaaccacaatcgtgaaagagtatccgtttgcctacacaggagcggagggagaaattccttactatgcgatattagagccaaagaaccaggaactctatgaaaaatatcatgcgcttgcaggtggactgccgcatttttatctgctcggacgactggcagaatacaaatactataatatcgatgcgatgacgaaaaaagcgatggaacttgctgatgcgatcatggcagaaaatacaaaaagataatcggaggattcatatatgaaattactgacatttgcgatcccgtgttacaattcacaggattacatggaaaactgtatcaaatccctgctgccgggtggcgatgatgttgagatcctgatcattgatgatgggtcaaaagacagcaccggtgacatagcagatgcctatgagaagaaatatccgggaatcatccgtgcaattcatcaggtaaatggaggacacggagaggctgtcaatgctggaatccgcaatgcgacaggactttattttaaagtggtagacagcgatgactgggtagatgaggaggcttataagaagattttagataaacttcgtgagctgaccggcggcaatcagaccctggatatgtttattgccaattatgtatatgaaaaagaaggtgcgcatcataaaaaagtgatgcactacacgaacctgccccaaaatcagatttttacctggaatgatgtgtcacgtttcagaaagggtcagtacattttgatgcattctgtgatttatcgtacaaaactgctgcgtgaatgtggattagagctgccgaaacatacattttatgtggataatatttatgtgtacaaaccattaccaagtgtaaaaacactgtattatatggatgtagatttttaccgttactttattggcagggaagatcagtcggtcaatgagaaagtgatgatcagccgtatcgaccagcagatcaatgtaaataagattatggtagatgaatttgatctctggaagattccaaaccgaaaactgcgtcattacatgtttaattatctggaaatcatcacggtcatttccacgattatgctgatccgctccggcactgaggaaaatcttctgaaaaaacgtgaactgtggaaatatattaaggatcacgacatccgtttattccatcatctgcgcgccggaattatgggaaatgcaatgaatctgccgggcaagggaggcagaaagatttcggttgcggcatatcgactgtcacagaaagtggtcggatttaattaagaggtagtgagagtatgagtgaagaaaataactggaattatggaaatgatgagccgaatgtaaatcagggaaatcctgtcagcctggagaaaagtacgactgatggtacagcaggtgtaaatttagagaagactgtgaccggaaatgaagagcgtgtaaattcagaaaagactatgacagacaatccgtattatacaaatacgtcatatggaaacggcaatacaaattataattacggacagtcaaatgacagtgcaggttataactatggacagtcaaacggaagtacagaatataattacggacaaccggctggcaggtatggaagtaataagtcagaaagtgaaggctttggtattgcgtcgttagtacttggaatcattacggttttgctgttctgtacctgtatcagctggatcaccggtattcttgcgattatttttggtatcatacagcttgtaaaaggaaacaaaaaaggaatggcgatcgttggtttgatcacaggtggaatcggttttgcagcatcgattattctgtatatcctgattttttttacaggacttggatcttatagcagctataatgacatctatgatcatatttacgatgatatctatgatgatattgaagacagtatggatgacggaacgatataataagactgccgagcgaagcgagtgtagatcacgatcatgatatagaaatttttaatggagagggttatggaagagttattgacagtcagtggattatccaagacatttcacttgtcaaaaaaacagcagaaattagaaaagacaacggaaaaagttaaggttgcggtggatgatctttccttttgtacttacaggggggaagtttttggattattagggcccaatggagcgggaaagacaacaacgcttcgcatgttagcaacgctgatcaaaccggataaaggtgatgctctgattgacggaagcagtattgtgacagatccgaacggtgttcggaaaaagatcggatttctgacgagtgaattaaaactggaagaattttttactccgaactatctgtttgattttttctcagaattatacggtgtcgatcaggcagagcgggatgagagaaaacgtatcctgtttcagaaatttggtgtggatgagtttgcggaagtgaaggttgcaaatctctccactggtatgaaacaaaaagtatccctgatcatttcactggtgcatgatccgcagatcattatttttgatgagccgacaaacggacttgatgttatcacggcgaaggttgtgaccgattttctgcaggaattgaaagcagaaggaaaaacgatcattgtatcaacacatattttttcactgatcgaaaagatctgcgaccgtgtcggcattatcatcaacggaaaaatggttttgtgtgacacgctttcccatgtgacggcggaaatgccacttgaggataagttctttgaaatctatcgggaaacggcaggtgagatagtatgagtaaaaaaatgattgcaatcatgaaaaaagagtttgcccgctttttcggagataagagactggtgtttaccacaattttaatgccggggcttatgatctatattttgtatacgcttctggggcagggaattatgaagcagtttgccgcttcggaggattatgtatatcagatctatacggtggatctgccggaggcgttttcttatttaaagacagagtctgatctggaagtgacggaaattacagtagaaaaagagtctgatgtcttagaaaagatcgaggcggaggaagcagatcttttgatggtgttccagtcggattttgatgcggctgtcgctgcatatgatccgttagataccacgcaggcagcaccggatatcaacatgtactataattcagtttcgacggaatcgtcgacgatctacaatcagatgtatcaggtttttgatgattatgaatcttctctggcaaataagtttgatatcaatgccgaagaaggtgtgaaatatgatgttgcaacggaaaaagatacttctgcacagcttttttccatgcttctgccgatgcttttgatgtcatttttattcagtggatgtatggcggttgcaccggaatccatcgtcggggaaaaggagcgcggaacgatcgcaacgctgcttgtcacaccgatgaaacgcagcgagcttgccgtcggaaaagtcttaagtctgagtgtcatcggacttttgggcggagtttccagctttatcggcacgatgctggcacttccgaatctgatgggcggtgcggcgcttgaggatgacagtatgacgggtgcgatgagcgctgcagtttacagtggaacggattatgtactgttgttatttgtcattttaagtacggttctggtaattatcggtgcaatctccctgatgtccggcctggcaaagagcgtcaaagaggcaggaacgatggtttcgcctctgatgatcgtcgtcatgctgatcggtgtgtcgacgatgttcggggatggtgcgccgaaggaggtttactggtatctgatcccgttttataacagtgtacagtgcatgaatggaattttttcctttgatcttgtgcctgttaattttgtggtaacaatcgtggcaaaccttttgtatgcactggttatgacggccgggttagcaaagatttttgacagcgagaagattatgtatagttga

SEQ ID NO: 881 - DNA, 13530 bp, unidentified
  source 1..13530: mol_type = unassigned DNA
atgcgggcggtctttcacggctggcccggaaatgatgaaacaatagataccgtcatgtttgatccaaatcaaaaacccgatacagcccgggcagaaaattccattttcggctctccggaagcagacaacctcctgcccaaggatcagttcccggattacgccatgcgtgcggaggacgccttccagttggtgtccgatgaattgatgctggacggcaatgcccgccagaaccttgccaccttctgccagacgtgggatgaaaagcaggtcaggatgctgatgaatatcagcattaacaagaatatgatcgacaaggatgaatatccccagacagccgctattgaaatgcgctgtgctgccatcattgccaacctttggaacgccagccaggatgaaaaacccatcggctgttccaccatcggttccagtgaagcgtgcatgctcgggggtatggccgccttgtggcgctggagagcccgccagaaagctgccggcaaacccactgacaagcccaacctggtatgcgggcccgtccagatctgctggcacaagttctgccgctactgggacattgaaatgcgtgaaatccccatgtcacccggaaaatggaagatggatgtggacagcatgctggaacagattgacgaaaacaccatcgtggtggttcccacgtttggcgtgacctacacgggcgcttatgaattgccggcggagattgccaaggccctggacgattatgaagacaggactggcatcagtgtagacatccacgtggacggcgccagcggcggtttcctggccccgttctgcgctccggacattgtctttgacttccgcattccccgcgtcaagtccatcagcgcttccggccacaaatacggtcttgctccgctcggagtgggctgggtggtatggagagacatcgccgacctgcctgaagggttgatcttcaacgtcaactatcttggcggtgaaatccccaacttcgccattaacttctcacggccggccggacagatcatctgccagtattatgacttcatccgtctgggcaaggaagggtataccaacatccatacccaggcctatgaagtggccaagtacatttcagatgaggtttccaagctggggccgtacgaattcatttgcacgggcgatccggaaaagggcattcccgccgtctgtttcttcatcaaggatggagccaagacgaactataccctcttcgacctctcggacaagctgagaacccgcggctggcaggtgcccgccttcaccctccctgccaattgccaggatacggtggtgatgcgcgtgatggtccgccagggcttcaccaaggacttggcagacctgttcctggaagacttcaagcgcatggttgatttcttcgagaaacacccggtcacttctccgatgactgcggaagaaggcacggccttccaccactcctgatggagaagctccgcataataatttttgttggatgaataagtgtgtgtaagcgcagctccgcagttgtcaaggtttgtgcgtggacctggcggctgcggagtttttttatgctccggcggttgcgccgcggatggcggaagcgtgatggaggcttctgttgcggatgaacgcggactgttccggaactgtttccgaaaggggctttgtgagacctggcggacttttccgttccccctccggaattcgcggaatgccgtttttccaagttgcttcgtgaaatcctgcgcgttccccgtcttcttataaaaaaccgggcattttgttattcctgcgtcttccgtttcgtttgggaaaaggcatgcttccgcaaggttccttgcatcattctttcggaagggtggggggggttgtagcgcgggctacggataaatgcggggtccacctgtttgaggcgccatctttacttggtgaaagattgctgcgtttcaaagcctggcgcgttgccgccatgtccggacaggcgggattgataaaaaccgtcctgttttttcatgccgccgggttgcagaccctgcggagattacggcaggggacggcgcggaggctgttgattccctgatctgcttacatgatgccgcgtcgcggacgcattgccggctggcagcgaatgatggattcaaaaaaattgtgcccgccgctttaacacgatcggcaaaaagcaagggaacaaccccggtcaggagtcttccatccatcctcacatccggaatgcagcgggaggcgtggaatggcgcttagctgatgcagcggtaatagtaatccacgcgggaaatgaaccaggaccatttgaaaccgggcttgccgttgtccagcagcaggtgggggcagcgttttccggtccagtagtaatgcggcacgacgttccgcagcgggatatcgtgggcgtacatgttgtaggcggccagcttggcggcgcggtcaaaggtcttgacgatgctctgtccccgcttttcgcacatttcaatgccgatggaatacatgtccccggggccgccccggtccgcatggcgtcccgtttcattcagggggatgtgctgcatggctacatacggatccaccgtgtagtgccagttgcagcgcagggctccgttattcagcgcgcgcgcgtgctgcatggcgtctgcggaagggttttccgtgttgtgcatggtgatgaagcgcggcttcatccgggaagagcgctgccggagaggggaagagcggggcatgaacatcggccggacgttgcattccgccagcagctgccgcggagagcgcttcaccacggggacaccggagggcttgaaggaaatcatgggcgccattccggctttgccggagggttccgaacaactggtcagggccagcagggcggcggcttccagcaggaaggttctgcggtccatgccctggactttctccagcatgggctggagctgtccggaaacacgggcaagataagtggcgatggtggaaatattgctcatacagcgaccgggaggtgggggatttacagcacggatgcgggaaaagtttagttcacgctaagattcacctttcttctttgcaacgaaaaagtgtgaaagctttagctttgtgccgaattcttcacgctttttgtcatattgggccgttcaaaccgttgttgagagcaaaacggtatccggttccacggcggtgacggcgtccgcatttgccggagacaggatgaattctccctgccgcgccgttttcccgtcccaggacacggagccgcggagaaccgtgaagatggagaagcgggaggcgtccggttgggtgaatcgttctccctggtccagccgatattcctccgtggtgaaatgcggcatttccgtcaggtagccgggttgccggcagagttcccggaattccgcgatggaatccagcgcctgttccatgtgcagttcccgtccctgtccggaagcgtctgtccggttccagtcgtaaaggcggtaggtggtgtcgctgttctgctggatctccgcaatgaggtgcccggcgccgatggcgtgaaccaggccggcgggaatgtaaagatgttcccccttttccagatgggtggagcgtatcagttgctccatttggcccgtttccgccgcccggcggatgtccgagagcgtagcggtttcttccattcctccgtaaatcagggcatccgggtctgcatgcagcacgtaccatacctcgtttttaacctctccccgccgtgctgccgccgtgcgttccgggggatgcacctggacggaaagattctcacgggcgtccagaattttgcagagcaggggaaaacgcgtaaaacgttcgtagccgggcccgaagagttcttcccgctgttcttcccacagccggtgcaggggcattccttcccattcgccttcccttaccgtgctcatggcttccggacggtcgctgatttcccaggcttccccgtaggccgtttcccggtcgggcagttcccggcccagcatggttctcatgtgctggccgccccagatgcgcggctgatagatggaatggaatcgaaaaggctgcatcgtaataacgggagcgtaggccatcttttacggccggacaagtaaaatgcccgcaggaggcctgcgggcatgaagagagggaaatcggggagtttccggttatttgatggattcccatacgatgccgatctcatcaaacggcacatattccttgttcttgtccggtttcggcacaccgtagttggtccggaacaggggcaggatgggcgctcccgtcttggggtccttgctcatgggtgccattcccacttcctccagcagcagggtcatgccgaattcgccgccgggaccttcgctgaccaggatttcaatggggtacaccttgccttgctccaccgtgaactgcttgccggcggctacgccgcgcatggtgttgttccagtggccggaggggccgtatttgtagaacgtgacgggggggacgttgatgcccgcgtccttgagttccttcttcaggtcgtcgttgccgggcttgccttccatggcatcaagccatttggcgttgttcgccgtcattttccccagggaggcggattcccagccgtagtcgaatacgttctggttgttgaaccgcactaccaggtagtcgtctcccagccccacgaagcggaacgtgccggatttgggagcgcgcactttgccccggtaaatggcaagccactggctgggtttcaccttgtcgtcgcatccgtaggccttgggcgcgtctttggcgggagttctgggaatgtagaactgggcggcgtacaattgctgcggcgccttgtaaaaacgattcagctccgactcattccagcctttgttgacaaagcgggaaagaaaggcgcggtactggtccatcgtcatgttggtgggccgtccgccgggcgtctgcttggtatcgtaaaaggtgcctaccagcgtacttcctgagggctgggacgtgccgaaggcggaggtggcgtcacccaggtcggggccgaagccgtcccccatgcccagagcggttccttcttccagcatgacgggttcgtccggcgggtcaatgtcgatcttggggaggctgaccggggctgccgccgcggctaccacgactttgacgggagtttccgcatgggaggaagaggaggtttccctctgcacttccggcggcggaggcgtatccgacggaggagcttcgtccggcgtgatgtagccgacgaccttgggttcttccgggggggcgatgatgatggtcagggagtagagaatggctcccgccaggacgacggagagaatggatgtcgccaatgcggcaatgtaatttttccgcctttccttgcgcagggtttccactgcgtcttctgtgggttctatatgaaggctcatgcatgtatgataacataggagccccatatgttgagtaacatgaggataacaaggataacatgtcggtaacaaaaagggcgtctttgacgccccttcttccttatggcttctcagcttttcctgcgctttcccgtttttccgggagccagtgcgatggcaagaatggaacagacgcccagaatcagggggtaatacaggtattccatgatcagcaggggggaaacctgggcgattccggcggccatgagcatctgggccccgtagggaatgacgccctggaccaggcaggaaaaggtgtccagaatactggcgctgcgcctgggcgggatatggaatttatcgctgatctccttcgcgatgggacccaccgtaatgatggcgatcgtgttgttggcggtgcagagattggccagggagaccaggccggcgatgctgaattccgcgccgcgcctgctccggatgtgggccgtgatttttccgatgatgtacgcaatgccgccgttgaagcggatcaacgccagcacgccgccggccagcagggtgacgatgatcagctcccccatgccggtcatgccgctgcccatggcgcggaaccaggccatgaaggaaaaataccccatgcctactccgacaagtcccgtggcgagcagccccagcgtcagaacggccatcacgtggactccggccagcgccgtcaccagaaccagcaggtaggggaacaccttcatccattcaatgggagcgtccgccatggagggggactgcacgttccatccgagcaggatgtagcaggccagggccagcagcgcggcgggaagcaccaccttcacgttagcccggaatttgtcccgcatggcgcagccctgcgtgcgggtggcggcgatcgtggtgtctgaaatgaaggaaagattgtctccaaaaaacgctccgcccaccacaatggccgtcatcatgccggtgctgacctgcgtggcgtgcgccagtcccgtggctacgggagcaagcgccacaatggtgcccacagaagtgcccacggaaagggagatgaagcaggatgcgatgaagacgctggcaagcagcagattgtccggcaggaggcgcagcgtgagctgcacggtggcgtcaattgcccccatgtccctggcggactgggcgaatgcgcccgccagcacgaaaatccagatcatcatcaggatattccggttggctacgccggaggaaaacaggtccacccgttccgccatgcttttcccgcgggtgatgagcacggcccagactgccgccgccgtaaaggccaccgtcaccggaacggcgtaaaaatcctgtacggctacggagatgaccaggtaaagcaggaagaaaaccagcagggggctcagcgcccacaggctgggtttgacgggcgccgtatcctggctgtctggaaaatgggtcatggggagtgcgtgctgccggagatgctgggcggcttagtttccggcggcttcctcttggtccagataccaccggtagatgcgctccacgccttcttccagctccacccggtgtttccagcccagggaatgcagcttggaaacgtccgtcagcttgcgcatggtgccgtccggcttgtccgcgttgaataccagttctccccggtagccttccgtgacggctatcaggcgcgccagatcgccgatggagatttcctttccggtgccgatgttgatatggcagttccgcacctcccggtcttcccctttcagctggctgaaatccacctgttccatcacgtggacgcaggcgtccgccatgtcttcgctccacaggaattcgcgcaggggcgtgcccgttccccacagttccacggaaccgggggtgatgccgtatttggccagcgcggccaggatggcttcttccggcgccgttccgtccacctgttccacaggccgcgcgtccaggtctttccggacggcgtcccagtccccttccatcaggcgcttggccaggtgaatcttgcgcaccatggcgggcagcacgtggctgttctccaggtggaagttgtcattggggccgtacaggttcgtaggcatcacggcgatgtagttggtgccgtactggaggttgaagctctcgcacattttcaggcctgcgattttggcgatggcgtagggctcgttggtgtattccagcggggaggtgagcagggcgctctccttcatgggctggggtgcctctcgcggatagatgcaggtgctccccaggaagaggagcttggatacgccgtgccggaaactttccccgatgacgttctgctggatctggaggttgcggaagataaagtccgcccggtaccgtgagttggcgataatgccgcccacgaacgccgccgccagaaagacgtattccggcttttcccggtcaaagaattcccgcacggccgccgggtcctccaggtccagttcccggtgcgtccgtccgatcaggttggaataacccctctcttccagggatttccagatggcggagcccacgaggccgcggtgtccggccacgaatattctgctgtttttttccatctcaggaattgacgggatttttgacgtattccatgtcgtggcggaccatgatgcgcacgagttcctcaaacggggtggaggtggggttccagccgaggagggttctggccttggtggggtctcccagcagttgttccacctcggaggggcggaagtacttgggatccacttccaccaggatatggcccgtcttcttgtcgcgcccgcgttcttccacgccttcgcctgcccattccagctcaattccggcttcacggaaggccagcgtgcagaattcccgtaccgtgtgcatttccccggtggcgatgacgaagtcttccggcttgtcgtgctggagaattagccacatgcattccacgtaatccttcgcgtagccccagtcgcgcagggcgttcaggttgcccagataaagcttgtcctgcatgccctgggcgatgcgggccgccgccagcgtgatcttgcgggtgacgaagttttccccgcggcgttcgctctcgtggttgaacaggatgccgttgacggcgaacatgccgtaggattcgcggtaattcttggtgatccagaagccgtattgcttggctacgccgtagggggagcggggatagaacggcgtggtttccttctggggaacttcctgcaccagcccgaagagttcggacgtggaagcctggtaaatgcggcatttcttttccatgcccaggatgcggacggcctccagcatgcggagggtgcccacggcgtccgtttccgccgtgtattccggcacgtcaaagctgaccttcacatggctctgggccgccaggttgtagatttcatccggctgcacggtctggatgatgcggatcagggagctggaatccgtcatgtcgccatagtggaggttgatcagccggtttttcttcatgtcccgcacccactcgtccaggtaaagatgctcgatgcggcccgtgttgaaggaagaggagcggcgcaggatgccgtgtacttcatagcccttgtcaatcaggaactctgcgagaaaagaaccgtcctgtcccgtgatgccggagattaatgcgattttgctcatgtgctgtgtgtaggtggtttgttggcggaggaggttgaagaataaatggtgaaacctccagcggagccgcagttgatgcgctccgggcataaatagcgcatttttcccatggtgacgaggaaaatgctctggtcatggaagaggaatgccactgtcagcggacggcttttcctttgccggacgcaatcatttccttgaaatcccggaacaggtactgggggtctctggggccgggggcggcttccgggtggtactgcacgctgaaaacggggagcgttttgtgggcgatgccctccacggtattgtcattcaggttcatcagcgtgatttccacgtcgtccggcacggtatccggatccacggcaaaaccgtggttctgggacgtgatgctgattttacccgtgcggaggtccttcaccggatggttggcgccgcggtggccgaacttcagcttgaaggtcttcgcccccagcgcgtgggaaatgatctggtgccccaggcagatgccgaacatgggaaccttcccgatcagggcggctacttcacggtggatgtccgtcagcgtggcggggtcccccggaccgttggaaagaaaaacgccgtccggcttcatgccaagcacttcctccgccgtcgtgtgggcgggaaccacggtcacacggaagccgttttccctcagttggcgcaggatgttgtacttgatgccgaagtcgaaggccacgatgtcgtactccgtggggggcagtaccccttccgtcaccagcgcgtccacttcctccggggtcatgggatgggagccgatcttgtctacgatgttgcagccttccatggagggggcctttctggcggcttccacggcttcctccggcgtcagctccgtggtgaggcaggcgcgcatggcgcccgcggagcgcaggtgcttggcgatcttgcgggtgtccaccccttcaatgccgatcacgccctgcttttccagccacgggcccagggcttccgtggcgcgccagttggaaggaaccttcgccagctccgccaccacgaagccgctgacctgcgccttgccggactcgtaatcttccgggttgacgccgtaattgccgatcagggggtaggtcatcgtgacaatctggccgctgtaggacgggtccgtcaggacttcctggtagccggtcatggacgtgttgaagcaggcttcccccacttccgtgcccgtggctccgaagtgcgaaccgatgaagacgcttccgtcttccagtgcgagaatggctctcatgatgatataaaaatgctgtttggtatggggttaaacggtctgggcatggtattcctggatggtgcacacctggaggttcctgttcttcagcgcctcaatggcgttcacgcaggcctgtgcggaggccaggttcgtgcagtaggaggttttggcggcgatggcggaggaacggatgatgatgtcgtccgcccgcgcgtcgtgggagccgggcgtgttgatgatgaaatcgatgtccccgttcttgatgtggtccacgatgttcgggcggcgcgcctcgttcaccttgtacgcgcgttcgcattcgatgtcgtgctggagcaggtggatcatcgtgccgcgcgtggcgcacagcgtgaagcccatgtccgccagctggcgggccatgtggagcacgcgctccttgtcccggtcattcacggagatgaaaaccttgccttccgtcggcaggggattgaatgcgctgatctgggatttggcgaaggcgatgtccgggtccgggtcgatgcccatcacctccccggtggatttcatctccggccccagcaccacgtcgatgcccgggaagcggccccaggggaagacggcctccttcacgcagtggtattccggcgtgatttcccgggtaaagcccagctcctccagcgtcttgccggccatgacctgcgcggccagcttggcgaggggcctgccgatggccttggagacgaacggaacggtgcgggaggcgcgcggattcacttcaatgacgtaaagctgttcgtccttcacggcgaactggatgttcatcagcccgcagacgttcagccgccgtgccagctccttggaggcgcgcgtgatttccttgtgcattttcatggaaatgcccatggcgggaatcatgctggcggaatccccggagtggatgcccgcgggctccacgtgctgcatgatggcgccgatgacggcccgctcccggtccgcgatgacgtccacgtcaatctccacggcgttttccagaaagcggtcgatcagcacggggcgttcctcggaggcctccacggcttcgttcatgtaccggcgcagctcctgctcctcgtacacgatgatcatgccgcggccgcccagcacgaaggaggggcgcagcagcaccggatagccgatgcgggcggcaatagcggcggcgtcctccacgttggtagccgtccccgcgtccgcctgcttcagccccagctccctcagcagggcggagaaatgttcgcggtcttccgccaggtcaatggccttcgggctggtgccgatgacgggcacgccgtgggcttccagggcgttggccaggttcagcggcgtctggccgccgaactggacgatgacgccgtccggcttctcctgctcgcagatgtggagcacgtcttccagcgtcaggggttcaaagaaaagcttgtcggaggaatcgtagtccgtggagacggtctcagggttggaattcacgatgatggtttcataccccatttcccgcagggccatggaggcgtgcacgcagcagtagtcgaactcgatgccctggccgatgcggttcgggccgcctcccaggatgaggatcttcttccggcccgtgtcgcgcgcctcgttttcatccccgtacgtggaataaaagtaaggcgtgtatgcctcaaactccgcggcgcaggtgtccaccaggcggtagccgggcacgatgccctgttcgcggcgttccttgcggatgctttcctccgtagttccgcgggccagggcgatctgcctgtcggaaaagcccagcttcttggcttcccgcaggtccagcgcgtccaggcggtcgcccgccttcgccaggtcccgcatctgggccaggaaccaggggtcaatctgggtgagctggtgcacctcgtccagggaaaagccgctgctgaacgccgtctgaatccagaaaatgcgttccgccgtggggacggccagcttccgcgtgatttcctccgcggtgggcttctgcggcgccttcgcgtcgaaaccccagccccagcggcccgtttccagggagcgcagggccttttgcagggattccttgaacgtgcggcctatggccatggcttcccccacggatttcatggaggtggtcaggtgctcgtccgcctgcttgaacttttcaaacgtgaagcgggggaccttggtcaccacgtagtcaatggtgggttcaaagcaggcgggcgtttccctcgtgatgtcgttgcgcagttcgtccagcgtgtagcccacggccagcttggcggccagcttggcgatggggaaccccgtggccttggaagccagagcggaagaacgtgaaacgcgggggttcatctcaatgacgatcatgcggccgttggccggattgatggcgaactggatgttggaaccgcccgtttccacgccgatctcccggatgacggcgaaggaggcgtcccgcatgacctggtattccctgtccgtcagggtctggatgggagccacggtgatggaatccccggtatgcacgcccatcgcgtcaatgttctcaatggagcagatcaccacgcaattgtccgcgcggtctctcatcacttccatttcaaactccttccagccgatgagggattcctcaatcaggatttcggaaacgggggagaggtccagcccgcgggcgcagatttcctcaaactccgtcttgttgtacgccacgccgccgcccatgccgcccagcgtgaaggcggggcggataatcaggggaaaggtgcctatgtccccggctacccggcgcgcctcctccatcgtgtgggcgatgccggagcgcggcacgtccaggccgatgcggatcatggcctccttgaacaggttgcggtcctccccgcggtcaatggcgtccgcatgggcgccgatcatgcgcacgttctccctctccagcacgccgctgcggtggagctccatggcgcagttcagggccgtctggccgcccagggtggggagcagggcgtccggcttttcccggacgatgattttctccacgaactccggggtgatcggttcaatgtaggtgcgcggggcggtctctgggtccgtcatgatggtggcgggattggagttgaccagcactacttcataaccttcttcccggagggccttgcaggcctgggtgccggagtagtcgaattcgcagccctggccgatgacgatcgggccggagccgatcacgagaatctttttgatggaggtatctttaggcat

SEQ ID NO: 882 - DNA, 6813 bp, unidentified
  source 1..6813: mol_type = unassigned DNA
atgcgcattatcttctgtctgatggttttcttgttcataggaaaaaacacgatgctggcacagcaactgtcctcattcgtagaatatggaacaaccctgcataccggtgacaacacccctctttggcaggtcagcaaccagcaaggactcacttcgcttgacaacaatacttacatacgtggaggaatatcctacagacaccaactcggaaaatggaagtttgaagaagttgtggatttggttgcagcagccggattcagtgctacctctttcattgtacagcaggcttacgtagacatccgctacaagtggttcggattcttcgctggaagccgggaacagaattctccattgctgaatcaagagctaagcagtggcggcatgacttggtcgggcaatgcgcgtcccatcccacaagtacagataggcatacccgagtatgtacagttgctgccccgtttaggtctgaaaggagaaatctcgtacggatggtttacagacaacaaataccaacgggaacaagtcggagaaaaatactggtataccaagagcatcaaataccatcataaagaagggttcctgcgtatcggtatacccaaaggaaaatggcaactagaactcgggatgaccctcgacacccaatttggtggatataaaattggaggttccgaatcgggggacttgggaaacggatggaaggattatatacgcgtattcttccccggccacggaagtgaggacggaccggtaggtgaacatctggctttccaaggcaattttctgggcagcgaatatatcaaaatgacttatagtcctaaggaagatttctctatcagcgcctatctggacaatcattttgatgacttctccgccatggccaaactcaacggttgggatggcttatggggtgtggaatataaatccaaccataaacaagccatcaacggaatcgttatcgaatatctccagactaccaatatgagcggtcctctgcacggtttgcaaaattctgtagtaggtaagaccggaggagccgacaactactacaacaacggttactacccaggatgggcacattggggcatggcgatagccaatccgttgatagcatcgcctatctataataaggatggcgatatgagtttcaagtacaatcgtgttaaggccctgcatctgggatggagcggtgacatcagcagtgagtggagatatgtagcaaaattgtctcacaacagaacttggggaactcctcatcgtccaatacccgatatattagaaaatttttctacttttgcatcgttttactatactccccgtaaatggaagggctggtgcttcaacgcgtcccttgcattggatatgggagagatatatggagacaattttggagtccaactaaaagtacataaaatattttaagaaaatgaactacatacaaacagagattgacggcgtatggctgattgagccgaaagtattccatgatgcccgcggatactttatggaagcatttaaggaagaagagttccgtgcacatgtcggagacgttcacttcatccaggacaatgagtccaaatcctctttcggtgtattacgtggtcttcactaccagaagggcgattgcagccaggctaaactggtacgtgtcattaaaggaaaagtgctggacgtggctgtcgacttaagaaaatcttctcccactttcggaaagtatgtcagtgtggagctaagcgaggagaacaagagacaattcttcattccgcgcggttttgctcacggttttctggtgctgagcgatgaagctgtctttacatacaaggtagacaacgcatacgcaccacagtccgaggcatccatccgttttgacgacgaaaccatcggtattgaatggcctgttgctacggaacagcttctattatcagataaagacggacatgccgtatcgttcaaggatgcggtctattatgaataaaatatgaaaatagccattgtcggtacaggatacgtcggtttggtaaccggaacctgctttgcggaaatcggtgtcaacgttatttgcgtagacacgaacagtgaaaagatagagtcactgaaaaagggcgttattcctatctatgaaaacggactggaagaaatggttagccggaatgtgaaagcaggacgcctgcaattcaccacatccctggagagttgtctgaatgaggtggaagtggtattcagtgccgtaggtacaccacccgatgaggatggaagtgccgacttgagctatgtgctggaagttgcccgcaccattggacgcaatatgcagaaatacgtgttggtggtaaccaaaagtaccgttcccgtaggtactgcccaaaaagtgcggactgccattcaagaagaacttgataagagaggggtgaacattgactttgatgtcgcttcgaatcccgagtttctgaaagaaggtaatgccatcaacgattttatgagtcccgaccgtgtagtggtgggagtagagtccgaacgagccaagaagataatgagcaagctctacaaaccattcctgctgaacaacttccgtgtcatctttatggacatcccttctgcagaaatgacaaagtatgcggctaactccatgcttgccacccgcatcagcttcatgaacgacattgccaatttatgcgaattggtgggagcggatgtaaacatggtgcgcagcggtatcggttcggatacccgtatcggacgtaagttcctctatccggggataggctacggcggctcatgcttccctaaggatgtaaaggcactgattaagacagctgaactgaacggctacaagatgcgtgtactccatgcagtagaggaggtgaacgagaaacagaagagtatcttattcgaaaagttgcagaagcatttcaataatgatttggagggaaaggtcatcgccatttggggactggcctttaaacccgaaacagacgacatgcgtgaagctccggccctgatattgattgacaagctgctgaaagccggctgtaaagtacgtgcctacgacccggctgccatgaacgaatgccgacgccgcataggagaaagtatttattatgcgacagatatgtatgatgccgcactggacgcagatgcactgatgctggtgaccgaatggaaagaattccgcctgccttcatgggcagtcatcaagaagaccatggagcagccgttggtattggacggacgtaatatttacgacaagaaagatatggaagaacaaggtttcacatatcattgcatcggaaaataaagtcgcagaaagaagaaaagaaataaacagggacgttatgacaataaaaggaagtgcgattctcattgtacttgttgtctcattagcctcatgcagcaacagacaaacaggagaggtttccgtaaaggaagatctcattgcaaagcaactgttacaaggcatctgggtgaacgatgaaacagaaatgccattgatgcgcatcgaaggggatacggtatattatgccaacccgcaaagcgctcccgtatctttcaaggtcgttcacgatacaatctacatatacagcaatgaaccggtggcctataagatagaccgtcaaacggaatacagcttctggttccactcgctggccgacgaagtaattaaactgcataaatcagagaatgcagaagattctttggttttcaccagccgggaagtagaggtcatttccactactccagaagtgataaagaaagacagtatcgtaatatacaagaatacaaggtataggggatatgtatatatcaacccctcaaagatgaaggttttcaagacttcctattctgaaaatggaatcagtgtggacaatgtgtattatgataatgtaatccatatctgtgtatacgaagggaagaagatgctttacggccaggacatcaccaaaaagatgtttgcggatatattccctgccgaaatactgaatcaggccattcttgccgatatgaacttcatgggtgtggacagtaagggataccattaccaggcaacccttggcatacccgaaagctccgtatacagtctggtaaatatgattattggttttgactgtacaatgagcatagaaaaagcggaataaatccgctttttctatgtcttttcttcaccacaccacagtgtttatttcttctcaccgccattctgtggccgtttggcactgggctttccgcctttattgttgttacggccattcttatttcctcctggcctacgtccgtttccatggccgccccgtcttcctccgtcaaatgctctcggcttgtattctggtgcttcacccagctcttcgggaaccgatatcttatagatatccctatctaggaatttttcgatattcttaaagttaccctgctccttttcggaaacgaaggtgatggctacgccgtcattattagcacgcgccgtacgtccgatgcggtgcacataatcttcactgtcgtggggaacgtcgtagtttatcaccagacggatgtcatcgatatcaatacctctcgcaacgatatctgtggctaccaggatattgatacgtcctgccttgaactcatacatcacttcttcgcgctgtgcctgctccaagtcggaatgcatttcaccgacgttcagtttcatctgcttcaaagctttggtcacttccttcactttcagtttggaagaagcaaagatgataacgcgttccggtgtctcctctgcaaagaggctacggatgatgcccagcttctgattctcgtagcaaacgtaggctgcctgcacaatcttttctgccggtttggaaacagccagcttcacctcggcaggattgttcagaatgttaccagccaactgttgtatcttagcaggcatggtggcagagaacatgattgtctgccgctctttaggaaggaatttgacaatttgcataatatcgtcataaaatcccatatccagcatccggtctgcttcatccaaaataaaataagagacacgggaaagatctacataaccaaggctaagatgggctatcaaacgccccggggtagcaataacgacatcagcacccagtgtcaaccctcttttctgctgctcgaacagtattccgtcattaccgccatacacggccacgctggaaaccggcatgaaataagagaaaccttccatctgttggtctatctgttgcgccaactcgcgggtaggagccatgacaatgcaattgatggcatcggcagggtgtccgccttctgagagcttgttcaatataggcaacaaatatgcggcagtttttcccgttccggtttgtgccactgctattaaatctcgaccttcgagtatgacgggaattgatttttcttgtatgggggtgcactcttcaaagcgcatggcatccagtgcctccagcacattgccatttaaatgtagttctgaaaacttcatgtatctcttttaaatttgcgtacaaagataggaaaaagacttataaaatagactcttacagtaaaaaaataagcccttgggacaataattatctcaaggacttgcaaatttgtttcaagcatctgccttcaacggggaatatcaatgtatgaatccttaaatcccagaaagtaaagtacgccatctaagccgatggtgttgatggattgcttagcattggcaacaactttgggctttgcatgaaaagcgattccaaggccggcaattcccagcatgggcaggtcgttggcaccgtcgcccacagcaatagtctgcgcaatatccactttttccacctgagctatcaaacgcagcaactccgccttacgcttaccgtcaactacatcaccgagatagcgaccggtcagtttgccatcctctatttccagctcattggcatacacatagtctataccgtacttcttctggaggtactgcccgaagtaggtaaaccctcccgaaagaatagctatcttgtaaccgtatttcttcaaaacatacatcaggcgatccacaccttccgtaatgggaagattctctgcaatttcctgcatcacggactcatccaatcctttcaacaaagccactcgttcgcgaaagctctcaatgaaatctatctcaccacgcatggcacgctcagtaatagcctttacctggtcgcccacacctgcacgtatggccaattcatcaatcacttccgtttcaatcagagtagagtccatatcgaagcaaatgaggcgacgcatccggcggtacatattgtccaactggaaagagaaatccatttccagttcggttgccagtttcatcaactgttcttgcatggcaatgcggtctttcggagtgccccgaacggaaaattcgatgcaggcgcgtgtacgcgattcacattcgtccagcggaatacgtcctgtaaggcgcttgatggcatcgatattcatgccttgctctgcaagaatacgggtcacagcagatatttgacgggcagacaacttgcgccccaataaagtaagaatatagcggttctttccctgcatattcacccaatcctcgtactctttggcagtaatagggtaaaaacggacagtcactcccagggaggaagccttgaaaagcagttccttcataatgaaccccgaatgttgttcttccgtcttgcataaaatgcccaatgaaagagtattatgaatgtctgcttgaccaatatcaagaatagtagcatcatatttggccagaatttccgtcacggaagctgtcagtcccggacggtcttcacccgtaatacgtatcaggatgagttcagtgttcaatggttgcat

SEQ ID NO: 883 - DNA, 22991 bp, unidentified
  source 1..22991: mol_type = unassigned DNA
atcaggatcagcagccatggaatgcgctgcttcgcgtgggtccagacgctggtgccgaagtaggtggtggcatcgtcgtccggcagaatagcagccatcttctgcatatcctcggtgctctcgtcggtcagaacgtcgattgcatcgtcgatggtgatgatacccacgaacatgccctcgttgtccagaacaggcatggcggtaaagtcgtagcgctgcatctcacgggccacgtactcctgatcgtcggtcactttcacagtgaccacgttatcatccatgatctcgttgatgggagtatgcggctctgacagaagcaggcttcgggcagaaacaacgcccttcaggcggttgcgctccaccacgtagcaggtgtacacggtctctgcgttttcgccctgcttgcggatggcttcaaaggcctgcgccacggtcatatcctcgcgcagacggacatattcgggggtcatcaggctgccggcagagctttcggggtagttcagcagcttgttcaggctctcacgggtctgcttggaggatttctccagcacccgcttcaccacgcctgcaggcatatcctccagcagatcggcggcatcgtccagactcatctcttcaatagcgcccacaagctccacatctgagaaggcgttcaccagatcgtcgcgggcttcgtcggacatataggcaaaggcctcggtggccacttcctttttgagcaggcggaacaccacaaggcggttgttttcgtccagctcttccagcagctcggcaaggtcggcgggctgctcttcctcggtgacttcgcgcagcttgacgtactgcttcttgatgagcagcttgagcaggcggctcttggtgagcatctcagggttggccttgacctcttcgtcgttggcttcctctttttcggcctcgcgcatgtcctgcttgaggtcttcagtagcttcctcgttcagatcttcagccagcttctggcggacctcggcggggatatcagcaggcagctcctgcaccggcagcgcctgttccgcagcatcagccgtcagctttttttcttccatatccattgggcgtacctcctcagtttttacggaacaggagcagctcctgtatccggaggacgcagcagatcgggaaacaaaaaacgcgccgccttgcctgccggaatgccgcaaacgccgcattctgcgcacacaaagccgcgccttcctctgctctgttttgcggaaagatgcaccgttgaagcggtgcttttccgcaggactcagcgaaggaggcgaacggttggggaaaacgcagttgtttttgttttctgatccaccgcgccggtggttctacttcgactatgatccgggtccattttcctgcgttcacctccaagttttcatattcatttttattatagcgccgcaaaaaaacggggtcaaccctaaaccaccgatttaccagaattttgcaaaacaaaacaccctcttccgtgttgcggcacacgaaaaagggtgttttgcttggatattgccttggtgtgaggaggaatcatgttacttgggtaagcggttgcggccccgcttcccatggcaaaagtataacagctttcacaattgaattcgttaagaagctatgaagaaactgtaaaaagggaatggtatcttttggaagattttgtgatagaaaatcttcttgacaatatttgttttatcctatattataatcataggataccaccaaacgggaaggatgccgaaaatgtctgcttttgaagtgaatttttattataaggcagacggcagctgcccggttcgtgattttctggatacgctggacgacaaaatgctggcaaagcttttgggcacgatctccctattggaagccaatggcacacaactgcgggaaccttattccaaatcattgggagacggcatttttgaattgcgtgccaagcaaagcagcaatattacgcgcattttatattttttcgtagttggacatcagatcatcctgacaaacggttttgttaaaaagacgcagaaaacaccgccggaagaaattgcactggcgcaaaaataccgcgcggactattttcatcggaaggagagttcctcatgagtgattttcggaattatttgaatgaacaattacagcggccttcctttaaggcagaatgggatgctcttcagccggagcttaccattgcacaggccatgatcgatgcccggaaggaaagtggtctgacccagaagcagctttcggagcgtaccggcattgcgcaggcagatatcagcaaactggaacggggaaacgcaaacccttctctgcgcaccctgcagcgtcttgccgcagggatggggatgaacgtcaaaattgaatttgtggcaaataaataatttatatgtcggcaaagatacaagcccggaacgtccgcaaacgttccgggcttgtattttcacaaaaagagtttgcacaaaaatacgccccggtcaccttgcggtgaacggggcgctaaaacgaagttcgttttttactgcggcaagatccctgcaaagcaggtcttatgcagcaggcggagcaaggtatctgcaagcagaccttatgctcctgacacacgcggggtgtgctttcaaggaccctcgcgggcgctttggtatctcatatcccgctgcggtgctccgcacggaacaaagcaccgcccgggaagtgaaatcagatagaactcgtatggcgaatgctgtacttcagcacattacctgcatggatggatgcgtttctccgcttcgtaccgctgcattgcgcagtaaccgccggtacggggcagccgccctcttgcattgtggggctaaggtgccgcaaatatctgcatccaaagcgcagaagaatgcttacttgtacaggtcgaccagacgggtcaggtgctcgtagcggtcgtttgcaacttcctggttgcgtgcgaacagctccttagcacggtcggggaatgcacgagtcaggcggctgtaacgggtctcgttagccagcagtgcctgatacttctcgttatccacagccttggaggtcagggtgaacggattcttgccctgagccttgtttgccgggttgaaggtgaacaggttccagtaaccggcctcaactgccttcttcatctcgttctggcagttggtcatgccgcccttgacaccgtgcagctcgcagggagcgtagccgatgatcagagacgggccggggtaagcctcagcctcagcgatggccttgacagcctgagccgggttagcacccagtgcgatctgagcaacatagatgtaaccgtaggtcatagcgatctcggacaggctcttcttgctgatttccttaccagcagcagcgaactggcagacttcaccaatgttggaagccttggatgcctgtccaccggtgttggagtacatctcagtatcgaagaccatcacgttgacatcctcgccggaagccagaacgtggtccagaccaccgaagccgatgtcgtatgcccagccgtcaccaccgaagatccagacggacttcttggcgatgaactgcttgctcttcaggatctctgcagacttctcgcagccggcagcagcagccttctccagctcagcgatcagggcctttgcgggctcgtcgttggccttggtgttgttcttggtctccaggaacttctcaaaggcagccttcagctcagcagaagccttgtcggaaccagcaacctctgcgatctccttgatcaggttctcgcggacggtcttctggccgatgtacaggcccagaccatgctctgcgttatcctcgaacagggagttgcaccatgcaggaccatggccgctgtccttgttgacggtgtacggagagatggaagcggtgccgccccagatggaggagcagccggtagcgttggagatgtacatcttctcgccgaacagctgagtgatcaggcgagcgtaagaagtctcggcacagcctgcgcaggagccagagaactccagcagcggctggttgaactgagaaccgatgacggtatcgtcagcaaacttggaaggcttcttggagatgttggccacgcagtagtcgaacactgcctgctgatcggcctggctgtcctgcggcaccatggtgatagccttggtggggcagacggtgacgcactcgccgcagcccatgcagtccagaggagacacagccataacaaacttgtactcgtttgcgggcttgttgtcgcggctcttggtctgtgcaggagcagctgccagctcgtcggcggtcagctggaagggacggatggtagcatgagagcagacgaatgcacactggttacagccaacgcactttgcagcatcccactcggggacgttgacagcggtgccgcgcttctcgtatgcagaagcgccctgctcccactcgccgtttgcatttgccacgaaggaagagacaggcaggctgtcgccgtccatacgggcaatgggctccatgacatcgcggatctgcttgaccagctccggacggccggtgagagccttgggtgcgggatcagcctcggggttggaccaggatgcgggcacgtccaccttgtggatggcgtcaacgcctgcatcgatagccttccagttcatctcaacgacgtcctggcccttcttgccgtagctcttctgagctgcctgcttcatgaagttgacggcatcctcgatgggcatgacgtcagccagcttgaagaatgcagactgcaggatggtgttggtgcgcttgcccatgccgatctcgatagccttatcgatagcattgatggtatacagctggatgttgttgtcagcgatatacttctttgccttggcgttcaggtgctggcccagctcctcatcggaccactggcagttgatcatgaacacgccgccgggcttgacatcctggaccatcttcatgcccatgtggatgtaagcggggttgtggcaggccacgaagtcagcctggttgatgtagtaggggctgcggatgggcttgtcgccgaaacgcagatggctgatggtcacgccgccggtcttcttggagtcatactggaagtatgcctgaacatacttgtcggtatggtcgccgatgatcttgacggagttcttgttagcaccgacagtaccgtcgccgcccagaccccagaacttgcactccttggtgccagcagctgcggtgatgggagcgggcttgacttccggcagagacaggaaggtgacgtcatcggtgatacccagagtgaagcgctccttgggctgatccttctccagctccttgaacagagcaaagatggaggacggcggggtatccttgctgcccagaccgtaacggccgccggtcagaacgacatcgttcaggccagcctcacgcagggtagcggcaacatccaggtacaggggctcgcccagagagccgggctccttggtgcggtccagcacagccaccttcttggcggtcttgggcagaaccttcagcagggaagcggagacccagggacggtacaggcggaccttgacgataccgaccttctcgcccttggcgttcaggtagtcgatgacctcatcagcaacgtcgcagatggagcccatagccacgatcacacggtcagcatcgggtgcgccgtagtagttgaacagatcgtagttggtgcccagctttgcgttgatcttggccatgtacttctcaacaacagcaggcagagcgttgtaaacgctgttgcatgcctcacgatgctggaagaacacgtcgccgttctcgtgggagccgcgcatcttggggtgctcggggttcagagccttcttacggaactcctccacagcctccatgttgcacatttccttcagatcggcgtaatcccacttctcgatcttctggtactcatgagaagtacggaagccatcgaagaagttcaggaagggaaccttgccctcgatggcgcacagatgtgcgacaggggacagatccatgacttcctgcacgctgctctcgaccagcattgcaaagccggtctgacggcatgccataacgtcgctgtgatcaccaaagatgttcagggactgggtagcaacggtacgtgcagaaacatcgaacacgcagggcagctgctcagcagcgatcttgtacatgttggggatcatcagcagcaggccctgagaagcggtgaaggtggtggtaacagcacctgcacccagagagccgtgcacagcgccagcagcgccggcctcagattccatctcgacgaccttgacctgattgccgaagatgttcttctggccagctgcggaccactggtccacagagtcagccatcggagaagacggggtaatggggtagatggcagccacgtccgtgtaggcatacgctacatgggcggcagcggtattgccatccatagtttgctttgctctaggcatttttcttcctccattattcagaatttggtaccttttgcgcggggcaatatgccccacatgggaccggagaaccccataaaggcactattgcttgtatactataatagcaaattccgcccataaagtaaacgcaaaccgctcaacaaacgcaccaaaaataaagaattttttttagcgcttttgtacgtctttagttcgttaaagtgagcactggcgcggattttccggttttggcctgcctgctttgccagatcctgtgattttttcgcaaaaaggggagggaaccctctcagtcacggcttgcgcagcgccgcgctttctcagaaagcggcgctgcaaatgctgctttccgttacgacccctcctgtgaaaaggcaattctggaaaatccgcgtttgtgtagcaatgaaagccccagtggggctttcaagcggcagagcggtctgcgttagcagatggaggggctttgccccgacaagctccgcagattttccagaattgcgaaattataaatattctttccgctgattatgcgcaaagcaaacgcggcgcgcatttcaaatcgtcccatcctcttatatttatcatctctttattgacaacaaacctcattttgccgtaaactgaagccatagaaaaccggcgctgtgccgggcaaagagggtaataaaatggagaagaccgtgcattacgaaaaaacactcaccagcgaggtgctcttcgagggccgggtgatcaccctgacaaaagacactgctctgctggaaaacggcaagaccgccgaacgcgaagtggtgcatcaccacggcggtgcgtgcatcctgccctattttgaggacggcaccatctgcatggtgcgccagttccgctacgccatgcagcaggagctgtgggagctgcctgccggcaagctggaaaagggtgaggacccctttgaagccgccaagcgggagctgggcgaggagtgcggcctgaccgcggacaattatatctctctgggccaatttttccccaccgtgggctatgacaccgaagtgatctatacatgggtcgccaccggcctgcacaagacccagatgcatctggatgccgatgaattcctgacccctgaccgtgtgccgctggataaagcttatgagatggtcatgagcggcgagatccgggacggcaagaccattgccggtatcctgaagctcaaggccctgatcgccgagggcaggctgtgaatatcctgtacgaagatgccgcccttgtggtgctggacaagcccgccggactttccagcgaagagggcgtgcccgcagccctgcggcagctgtggggccagccggatgcctttgtaggcgtggtgcaccggttggacacgggtgtgtccggcctgatggtgtttgccagaacgcccggggctgcggccgcactcagccgtcagatcacccagagccagaacgcctacgctgtgcaggatggcagggccgaaggggagccggaagtgccgcagttcatcaagcggtaccgggccgtcattgcaggcgggccggacgaagcactgcccgccgaaggcaccctgcaggactggctgttcaaggacagccgccggggccgggtgttcccggtcagccgcccccgcaagggcgtgcgggaagccgtgctggaataccgcatcgtgaaaacggcaggagagatgagccttgctgagatcacgctgcacaccggccgcacccatcagatccgggtgcagtttgcatcccggaagcatccgctggccggagacggcaaatacggaagccgcgtaaaaggcagcattgccctgcagagctgcggcctgcagtttttgcacccggagaccggaaagcccatggcatttacgctgccgctcccggagggtgcgttctggaaaccgtttgaagaataatgcatttccattaggtgagaggtatggaacaatacaaaactgatgctgagatctatgctgtgctggagcgggagatcattgacctgaccatccgccccggctcttcgctgagcgaaaatccgctctgtgcccgctttggcgcaccgcgcaccctgatccgggtggtgctgcagaagctgcaggaaaacgggctggtaaagatcgtgccttacaagggcaccaccgttacccggctgaaccgccgcatcgtggacgagctgatctacgagcgcaccgccgtggaagcccgcgtattgcgggatttttcgccccggtgcaccccggagcagcgggcgttgatccgcaggcgagtggaagcctacgaggccctcgcggccatggagagcccggattacaacaagctgtacgaggccgaccgtgccctgcatgggacatggtttgcggccatggataaaatgtacttgtggagcaccctgcagaacgcccacgccgactacagtcgcttccggatgctggacaccatgaccaccggcggtcttgccgaggtgatcgcagaccaccgcaacctgatgaacgccatcgagcggtgcgaccttgccgcctttgaaccgttggtggaacggcacctgtacggcggcatccggcggcttggctccaagctgaccgaggaatatgccgattattttgagccggaaaagtaattgttctatgtggaacattttatgaaacgaaagggcacagcgcattgcagcgccgtgcccttttgttttatgctgtctgaatttcagaacaccccggaaataaaaatttccagaccaatgccaatgaggatgatgccgcccagaatggatgccttgccggagagcttggtgccaaactttttgccgatgcgcaggcccgccatgcagataaagaaggtgaccaccgcaatgatgagtgatgccgcaagtgccatcagccagccgtattccgaaatggtgaagcccaccgaaagcgcatcgatgctggtggcgatgccctgcatgagcagtgcacccgcactcagctctgcggcctcttcggcctcttcgcccttgatgccatccaccagcattttgccgccgatgtagcccagcagtgccagcgcgatccacgggatgaacttttcaaacgaagagaacagctccacaatggtgtgcacgcacacccagcccgtcatgggcatcacggcctgaaaaagggcaaaggtgcccgcgatcctgcacatggtttccctgctcatgcgggggtcgtgcaggccgtttgccatggacaccgagaatgcgtccattgcaaggcccacgcccagcagggcactgttgaggaaaaatacaaaactccattccatattgtctgcctcctgaatctgaccagaatatcgggcaatacaaaacccggtcacgggcgcacatgtacgtccgggaccgggtgattttttttgaaaccaactccatgtgcacgggcgctgttctatgcgccaaaagcacatgagtctcgcaaatgaaagcaagccagaccggaaccaacggtcattatgttgacttgctgcgccctgcaaaagcgcctgctactcccccacgggtatttgtgattgttttgccattgtagcatatctttgcagggaagtccagacaaacctgcgcggttacacggtatttttccatcggcgggcaaaataccagtcctgtgaaataataaaacacagggtgttgcccagtgccctcagggtaacagcatgttcctgacgcaaggcccggcgggcgcagcgctcgtactcccgcgcctgctgcatccgggcactccggcgctcttcggcggtcaggtgcattcccacatcgatcagggagtgcagcagtgcccagtacagctcacacagcgaacccgtgatgccatggcggcgtacgcactcaaacacagtatagtttgcttccacacggtcgagattgcgcagggtgactttgctgttgacgatgctgcccgccaccttgcggtaaaggtacagcgcatccgggatattcgcgattctgtccgctttttcgtaggcgtaggcgatcagcagggtgtcctcgttcagcttgccctctgcaaagcgcagctgcgcaaaaatgctgcggtggtacagcttgttccacaccaccatgtagggcagaagggtgctgtgctccaacgcctgctccggggtcagcacctcccgccgcacatgcagatactgcttccggatgggggtcatggcttcgtccacctgccggtaattgcacacggccatctgtgcaccggcctcctgcgccgcatggtaaagctttgcgcagaagtccggcgtgatggtgtcgtctgaatccacaaaggcgatccattcgccctctgccgcgtccagcccggcattgcgtgccccgctcagaccacgattcttctggtggatgacccggatgcggctgtcctttgccgctgcggcatcgcacaaagcagggcagctgtccggagagccatcgtccaccaggatcagctcaaaatccgtgaaggtctgggcaaggatggaagagatgcaggcgctcagaaaacgctctgtcttatataccggcacgatgatgctgatctccggctgttttttatgttgttcctgcacaataaactcctcattgcttcaggtcgttttctgccgtctttccgcccttttgcggcatagatccagataactgcaggccgatgcagcgcagaccactgccgcccacaaattttttagtgttacgccgcgggcttgcatcagccgatggcgggctgtacgctcatacgcaaaggcttccttcatccgggggcttttgcgctcttccggtgtcaggtgcagccagatgtcccacacggcagtcaaaatcgggcgataggctgcacacaaagcatcccggatgccgttttggtacagcacatcaaacaggcggtaccatgcttccacccagtccagtgttttcaaggtagtcttgcggtgcatggcactgccggtaacgatgcggtaattgtataaaaaatcccatacaccgcaggcagaagccgctcttgcgtaaatgaccggcatgagacaggtatcttcaaacgccttgttttctggatagcgcagattttccagcagttttcggcgataaagcttattccacggaacctgaaaatccgacaccaccatccggcgcagaacttcctcctgcggcaaaaactcgttcaaaaggcgatgttctccgcctgcaagcgttttgcccgtttcatcaatgcactgactgctgcagattgcaaaatctgcacccgtttccagcactgccttatgcattttttccagatactccggttccaccgtatcatccgaatccacaaatgcgatccaatttccctgtgctgcatccagacccgcattgcgggctgtgcttacaccgccgttttgcttatggatcacccgcacgcggctgtccctttttgctgctgcatcgcacagggcagggcagttgtccggtgagccatcgtccacaaggatcagttcaaaatctgtaaaggtctgagcgaggatggaatcaatacactcattcagatatttttccacctgatacactggcacgatgatgctgatctccggttttccactttctgttctttcactcacagtatttctcccattcggaattcagttttatttccggtacttgaagttgaagtagaactgcgggtttgcaatgcagagtgcggtttctgctgcgttgcgcagggtacaggccccctgttgacgaacctctctgcctgcttttttcaagcacgcttccgcctgctgaacccgttcactgtttctctgtttgggtggcagatttttttttgtgtttcggagcatgcgtttcatcagtacatactgcaggaatgctgtgtctttttttccatacttgagtgcacaagcaagaaggccgtagtttgcatcgatctcatccagatttttcaaggtgacttttccatgcatgatgcttgccggatgcagccggtaatggtacagtttttcctttatacaagccacagctgttgcatgttcaatgatttccggtgtggtaaatgcatcttcatagtttttgcccacaggaaaaacgattccttccagcacatctctccgatgcagtcttgttgctgcctgaatcaacggcgtaaggcggatgcggtgtattgcttcctcacgggaaagcacttctgtacgtaaaggctgttcctgataatcacaaagacttccatcctcttccataaaaacttcgttgcagactgcaagttcagcacctgcctgctttgctgcccgcagcattttttcgtagtaagtcttgtctacaaagtcatccgggtccacaaagccgatccaatttccctgtgcagctgccaaacccgcattgcgagctgtgcttacacctccgttgattttatggatcacccgcacgcggctgtctttttctgccgcagcatcacacagggcagggcagttgtccggggagccatcgtccacaaggatcagctcaaaatccgtaaaggtctgtgccagaatggaatcaatgcattcgttcaggtatttttccaccttatacaccggcacgatgatgctgatctccggggattttttttgctctgtcatgttccttaaaccactttctgtgtttatttttattcctcacacgctatttctattatacatggtttggatggatttgaaaagaagccgccgtacagaaatctctgcgcggcggcttctttcaaatcttattgtgttttcaaggtttactcttcgcccttatcgtctgcttccggggcttctgcagcggcggcagcatccgcagcttccatggcggcaagctgctctgcggtgggttcggcatcggcatcggaggtgtcgatctgctcggtctgggcctcgtcgtcgtggtcggtgcgggcaagtaccatcaccttatcgttctcacccaagcgcatcacccgcacgccggaaccgtagcggctctgcagcgggatctcgttggcgtgcagacggatgatgatgccctcctgactgctcagcagcacatcatccacatcgtccacgatcttgaccgcagccaccttatccttagcggcatcgtagttgcggatgcccttgccgccgcgtgcggtgatgcggtaggtgtcgatgtccgaccggcggcccttgccgttctcggtgacggtgagcaccgtgccgccctcgcggcagatgcacacgcccacaacttcatcgccctcggccagacggatggcgcgcacgccgtggccgctgcggcccatgggacgtgcatcggcttcgttgaagcggatggcctgaccgttgcgggtggcaacgatgagcatatcgtggccggaggtcaggcgggtccatgccagagcgtcgccctcgttcagggcaatgccgatcaggccggacttgcgaatattggcatactgctccagcggggtgcgcttgatgaggccctgcttcgtgaccatggtcacaaagccgccctcggtgtcggcttccttcgactggcagatcatgttggtgaccttttcgccctcggccagctgcagcaggttgacgatgttgctgcccttgctggtgcggctgccctcggcaatggtgtagcccttgatgcggaacagacggccccggtcggtgacaaagagcacatagtcgtgggtggagcctacgaacatctcctgcacgatgtcctcttccttgcgggtcataccggagatgccgcgtccgccgcggcgctgtgcctgataggtggccttgagctgacgcttgatataaccggcctcggtcagggtgtagacacactgctcctcggcgatcagatcctcgatatccacctcaccggtcacggactggatctcggtgcggcgctcgtcgccgaagcgcttcttcatttccagcagctcttccttgacgatggcaagcacacgggcgtcgtcggccagaatggcttcccagttctcgatcttggcctgcaggctggcaagctcttcctcgatcttcaggatctcaaggcctgccaaacggcccagctgcagcttgacgatggcatctgcctgcgggtcgtcaaagccgaactgctccatgatggcagccttggcctctgccatgccgcccttgcaggcgcggatggtggcgatcagctcgtccacgatgtcggtggccttcttcaggccttccagaatgtgggcgcgctccttggcctttttcaggtcgtactgggtgcggcggcgcaccacctcgtcctgaaattccacgtacttctgaagcatctgcttcagggtgagcactttcggcaccttgtggtcgatggccagcatgataacgccaacggtatcctgcagctgggtgtactggtacagctggttcaggatgacctgtgcgttggcatccttgcggatgtccaccacgatgcgcatgcccttgcggttggtctcatcgttcaggccagtgatgccctcaatgcgcttctccttgacaaggtcggccatgttctcgatgaggcgggccttgttgaccatatacgggatctccgtaatgatgatctgggtgcggccgttcttggtttcctcgatggtggcgcggccccgcagggtgatcttgccccggccggtggcgtaggcggcgcggatgccgctgcggcccatgatgatgccggcagtggggaagtccggacccttgatgtattccatcaggccgggcaggtcgatgtccggatcgtcgatataggcgatgcagccgtcaatgacctcgctcagattgtggggcgggatgttggtggccatgccgactgcgatgccctgactgccgttgaccagcaggttggggaagcggcagggcagcacgctgggttccttcttggtctcgtcaaagttggggtcccagtcgatggtgtccttctcgatatcggtcagcatctccaccgccatacggctcatgcgggcctcggtgtaacggtaggcagccggggggtcgccatccacagaaccaaagttaccctgaccatccaccagcggatagcgcagagagaaatcctgtgccagacggaccatggcatcgtagaccgatgcgtcgccgtggggatggtaggagcccagcaccgcaccaacggtgtcggcggatttgcggtagggatggctggggtcgttgccgcgctcgtgcatggtgtacagaatgcggcggtgaacaggcttcaaaccgtcgcgcacatcgggcagggcgcgggacacgatgaccgacatggagtagtccaggaatgcggtctcgatctcctttttcacatcgcggatgatctttttggttccgctgcccggtatcatcacataatcttcttccattgtttcctccaattacacgtccagctttgcgtactgggcgttggtctcgataaagcggcggcgcggctccacctgatcgcccatcaagatggtaaaggcttcgtcggccttttctgcatcgtcaatggtgatctgcacgatcacgcggttatcggggttcatagtggtctcccacagctgttcggggttcatctcaccaaggcccttatagcggttcacctttgcgccgggcatttcctgcgaaagcacggccatttcggcatcgttgtaggcgtacttgatggtgttgcccttctgcaccttgaacagaggcggctgggccacatacacatggccctgctcaatgagcgggcgcatatagcggaagaagaaggtgagcatcagggtgcagatatgggaaccatccacatcggcatcggccatgatgaacactttatcgtagcgcagcttggagatatcgaactcgtcaccaatgccgcagcccagtgccagcacaacgggcatcaacttgtcgttgccgtaaattttatcggcgcgggccttttccacgttcagcatcttgccccacagcggcaggatggcctgaatggcagaatcacggcccatcttggcggaaccgcctgcagaatcgccctcgacgatgaagatttcggtgcggctggggtctttttcgcggcagtctgccagcttgccgggcatccggctggtctccaatgcgctcttgcggcgcaccagttcgcgggcctttttggcagcggcgcgggcgcgggcggcctgggtggccttttcaaagatggcctttgccacgccggggttctcctcaaagaattccatcagcttggagtagaccatgttggaaacaagggtgcggatctcggtattgcccagctttgccttggtctggccctcaaactccgcctcctgcagcttgacagagatcacgcagatcaggccctcgcgcacgtccgcaccggacaggttctcgtccttatccttcagcaggccgtggctgcggccataatcgttgaacacgcgggtcagactgttcttgaagccctcctcgtgggtgccgccgtccggggtgttgacgttgttggcaaagctcagcagcagctcgttgtagctggaattgtactgcagtgcgatctctgccatgccgcggtcggtctggcccttgaggtagatcacattggggtgcagcacgtccagcttgcgcttctcgcccagataggtgacgaagctcttgatgccgccctcgtagcacatgacctcggtgcggtagcagggttccccctccttgccgtcctccagtacgggagtgtacatctcacgctcgtcggtcagggtgatcttgacaccggcgttcaggaagctttcttcccgcaggcgcttttccagcgtgtcgaagtcgtacacggtggtatcccggaacatctccgggtccggcttgaaggtgacccgggtgccggtaacgccgtcggctacggtgccgatgcacttgagcgggccgtccgggtcgccgcggcggaaggtctgctcgtactcgtggccgtcgcggcgcacgttgacggtgagccactcggagcaggcgttgaccaccgaagcgcccacgccgtgcagaccgccggccaccttgtagccggagttctcgccgccgaacttgccgccggcgtgcaggatggtgtagacgacggtgacggcgggcaggccggtgtcggcttgaatgtccacagggatgccgcggccgttatccgtgacctgaatgatgttgtctttcaggatcttgacctcgatgtggtcgcagtagccggccagtgcttcatcgatggcgttgtccacgatctcgtagaccagatgatgcaggccgcgctcgccggtggaaccgatatacatgcccgggcgcttgcgcaccgcctccagacccttcaggacctggatctcgctggcattatactcatggtcggtagcggtttcggcatttgtgctggtaatgatttcttctgccatttcctttctcccttttgttcaatgtttgcatttttgttcgatctatcgtaaaagcagagcatattctccgcctgttggctggtttactcgatcattttttcggctctgcgccgcatggcagcaggcgacagctccgaaagatacaccgtgtccaccacggccccgtctgccagaacatagctctggggcagctcgtccgaaaggctcaccaccgcgccgttcttctgggcgtagttcagaaactcccggccccggggggtgatggtggtggtttccagattgaagatgccgataatgtcccggtcattcagcacgtagtcacggcccagatgaatatacatacagtattttccttattctggcagttcatgcataaaacgccgtttattcaccggcagctgcatgtacttttgcatcatttcttcatgctttgctcagcacaccgccgttcatgcggtacacttcgccgtccgttttcaggaacgcggtatcatcacagctggtcacgaatgtctgcttttccttcatgcgggtgagcagatactgcttgcggccctcgtccagctcgctgagcacatcgtccagcaggagcaccgggtgctctccggtgatccgggcagcggcagccgcttcggccattttcaggctcagcaccacgctgcgctgctgtccctgacttgcaaacacctttgcgggctggtcgtccagcagcagctcaacgtcctcgcggtggatgccgcacaggctctgcccggcgcgcagctcttcgttctggcgctgcttcaaaagtgcggacagcccacccggctcaaactgggcggcataccgcaccgccatgcgctctgccccgtgggaaagctcggcatagttggcgcaggccagcggtgtgagcagggccagatactcccgccgccgcttctggatggcctcgccctgcgctgcaagctccacgttcagcacttccagcagggcgcatttttctgcccacgggcgctccgtgccgcctgcggaatgacgcagaagcgcgtttttctgctgcaatgcccgcacatagcgacggtaggtggcaaggtagccggggtacagctggcacagcgccgcgtccagaaaccgccgtcgtccttccggtgcaccttttacaaggctcaggtgcccggggtcgaacaccacagccggaaagctgcctgcaaggcccgccgcccgcttgggcggagagccgttgaccgatgcataccggccggggcgctgtgcatccggcgtgcccaccgtaatgcgcacatttgccggttcgtccggttcctgatcctcctgccgggtgcgctgggtgacggcctccagtaccgcgaatgtttctccgcggcgcacaagctcggcatccttgccgccccggaagcttttgccgccggtcagtagccagatggcctccagcaggttcgttttgccctgaccgttgttgccgcagatcacggtcagctcccggccaggttccagctgcgctgccgcaatattgcggtaattcgcaacttccagtgaaagcagacgcattactggccctgacccacttccacggtctggccgtccagctcgatcacatcaccggcacggcacttcttgccgcgcatggtgcacacctcgccgttcaccttcacggcaccgccctgcaccagctccttggcttcgccgccggtctcacacaggcctgcatatttcagcagggcatccagcttgataaattccgtatggatgagaattttctgcataatttcgccctcttaatcgttcttgaagcgcaccggcagcaccagatacaaaaagtcgttgccctcggcaggcagcaccttgaccgggctcagagggccgctgatctccatgcggaccttctcggtgcgggcgttgcgcagcgcatccagcagatagcggttgttgaagccgatctccacttcgtcgccctcgcagtcggcgttgaactcgtccaccacgcggccaaggttggtctggcagcgcaccacaactctaccctctgtaaaggagatgcggagaggattttttaaacgctctgtaataatcagcgaagcacgctcgatggtctcgatgaattccttggtgtcgatggtcacgcgggtgcggctgtcggcggggatcacattgcggtagttgaggaactcgccctcgatcagacggctcatgatggtgtagccgccggccataaagaccacatagcggcggttggcgctgatgtgcaccggctcttcgtcgtcgttgggcagcaggtgggcgacctcggtcatggtcttgctgggcacgatgatgcggatatcctttaccgccgtcaccgggcgttccacgatggccagacggtagccgtccagtgccactacagtcagcttgtcgggcaggatctcgaacagctcaccggtgtgggcgggctttttctcgtcctgactgacagcatataacgtacgatcgatcatatctttcagcacgccggtcttgatggtcagggtctcttccgctccggtattgggcagctcggggaaatcgttggctggcatggactggatctcgaactggactacgccgctctggatggtggtcttgccgttctcggcagagaggatgctgacctgaccggcgggcatccggctgatcatgctgctgagcagttttgcattcagcaccacctcgccggcttccttgacattggcttcgatggtggttacgatgcccatttccagatcgtagccggtgaggttgagctggaagccttcggctttcagcaggatgccttccagcacagggatggcagaacgcatggtgacggctttggacacaccatcgatggctgcgctcagcagaactttatcacatacgatgttcaaactgaattctctcctttgtttttcgtttctgatgttgttttgtgtttgaaaacagtttcagaaccggtctatcttattgaacttgttgtagtaaccgtagtagggggtggggaacttgtggaaaaccccgaaaagccttgtcggaatgcgggggttttggtttccacgggattgtgaatgtgttgtgaatggatcgtggaaaggttgggataggtctttctttccacagaccatgtggagaacggaggttgaatgttgaaaactctgtggaaagtgtggaaaggtttgcgtttttaccacaagatataggttctttttccccgttttgttccgttttctccccatattttggggtttcacccataaatgagtacgacttttgcacgatttctgcggtcaggccttcacgttcttgatgatgtcgctcacggtctcgcgcaggtgctggtcgttcttcatgtcacgctccatggtcttgagggagtagacgatggtggagtggtcacggccggagaattcacggccgatctcttccatgctcatgccggtgacctcgcgcaggatgtagatggccacacggcgggcagaggcaacgttggcgttgcgcttggtgccgcggatgtcggcaggggagacgttgaaggtgcgggacacctcgccgatgatcttctcgatggtcacgggcaccggctgggtctcgttgaggatgtccttgatggcattctgggccacactgatgaccggctggatgccctccagcatgtagtaggcgttcagtttttttacagcgccttccagctggcggatgttgttcttcaggtggttggcaatgaactcggccacatcctcgggcaggtccagatgcaaaagctctgccttgcgcttgacgatggccacgcgggtctcaaaatccggcggctgcacatcggcggtcaggccccactcaaagcgggtgcgcagacgttcttccagacttttgatctccttggccgggcggtcggaggcaatgacgatctgcttgtgggcatcgtgcagggagttgaaggtgtggaagaactcctcctgcgtggactccttgccggcgatgaactggatatcgtccaccagcagcaggtctgccacgcggtacttcatgcggaagtcctcggtgctgccggcgcggatggcggcgatcagctcattggtgaactgctcgcaggtaacgtacatgatgacgaaatcggggtgggtgcgcttgatctcggtctggatggccgtgagcagatgggtcttgccaaggccggagccgccgtagatgaacagcgggttgtatgcgccggagggattggccgcaaccgcctgtgcagcagcaaacgcaaactggttggaagggcctttgatgaagttttcaaatgtgaactcgtagttgccctgcggggaggcggggttcgcctcgtactgctgggccagcaccacctcgtgcggcggcgtgctgggcaccaccagcgtgatgtccacgtcgaagcccagcacggtcttgaaggcttccttgagcaggccaaggtagcggtccgtcacgatcttgcagatgaagtcgttgcgcaccgaaagggtgatgtggctggaatcctcaaagctgatcggctccagtccgtcgatatagagattataggtcggctcggccatctgcgttttgcagtacgcctgggcggcctctaaaacgtccttaaaagaatccataaaacatccactccgttaaagttttcaacaatgctgctgatactaggttagtataccacaaaaaacgctgtgcgtccatatttctataatgtaatttataatacataagaaaagcccctgcacggtcgttgtggcatgggcaaaacagggccacaatatcttgtggcaaaagagttttccacggcagaatggtgaaaaagttgaaaatcttttcacaaaaaagtttgaaggaaagcgaaaaaaatgcttgacagaacgccatactatgcgatatactgttgaattgcaagcctgtccccaatctgggaccacatcagaccccataccggggataagtttttacggaggatacaaccatgaagagaacttttcagcccaagaagcgtcagcgcaaggaagttcatggctttctgacccgcatgagcaccaagaacggccgtaaggtcatcaatgctcgccgtgcaaagggccgcaagagcctgactgtctgatccggccttttatgacgggatccggcgcagaaatgaatatgcgcacaaaagaccgctgatattggattagcggtcttattttttttgaaaattgaaagaattttcgtaaaaatgcccgcatgggctttcaaagtcgaaaaatttttgatatactggctgaagaatgcacccttcgggg

SEQ ID NO: 884 - DNA, 6478 bp, unidentified
  source 1..6478: mol_type = unassigned DNA
atgaaagttttaaagtttggaggtacttcagtaggttcggctcagcgaatgaaggaagtggccaaattgattaccgatggtgaacgtaagattgtggttctctctgccatgtcgggtaccacaaacacattggttgagatttcggactatctgtacaagaagaatccggaaggtgccaacgagattatcaacaagctggaaagtaaatatcgccagcacattgatgaactttttgctactccggagtataaacagaaaggcttggagctcatcaaatctcattttgactatatccgttcttataccaaagacctcttcactctgtttgaggagaaggtggtgttggctcagggcgagttgatttccaccgccatgatgaattactatctgcaggaatgcggtgtgaagtctgtgttgcttccggctttagaatacatgcgtacggataagaatgccgaacccgatccggtctatatcaaggataagcttcagattcagctggaattacatccggatgctgagatttatattactcaggggtatatctgccgtaacgcctacggagagatagacaatctgcagcgtggcggaagcgactatacggcttcgctgatcggtgctgccatcaacgcttctgaaattcagatttggacggatatcgacggcatgcacaacaatgatccccgtattgtggacaaaactgcgccggtgcgtcatctgcacttcgaagaggccgcagagctggcatattttggtgccaagattctgcaccccacctgcattcagcctgccaagtatgccaatattcccgtccgtctgctcaatacgatggaccccactgctccgggtacactgatttctaacgatacggagaagggtaagattaaggcggtggctgccaaggacaacattacggctatcaagataaagtccagccgcatgttgcttgctcacggattcttgcgtaaggttttcgagatattcgagagctaccagacttccattgatatgatttgtacctcagaagtgggtgtgtccgtatctatcgacaatgtgaagcatcttaatgaaattctggatgacttgaagaagtatggcacagtgacggtggacaaggacatgtgtatcatctgtgtggtgggcgatctcgaatgggagaacgtcggtttcgaagccaaggcattggatgccatgcgcgacataccggtacgtatgatttctttcggtggtagcaactataatatttctttcctcatccgagagtgtgacaagaaagtggcgttgcagtcactcagcaatgcgctgtttaacggcgaataaatatttttttagggtgtagattacgcggattgtacagataaaaaacaaaaagaatccgtgcaatccgcgtaatccgtgcctaaaaagagttgcaaacacttctttcatttccttttttaaaactaaacaaagattacagctattatatgaaaggaacatttcccatcaataaattccgcgaattgcgtactcccttctattactacgatacaaaggttttgcgtgatacgcttgcctgcattcgtacggaggcggcgaagtatggtaattattcagtgcattatgccgtgaaggccaacgccaatcccaaagtgcttgccattatccgcgagaatggtttgggtgccgactgtgtaagtggcggtgagatccgtgctgccatcaaagccggttttcccactggcaagattgtttttgccggggtgggtaaggctgattgggaaattaatctggggctggattatgatattttctgctttaatgtggagtctgtccctgagctggaaattatcaatgagctggctgccgctaaaggtaaggtagccaatgtggctttccgtatcaatcccaatgtaggtgcccatacccatgccaatattaccactgggctggccgaaaataagttcggtatcagtatgcaggatatggaccgtgtgatagacattgcgcagaatatgaagaatctgagactcatcggactgcatttccatatcggttcccagatattggatatgggtgatttcgtggctttgtgtaaccgtgtcaacgaattacaagataagttggaagcccgtcatatccgcattgagcacgtcaatgtggggggggggctcggaatcgactatggtcaccccaaccgtcagccgatacctgactttaaaagctacttcgagacttacagcagccatttgaaacttcgtccccatcagacgcttcactttgagctgggacgtgcggtagtgggacaatgtggttcattgatttcgcaggtactttatgtgaagcagggtaccaacaagcagtttgccatcttggatgctggcatgacggatttgattcgtccggcactctaccaagcgttccataaaatagagaatatcacttcggatgcgccggttcaggcttatgatgtagtaggacccatctgcgagtcttccgatgtatttggtaaggctattgatttgaatggcgtgaagcgtggtgaccttatcgccctccgttcggcaggggcttatggtgaaattatggcttcgggctataactgccgtgagcttcctcaaggatatacatcggacgagctggtatagagcggctggagacgtgttgcatggatgacgaagcattccaagacctttgtttttgtataaaaaatgttattgtgtgaacaacttttaaggtttcttgttacttttgtaatgatttcaattttaataaatacgattatgattacagaaaaattacagaatgcaattaatgagcagattacggctgagatgtggtcttccaatctttatttagcgatgtctttctatatggagaaagaaggttataacggtatagctgcttggttgaagaagcaggcttctgaagaaaaagctcatgcttgcgaaatggcttcttatatcatcaagcgtggcggtaaggctaaattggataagattgatgttgttcccaatgattttggtactccgttggaagtattcgagcaggtttatgaacacgaatgccgtgtttcaaagatgattgatgcattggtggatgttgctgctgcagaaaaagataaggctacacaagatttcctttggggatttgtacgtgagcaggtagaagaagaagctactgctgctggtattgtggatatggtgaagaaagctggtactaccggaatcttctttgttgatgcaaagttgggagaacgcaaataagaaacaacaaaaaatcccgcggctaatcagtcgtgggatttttttgtttggttataacttataattcacttcagcactccaagctctttccccaccttaataaatgcggcaatacatttgtccagatgttccttttcgtgtccggcagaaatttgtacgcggatgcgtgcctggtctttgggcactacggggtagtagaagccggtaacgtagataccttcttcttgcatgcgggcggcataaatctgggaaagtttggcatcatacagcatgacggcgcagatggcgctctgtgtcggcttgatgtcgaagccagcggcagtcattttgtcgcggaagtaattcacgttttccagcagtttgtcatgcagggtattactctctttaagcatcttgaatacctcgagactggcgccgatgatacctggcgccaatgaattggaaaagaggtacggacggctgcgttggcgcagcaggtcaatgatttccttacgtccggtagtgaatcctcccaaagcgccgccaaaggctttgcccaaagttccagtgtagatgtctacgcgtccgtaggtgccatattgttcgcttacgccgtgtcccgtggggcctaccacaccggcagagtgtgattcgtccaccatgaccagcgcgtcgtatttctcggcaaggtcgcaaattcggtccatcggggcaacgttgccgtccatggagaataccccgtccgtaacaatgatacggaaacgctgtgcttgggcttcctgcaggcatttttccaggtcggccatgtcggcattggcgtagcgatagcgtttggctttgcagaggcgtacgccgtcaatgatggaagcatggttcagggagtccgagatgatagcgtcttcttcggtgaagaggggttcaaataccccgccattggcgtcgaagcaagcggcatagagaatggtgtcttcagtcttgaagtagtcggagatggctgcttcaagctccttgtggatgtcctgcgttccgcagatgaaacgtacggacgacatgccgtatccgcggtgttccataatctgctgggcggcggcaatcagccgcgggtggttggacagtcccaggtagttgttggcacagaagttcagtacctctttgccttttacggtgatggcagcttgttgtgcactctcaatcagtcgctcttccttgtagagtccggcttcttttatttcagcaatagtcttgctgagatggtctttcattttaccgtacatagcatttttattttttaggtaatacgttgtcgttacatttcccacaaagaacatcatttttcttggaataaacaataacaatatggcagaaatatgaaaaaaaagtgtgtatatttgcaccatatataataacgaaaccttataaataactcgtatgaagaatattttggtaattggagctaccggacagattggatcggaactcacactggagttgcgcaaacgttatggcgatgaccatgttgtggcaggatacattccgagtgctatgcccaagggagaattgaaagcatccggtccttcggctattgccgatgtgacagaccgtcagtccatcgaggtggtggcgcgtcagttcaagattgatacaatctacaacctggctgccttgctctcggtagttgccgaaagccgtccggccatggcttggaaaatcggtatcgacgggttgtggaatgtacttgaagtggcgcgcgagtacaattgtgccgtgtttaccccgagttccatcggttcgttcggcgaagctacgcctcacgtgaagacaccacaggacactatccagcgtccgcgtaccatgtatggcgtgactaaagtgacgactgaattgttgagtgactattactatacaaaatatggtgtggatacacgctcggtacgttttccgggaatcatttcgaacgtgacccctccgggtggcggcactacggactatgcggtagatattttctactctgccgtgaagggagaaaaattcgtatgtccggtgaaggccggtacgtatatggatatgatgtatatgcctgatgcactgaatgcggccatctcactgatggaagcggcaccggcaaggctgaagcaccgcaacgccttcaacatcgcctccatgagttttgaccctgaacagatttatcaggaaatcaagaagcatgtgcctgattttgagatggtatacgagattgatccgctgaagcaggccattgctgatagctggcccgactctctggatgactcttgtgcacgcgaggaatgggactggatgccgcagtatgacttggagtccatgaccgtagacatgcttgagaaattgaaggctaaattaaataggtgaccgtaagcggtccgcaaagaatgaaaaaacttttattgggatttttgttactcgcctttttgatttcgtgtggaaacaaaaaggcgaaaatggatccctttgctaccattgcggaaatggtggattcggccggttacaaggccgatacgctgcaggaagcagaagtgaaggaagaaccgaagccgatggtggcagacgagctgtttgatgattttatcttcaattatgcttcggatgatgccctgcaaaggcagaggacggtatttcctttgccctattatgaccgtgatactccgctgaagatagaggcggacttctggaagcacgattatctgtttaccaaggagaactgttacaccttgctttttgataaggaagaggatatggacatggtgggtgatactacgctgacatcggtacaagtggagtggattttcttgaaaacgcgtatggtgaagcgttattattttgagcggaagcggggaatgtggatgctcgaggccatcaacctgcgcgagatggagaaaggtgaaaatgaggacttcgtggaattctatacccgttttgtgagggacagtgtctatcaaagcaagcatatcagccatccgctacaattcatcaccatagaccctgatgacgagttttctatcctggaaactactttggatgtggaccagtggtatgccttccgtccggtaatgcctaccgacagattgtctaatatcaattacggacagaagaatgaggacttgtcggataccaagatactgaaggtaaatggtataggcaacgggtactccaatatcttctatttccgcaaacgcggtaagggatgggagctgtacaaatatgaagacacgagcatttaa

SEQ ID NO: 885 - DNA, 24617 bp, unidentified
  source 1..24617: mol_type = unassigned DNA
tcacagcgaatgactttgaaaaaatgtatggagatgagtcattttatattcaggcagctacagacggagatggagagctgacttataaggtaaaggatgagtctgtggttacggtaagcgctgacggaaaagtcacgatcaaaggaacaggaacaacagatgtcgtgatcacggctgcaagaacagacgtttacgagtgggcatcgaaaacgatccatatcagtgtccggggtgtggtgaagaaaaaatcgcagacgatcaccgtcgcggatattatcagtatctatgaaggaaatacggtagcattagacgctgcaacggatggggacggaacaatttcttatgtgtcagatgataaaacggttgcaagcgtggatgcttccggaaaagtctgtggaataaaacaggggacagcacatattactgttcttgcatcagaaacggaattgtatcatgcatcagagacaatcgtcacagtaactgtgaagcccaaaaagacacagagtaatacagatccggggaaaaaaccatcggataacgtgtcgaaggatgattcacagacaacagaggataaaaaaccttctgatggcggcaacaatacatccgggacaacagatggtcagcagacaaagaagaaacagaccataaaagcaaaaaatatcacaaagacatacagtacaaaaacattttccatcggagcaaagacaaatggtggaggtaaattaacatacaaggtggcagataaaaaaattgcgaccataagtaagaccggaaagatcaaactgaaaaattatggacagacaaaaattacgatcaaagcagccgcaaaaggaaaatataaggcagcaacaaagacgatcacattaaccgtaaaaccggtaaaggtaaaagtaacctctgtaaagcagctaaaggcaaagacgttacaggtaaagtggaaaaaggataagaaggcatccggttatatcattcagtactccacagataagaaattcaaaaagaatgtgaaaaaagctgttgtcacaaaaaaccagaccgttacgaaaaagatcacgaaattaaaaccgggaaagaaatattatgtccgtgtgtgtgcatataaaaattctcacggaaaaaaagtacagggaagttatggtacggtaaaaagtgtaaaattgaagtgatatgcatcggcataaaagtggtaaaggatggagaaacgttatgaaaatgaaaagaatactgactggaatgctgggagcagctattttagctgcaggcgtaaatctattgtccgtacaggcggcagaaaatgcaggagtgatggaatatatagctgcgacagaatacatagaggaaacagaagcagcagagccggaaaatgcagaaaaacaggtgtttgaaactgaagaagatacaaaaacagcagatacgggtgaatttacgatcaacaacggtctgttgacaaaatataccggaacagcagagacggttacaatcccttcaaatgtccgtagaattggcgagtcagcatttcagaataataaatacatcaaaagcgtaatcattccgggaaatgtacggaaaattgaaatgctggcattttatggatgcagcaatctggaaagtgtcacaatggcagaaggtgtagaagagattggtatgcagacattttccgaaactcatttgaaaagtgttgttcttcccaaatccataatcaaaatggatagacttgtgtttacaagctgcaatcggctgataagtattgattttacagagggcacttataatattaatggtgatatcataggttcctgtgctgcgctgacagagataaaggtttcaggcaataatacgagatatcaggttaaagataacgtgttatatgaaaagaatggaaaaacagtttgttattgtccggcaggccgcaagactgatatgaatgtgccggatggagtagagcatatcggagattttgcattctgggattgtcttacaacgaaagttacacttcctgatagtgtaaaaagtattggagaacgggcatttttttcgaccggaatggagacgatgatacttccggcgaatctggagtcgatcggaaaagaagcatttttttattgccaaaatttaaaacagatcacaattccggctaagacaacaaaaataggaaacaatgtgttcggcagctgtgatcacttagagacgatcaatgtggcggcagggaatacgatatacagatcagaggatggcatattgtatggcacagaggaaggcagactcgtgttgattaattgtcctgctgggaaaaaagggaacgtgaagatcttagaggggacggtgggaatccttgatggttccttcagtaactgtgaaaagattacatcggtagatatgccggacagcgtaaagagcattggcgaagatgcatttaaatcctgtctctcgcttataaaagtccggttctcaaatcagcttacggatataggaaactatgccttttataggtgtgattccatgcagcaggtacatctgccggacagtgttaaagatttgggggcatgggctttccggtattgtgatgcgttaacagaggtaacaatttccaaaaatatttcggatattccggagaaagcgtttggtgactgcacaaatctgaccggtattaccataccggacggggtaaaaacaatagcagacgatgcgttttcatatttcagcaatttaacgatatactgtagttcaggttctgctgcagaaaaatatgcgaaaaataaaaatattgaaagcaaggtaactgacgaacggaaaacccagacgattacgacagataatgataacattgaaaaaacggttggagatccggattttaagataactgcaaaaacaaccggggatggaactctaagtttttattcgggaaacgaagatatcattcaggtatctgaaaatggagctgtaaagatcatcggagcaggtacgaccaatattatgatcacggcatctgcgacgcaaaattgtaaaatggcgcagacagaaatttatattacaataaaaaataaagaaacggatcaaaagcgtgtgcaaaagatcacgtattcttatcaggcagataaaaaggatctgaatattttctatcttgacgcaaagtcagatggggatggtaagatatcttaccggtcagaaaacgaaaaaatcgtaaaaatagatgcagatggaaaaggatatatcttaggttccgggacagtaaaaattattatctcggcatcagagacagatacctgtgcggcagcgcagaaaatagttacgttaaatgtagaaaaaataacagatcagacagatgaaccggggcagacacaaaagccggatcagacagaaaagccggatcagacagaaaagccggatcagacagaaaagccggggcagacagatactccgaatcagccggataagccgtcagaccagaacggtaatgccacacagcagaaaaagaaacagaccataaaagctaaaaatattacaaagacctacagcacaaaaacttttgccataggtgccaaatcaagttgtggggcaaaactgacctacaaggtggcagataaaaagatcgcagccataagtaagaccggaaaaatcaaattaaagagttacggacagacaaaaatcacgatcaaagcggctgcaaaaggaaaatataaggcagtaacaaagacgattactttaacggtaaaaccggtgaagaaccagattacttctctgaaatccaaaaaggcaaagacatttgaagtaaaatggaaaaaggacaagaaagcatccggttatatcgttcagtattccatggataagaaattcaaaaagaatgtaaaaaaagttgttgtcacaaaaaacaaaaccactaccaaaaaaatcacaaaattaaagccgggaaagaaatactatgtccgcgtatgctcttataaaaattcccgcgggaaaagagtgcagggagcttatagtaaggtgaaaacggtaaagatccgaaaataattgcaaagagaaaatgataaaaaatcctgccggattggagtgtggactccaggtacggcaggattttttgggtgccagcatttttgcttttataagaataatttgttcttaatatgtgacaagccggtgttctaaagatttaatctcatcgtgcagtataaatctcgatcgcttctgctacaaaagcagcagttccggcaccggcggctttgtcaatattttctgtaaattcggcaccggaagcatacattttaccaagcccgtttaagatctcattggaacattgataaaagtgctctgaaatataatcctgtaggttttttaccagaagctgtacttctttgctgccaggttctttgttctttatttttccaaactctacaaaaatgagcataagatttttccatgctgttttttgtgtctcggaagactgattttttgtcttttcttcatattccttgtattctgcagtctgtccccattgtttttttgcctctctggcatactcgtccattttggctgtgttaaatacgttaaaatccattttatttactcctgtcgttttaattttacgagcaaaagcaatcaagccttcaagatgctcctttttcattgttaacaattcaatctgctgggacagtgctttgtcccgatcaaaatcaggtgcatcaatgattcttttgatttcttttaacggaaattccagttctttaaacaataaaatctgttgcagccgctctaatgctgtatcgtcatacagtcggtagccggacgcagtataaccgtcgggttttaaaagtccgatggtatcgtagtattgcagagtgcgtatactcactcccgtcaatttgcttacttcatttactgtcatcatggtcatttcctccgctcgatgaggacactctaaactattacgccgcgtaggagtcaataggttttttgaaattattttcaggtcatatccgaagtcccattaaaatatatgtatcttcacggattggagtgaatttgttttttgtccagaacgaatagctctgtgggtttcccttgtcaacgccaagccggatttctttatatccagatgatttcagacaaaggatcacgtcgctgatgattccggaaccgacacctctgttctgatagcgtgtgtctgtcataaataatccaatgaaggaaatttctttttatattcatgttcatagatcctccattataatattggggttcaatagtttttcacaacatgatgactggcaaagtgcatctgacatcataagatattgaaatatcgcagattgggcatatggcaaagaaactgtagcagtatacccacaaaaccccctgattttcctgcgttttgggtatatataataaaaacggatctgctatgcccattatcagtgaaaaatcactcaaaattcccgtatttttgggtataaacagcagattttttctgtatatacccaatcgacaaaaattcatgatcaattttcactcaaataacgaccgctgaacgtatttttccggaaaatgatgcagataagcaaaacattcatccggcgaacaaaggatgccagccttttggcattgttccacgatcattggaatgagcattttttcattcgggcttggcaggttgtaggcattaccgtaagtgcggatatatttttccttcatccccggaaaatctttatcgagggcatggtagaaatattcccggtcgccatctcggagagtcacgccaatgccaaagaatataattccctttacgccggcgtccacgcaggcatccagcagattttttatgttatcagcagtgtcattgataaacggcaggatcggtgtgagccacactacggtgggaataccggcttctttacatttcatcaggacgttgatgcgctctttggtggtggaaacatctggctctatctttttacataaatcttcatcgtaagtggtgagtgtgatctgcacgatggcttttgccttttcattgatggacgttaacaggtcaaaatctcttaaaatccgggctgactttgtctgtaccgcaacaccaaattcataccggtcgatcagctctaaacaccgcctggtcagcaaaaggcgctcctccaaatgaagataaggatcgcacatggcaccggttccgatcatacatttctgacgcttcgatcgcaaagccttttctaacaattccggggcattttcctttacctcaatatcttcaaatgcatgtgtaaaaccatagcacctgctccggctgtcgcagtaaatgcatccgtgggaacatccacggtaaatattcattccgttatcctttgataaaagcctcttcgcctgaacaaaatgcatgagaaatctcctgtagttaaaattaaaaatccgattaatcccattaaaacataagtaaagaaaaatcacaatcaagatcagaacaaaaaaataatgaggaaacagtcgtaacctacagagcatagatttcccttttttcggtatcgagggcatgtagaatgcagttttccgggtgccgccggcagatttgagactttggaagaaaattagaaaatcttagtatgcctgtttactcacagtgttgtgctgccatggacggcagcacaagtcctgatgtgccagggaaggcacattcaggacgtacacgtcactccgaaaccaactcaaacaggcatacttagcttttcttattttcgcacaacggaaccaaacctgccagcggcacccggaaaactgcgccttacactgtcccttaatacctaagtaccattttgcaaaactttaccaaattaccttgacaaatatttccatcagtcatatactttgaaaagctaattatttgactgtcaaactatttgaaaggcaaatgattacatgaatcagaaaataagaaaagaaaatcagcccacaatagaaataagggcaaggcgctggaaaaataataaggcatgcgcagaaaaggagaaaaatatgttagagaaaatgatcccgattattgcagagcagttaaatgtgaatgagtctgaaatcaaggcagagtccaatttcaaagatgacttaggagcagattccttagatttatttgaacttgtcatggctcttgaggaagagtttggcgtggagattccatctgaggatttaccttctatcgtaactgtcaatgatgttgtcgagtacttaaaaggaaaaggtgtggcttaagtatggagacaagggtaagtaaactgctgggaacgaaatatccggtcattcagggtggtatggcatgggttgcggaatatcatcttgcagcggcagtttcaaatgccggaggtttaggtatcattggagcggcaagtgcaccgcctgaggtggtcagagagcagatcagggaggcaaagaagctgactgacaaaccgtttggcgtgaacgtcatgctgttaaatccaaatgcagccgaggttgcacagatcgtcattgaagagggcgttaaggttgtgaccacaggtgccggaaatcccggaaaattcatggatgcatggaaacaggcaggcgttgttgtgattccggtcgttgcgagtgttgcaatggcaagaatgatggagcgtggcggagcggacgcagtgattgcagaaggaatggaatcaggtggacatatcggtgcgcagacgacgatgacacttgttccacaggtggcagatgcggtacagataccggttattgccgcaggcggaattgcggatggcagaggtatggcggcggcatttatgctcggcgccgaaggagtacagatgggaaccagatttgtggttgcaaaagaatccatcgtgcatccgaactataaagagcgtgtcatcaaggcaaaagacattgactcggaagtaacaggcatgagtaccggacatccgatccgggttcttcgcaaccagatgagccgcgaatatttaaaaatggaaaaagagggcgcttcatttgaagagttagagcaccttacacttgggtccctgcgcaaggcagtcattgacggtgacgtggtcaacggaagcctgatggcaggacagagcgccggcatggtaaaaaaagaagaaagctgtaaagagatcatcgaggacgttgtgacacaggcggagtcactgcttggaagatagtgcaaaaataagcgcaagaatggagattaacatgggaaagacggtttttatgtttcctggacagggagcacagtacataggaatggcaaaggatttttacgatgccatcccggaatgcagagaagtatttgaggaggcatccgaggcgtcaggacttgatatcgctgcgttatgctttgaggagaacgacaagatcaatatcacggagtatacacagatctgtatgctgaccgccgaggctgcgatcctgcgtgcattggaggtaaaaggctataaagcagatgtgactgcaggcttaagcctgggagaatatggagcattgattgcctgcggagcactgagcagaaaagatgcatttgcactggtgcgcaaaagagggatctacatgcaggaggcagtgccggagggcggagccatggcagcagtcctggcactggataccgcgcagattgaggaagcctgtaaaaaaacagagggcattgtatcgatcgcaaactataactgcccgggacagatcgtcattaccggagaagaaaaagccgtagcggcagccggagagctctgcaaagaagccggagcaaaacgtgttgttccgttaaaggtcagcggaccgttccactcagcaatgttaaagggtgccggagaaaaacttggcgaggaattaaaacatgtaacagtccatacaccggcaatcccgtatgtcgcaaacgtgacagcagactatgtgacaaaagaagaggagatcaaaccattactggaaaaacaggtgtcctcatctgtccgctggcagcagacgattgagcgtctgatcgcagacggagcagacaaatttgtagagatcggaccggggaaaaccttgacaggattcatgcgcaagatcaaccgtgatgtagctgcagtcaatattgataaatatgaagactttgagaaatttgttgctgagagcaaaaataaataagatatgccacatattttgatgtgaaaaaagtttggcagctatcagaaaaaaggagaagttatgttaactaataaaacagcactggtcaccggtgcaagccgcggcatcggagctgcaatcgcaaaaagccttgcaaaagaaggtgcatttgtcatcatcaattacaacggttctaaagagcgtgcaaatgctgttgcggcagaaatcacagcggatggcggcaaagcggcagtttacggctgcaatgtatctgattatagtgcctgtgaaaaaatggcaaaagacatcatggagacatacggtcatctggatattctggtcaacaatgccggtatcacacgggatgatcttttgatgaaaatgagcgaggaagcatttgacgcggtcattgcgacaaacctcaagggaacttttaacacgatccgtcatttttcacgctatctgttaaagcagcgttccggaacgatcatcaatctatcatccgtatccggtattcttggaaatgcaggacaggcaaattacagcgcgagcaaggcgggcgtgatcggactgaccaaaagtgtggcaagggaactttcttcccgtgggattacctgcaatgcggttgcgccgggattcattgatacggaaatgacagcgcagatgacagacaaggcaaaggaagcagtgaaaacgcagatcccgctcggcagagtcggaaaagtggatgatattgcggaggtagtgacatttttagcctcggagaaagcatcctacatcacaggacaggtaatttccgtggacggcggtatgagcatataagcagtaaaaacattttgaccgcatggtattgtgtcggatcaaaaaggaaaagcctgaatttggggcttgaaaatggaaaggaaaagttatgagcagacgagtagtggtaacaggaatgggcgcgatcactccgatcggacttagtgtagaggagttctggcagtccataaaagaaggaaaaatcggtttcggggagatcacgaaatttgatacggaaggatacaaatgccatcttgcagcggaagtcaaagatttcgatgcaaaacagtatatggatgcgaaagcggcaagacgtatggaattattctgccagtatgcagtggcagcggcaaaagaggcgatcacggatgcagcgcttgacatggaaaaagaagatccttaccgtgtcggtgtatctgtcggaaacggaatcggaagtcttgggggaattgagcgtgagcataaaagactgttggaaaaaggaccgtccaaagtaaatccgctgttcgtaccgcttgtcatttccaatatggcagccggaaatgtctcgatcgcattcggtttaaaaggaaagagcatcaacgtggtaacggcatgcgcaaccggaacaaacagtatcggtgaggcattccgcagcatccagtacggagaggcagatgtgatggttgccggtggaacggaaggtgcgatctgcccgcttggaatcgccggattcacttcactgacggcactttcctccgagagtgacccgacaaaatgttccattccatttgataaaaaccgcagcggttttgtgatgggagaaggtgcagcgatcgttgtgttagaggaattagagcatgcaaaagcgcgtggggcaaaaatttatgcggaggtagccggatacggaacttcatctgatgcatatcacattacctcccctgctgaggatggtgccggtgcagcccgcgccatgacgaatgcggtggaagatgcaggcatccgtccggaagaagttacctacatcaatgcacatggaacatccacgcatcacaacgacttgtttgaaacgcgtgcgatcaaactcgcttttggcaatcacgcatatgatatgaaagtcaattccacaaaatctatggttggacatctgctcggggccgccggtgctattgaatttgtaacctgtgtcaaagaaattcaggacagttttgtacatgcgaccgtcggttacacgacaccggatgaagaactggatcttgattactgtaaagaggcggtacagatggatgtgccgtatgcactgagcaactcacttggtttcggcggacacaatgcaagtatcctgctgaaaaaatacagtgaataattgggaggaaatgcctctgctcaccagtgggcaaattttattttggaaaacagggaggcaattatgtccgttttaacaacgaaacagatcatggagatcattccgcatcgtcagccgtttttgctgatcgacacggtggaagaattagaatccggcatgcgtgccgttgcaaaaaaatgtgtcagctacaatgagccattctttggcggacattttccaaatgagccggtcatgccgggcgtactgatcattgaagcactggcacagaccggagcggttgcaattctctcggtggaagaaaaccgcggaaaaactgcatattttgcgggaattaattctgcaaaattcaaacggaaagtagtgccgggagatgtgttgatattggaaacagagatcataaagcaaaaaggcccgatcggtgtcggccgtgccacagcgaaggtgggggatgacattgcatgtatcgcggagctgacatttgcgatcagttgaagttaagagagtctggaacagcgcaggtttgataaataactgtaaacaggcaaaaaggggaaagtatggcagcattttttttgaagaagaaaaaagaagtaacagagacggtagaagaaccacagaaaacggtagaggcagcaaaaaaagaggcagagacagttaatacagagccgccggcaacgatcgtctgtccggcttgtggcagagagatcaataagaaaaccgcggaaaaaaataaatatgtctgttatgagtgcggcaattatttccgcgtccgtaccaaaaacaggatccgcatggttgcggataaggatacctttgagccgtggtttgaagaattggagtcaaaaaatccgcttgattttcctggatatccggagaagatcaaagccgcacaggaaaagacaggactgcatgaggcagtcacagtcggaaaatgcaggatctatggacttgagacggtgatcggcgtgtgtgatgcccggtttatgatgagcagtatggggcatgttgtgggagaaaaaatcgcacttgcggtagagcgtgcgacagaactttctcttccggttattttattctgttgttccggtggtgcaagaatgcaggagggaatcgtttccctgatgcagatggcaaagacagcagctgctttaaagaaacattccgaggcaggacttttatatgtgccggtgttaaccgatcctacgaccggaggtgtgacggcaagttttgcaatgttaggagatattatccttgcagagccgggggcactgatcggatttgcagggccgcgtgtcatcgagcagacgatcggagagaaactgccggagggattccagagggcacagttccagttagagcatggttttgtggatgcgatcgtggagcgtaaagatttaaaaatgacactttaccgcatcttaaaaatgcatcagaaaacagaaggatatgcaaactttgatccattgcgcagtgatgactgttacgagccgacagaggtcatgaaagagcgcgccacaaaggcacagcctctttccgcatgggaaaaagtgcgtgcggcaagacgtgcagaccggcttgcatcggtggattatatcgacaatatttttgacgacttcatggaatttcacggagacagacagttcgcagatgacccggcaatcgtgggcggtgttgcctaccttgacggccagccggtcactgtgatcggtattcataaaggaaaagatttaaaagactgcatgcgtcacaattacggaatgccgtcaccggaaggttacagaaaagcactgcgtctgatgaaacaggcagaaaaattcaaccgtccgatcatcacatttgtgaacacatccggtgcattctgcggaaaagaagcggaagaacgcggacagggtgaagcaatcgcaagaaatctctatgagatgtcagccatcaaagttccgatcctctgtctgatgatcggagaaggcggaagcggcggtgcgcttgcactgtcggtcggcaatgaagtctggatgcttgaaaatgcaacgtattcggtactttcgccggaaggatttgcatcgatcctctggaaagatggaaaacgtgcaaaagaagccagcgaggtcatgaagatcacggcgcatgatctgtatgcgttaaatattgtggagcaggtaatcccggagtatggcacggcagacgaaaaagcatgtgagtcaatctcaagatatatgaaaggccatatgaaagaatttttagagcgtcagaatggcaagacaggagagcagcttgccgaggagcgctatgcgagattccgtgcgttctgataaaaaggttactggattattttacagagggcagatggaaataaaataaactctggaatgaggaaaaagtatgaaaatcaaaatcaagggaaccggaagtgcggttccaaaacttcgggtgacaaacgatgatttaagtaaactgatggacacctctgacgagtggatcagaagccgtaccggaatcggtgcaagacatcttgcggtggaggagacgacgacagggcttgctgtcgcagcagcaaaggaagcgttaaaagatgcggaaatgactgcggaagaacttgatcttatcattgcagcaacggttacggcggataagtttctgccgaacttatcctgtgaagtgcagagtgcgcttggagcaaaaaatgcagttgcatttgatttaaacgctgcctgctccggatttttgtttgcgttaaatacggttcagatgtatctggaaaatggtgtatacaaaaaggcactggtcattggagcggaaactctttcaaagatcatggactggaatgacagaagcacctgtgtattgtttggggacggtgcaggggcggcggtcgttgaggtggattccgaaacaaattgtaaagcaaagcagccgggtgcagcaaacaaaagcggcattctaagcatggtacagggttccgacggcgcgcggggggaagtcctccgctgtgataaccgtccggtcaataatccgtttgcggtcaacgatacgaaactttcctatgtgtcgatgaatggtcaggaagtatataaatttgcagtcaaaacggtgccaaaggtgatagaagaggcagtgaaaaaagcgggacttgaagtggaggatattgatctgttcgtacttcatcaggcaaatctgcgcattattgagtctgttgcaaaaagactgcatcagccgatggaaaagtttcctaccaatctggaagagtgcggtaatatttccgcggcgagtgtgccgattttgcttgataatatcaataaacatggtatgatatgtgaaggtaaaaaaatagttttggcaggatttggagccgggctgacatggggcgcgacggttttggtatggtaagggcagcagtaaacagactggctgcagtttacatatgtgtgaaaggcaatcagtactgccatgaataggagtatatttgaatgacggcagatgaaacattaaatgagttattggtaaaattgtttaaaaacattatggagattgagggaaaatctctgatcacggatgaatttaaggatcttacctataatgattttcatgtaatagaagcgattggaatgtcagagccaaagagcatgagcacggtggcaaagctgatgaacgttacgaccggaacgctgacaaaggcgatggacggtctgaccgataagggatatgttgtcagggagcgcagcaagcaggataagcgtgttgtctgggtatgcctgaccgaaaaaggaaaggcagcttatctgcatcatgaagagtttcatcaccgtatgatcgaccacattaaggaagaacttaacgcacaggagacaacggtactgatctattcactggcaaaactggtggattttttccagcaggtatacggggagaatgaagaatcgtagagggtttggacaaagttatggatattatatagatatttgtggatgtttttcggaaacgggaggcatcctttttctttatagaagaatgccagggcagatagtgcttttcaattttctgataacacagtcatgatatattttctcaaataaatgttgtaattacaacatacaatctgaccgaaataaattaatatgataccagagacaaggacatcagtgtgaaaaataagatttttcacacgcaggatttgtgcttgcgcacaaacttaagatgcgcaaaagcagcgcaagaatggaggttttcatgaaacagttagaattaaacaacagaaaagtggcagtgatcggatgcggatttgtaggagcgacatcagcgtttggactgatgcagagcggattgttttctgagatggttttgattgatgcaaatacagagaaagcggaaggggaggcaatggatatttcccacggaatcccgtttgcaagaccgatgaagatttatgcgggtggttatgatgatattatggatgcagcaatcatcgttgtgacagccggtgcaaaccagaaaccgggagagacgaggctggatctggtacagaaaaatgttggcatttttaagagcatcatcccggagatcgcaaagagagattatcagggaatcctgcttatcgtatcaaacccggtcgacattcttacatacaccgcacacaagctgagcggaatgccggaaaaccgcgtgatcggttccggtacggtgcttgacacggcacgcttaaaatatgagctgggagagcatcttggtgtggacagccggagcgtgcatgcatttatcatcggggagcacggtgacagtgagatcgcggcatggagcagtgcaaatgtatcgggaatcccgctaaatacattctgcgagatgcgcggacatttcaatcatgatgactcgatggaacgcattgctgcaaatgtgcgcaacagtgcctatgagatcattgcaaagaaaaatgcgacctattatggaattgcgatgtctgtaaagaggatctgcgaggcaatcgtgcgcgatgaaaaatcaatccttccggtttccggtatgatccatggaatgtatggtgtggaggatgttgtcttgagcatgccggcgatcgttggaaaaaacggaattgagagacaggttccgatttctttagatgaggatgagcagaaacagcttcagaaatcagcacagatcttaaaggagatggcagagcaggttttgtaatttttgaactccctttttacaaaagtgtgtctgatgcatactaactcataattatacgaaacaccacacttttattcattttctattcatttcttactaatgggtattcatttttactctaggttgtcgtgcaatttattagaatggaatttttgaaagagccagcaccttgaatgggctgactctttcaatgtcacctgtaattaacaaactggaatttctcacttcttcattttaggtgcaataagcaacactactgtcacaagaaaatatacaccatacatcaaccatgtaatagtattgttcaatggaaaactcatttctggatgattcaatgcaaacattataaatacaatggctataatcagcatgatcaaaccgataatccttgatatactctttttcatgtaaatcaccttctcgtcaaattatagttatctacgtattccatcatcattaaaatgtttttttaaagctttctctgtcggataaattgatacaatcataataaagcattgaattgtcacaagaatcaaccctgcaaatccaatcgtattcttatcactatgatataacggaatatgtatcaaagcagatggtataatcattatccatccaattttccaccaaagtcttccgcagtagtcattcgcaaatttccatgtatccatatttttcattgagcgagttgttctgtagcctgacatactattcatatgttttggacaatgtttccacatcattcttccacaaatgaccatagcaataggaattatcagatcacatattaacataaaccaccaaaaccacataaaccgcacctctcttcacgcatcaatttgtataacagtagtctaacacatgttgataaaaagtactatatacaaactaatgtccgtgatttgctttccataaaaagttcctttcaaaaataaattatattttctagagagatgagcaaaacgaattgatttaaaagttggatttggcagttagcttttgtaaaaccgaaagaatgggaatttttgcatggatcgtgtttggcgtttttattatgctgtatcggttaaatctgaaagatgtatgttccatgcaaaaacgtatggaacaggggaaacaccggttgactttccgggaggaaatcggacagctccttgataagaaattttacatacttgtgctggcactgccggtactgggggtatgtgtatttaacattttaccgattgtatttatgatcctgatcgcatttacaaattatggcggggatattgtaccacctcaacagcattgaattattttgccggacttggtctggcattattactggataaagactgtgtaaaaggaaaagcattctggagggccggttaatccagcttattgcagcctgtgggaaaagtgccattggatttctggatttggatgcgaaatggagtgcaaggctgatcggactttttgtgaattgctggatcagcgttccatccatcatgttacttgcaactggaaatctttctaacagggatgtttctttatatgaagctgcaaagatcgacggggcaggcagatggaaacagttcgaaaaactgacaatgccttttatgctgttttccacgatgccggttttacttggacagtttatcggaaatttcaataactttggtattttttatttcctgagaggaggacacatttcaatgagtaaaaagtggaaattcggcagaatgatggatacaggcataacatatctgattctcaccgccgtagcatttgtgtttttttcccgtgtctctggctgatcctggcatcgttttcaaaatcgggaaccatttattcatttaacggttttttcccaaaagaatatagttttgcaagttttcagaagctttttactgatacgacactttataactatccgagatggttttttaatacactttttgtggcagcgggaagctgtatattagggacatttcttgtgattttaactgcatatacaatgtcaagatttacatttgcagccagaaaaccaatgatgaaaatcacgatggtacttggaatgtttccatcttttatgggaatgatcgcagtttatcttctgatgacgcagtttaacctgatcaatcatttgtggggcttaatcttgatttatgctgcaggtgcaccgatggggtatctgacacagaagggtttttttgatacgatcccaaaagcaattgatgaggcggcaaggatcgacggtgcaacaaattttcaggtgtttacaaggattaatctgccattatcaaaaccgatcattgtatatacggcgttgccatcttttacatggccgtggagcgattttattttaccgaaacttctgctgaaagaaaaggatctttacaccgttgcagttggactgatgagcttagatgaaacggagtttgcaagattcgcagccggaagtgtttttattgcagttccaatcgttatcctatatttctttcttgtaaaaaatatggtgaacggcatggcgcagggagcggtaaaaggttagatacggtttacaatcagttattgttgaatccgttttttcatgttaaaatgggcgcaggcattgcaatgacatttccttagcagtttaagggatgacaagacttttcggaagaaagtgcctgtgacaggatgtttacgaaagaagacggaggaacggtatgagtaagggaatcgcgggaaaaaataactgggcattgtttttactattgctggcagggatcgtacttggaggttttatcggaagccttgcagcgggagtgccatttttaagctggctgaattatgggcagacatttggatttgcaaatccaatcgtgctggatcttggaatcctggtcattacattcggactcagtatcaagattacgatcgcaagcattattggtgtattaatcgcaattattatttatcggtttttataaaaaataaaagtttaaaatgcaggtacagatggggcgcctgcattttttaatgccagatgattgttcatcaaaacggactgtgttatagtaataaaaaatatcacaaggggggaattcgggtgaaaaaattattattaaagaatgcagtgatgctggcaatcgttatattctgcattggttccgtcaactgttatgcagccaccagtacggggatcaatgtcaattatcacagccagaaggaaattaaggattacctgaaaagtaaaaaggtaaatattgacgcagagacgacctacagtaagaaggcatcggatgtaaagccgtatcaggcgggtacgatcagtgagagcagtcagaaatcagcattaaataccatgaatgcgatccgttatattgcaggaattgacgcagtggggcttgattcttcttataccaaaatggaacaggcggcagctttggttaactcagcaaatggaaccttatcacattttccatcaaaaccggcaggaatggccgacagtctttatcaactgggggcgtccggtgcatccagtggcaatctttcctatgcaagctggaaatgcggactcgggtatcatctggtaaaagcatggatgaatgatggtgatgattacaatatagaccgcgtcggacacagaagatggattttaaatccgccgatggaaaaaacaggatttggctgggtatatggatcacatggaacttatgcggcgatgtatgcatttgacaactggtatgaaccgacggattattatggtgtggcatggccggcccagaatatgccggtagagttttttggcagcagttatccatggagcatcagcatggggaaagatgtggacaaatctgctgtgaaagtgactctcataaggcagtcggatcagaaaaaatgggctttttcagaaaagaaagccgatggctattttaacgtggaaaacagtaattatggacagaaaggatgcattattttccgtccggaaaatctgagttatcagccgggagatacatttgaagtaaaaattacaggacttgaccagaaagtatcttatacagtgaaattcttttccataaacagtgcggcagagtcagatgaaaagcagaaagaatcgaagatcacggcgaaaaacatcacaaaaaccttcagcaccacaacattttccatcaatgcgaaaacgaatggaaaagggaagatgatgtataaggttgcggacgaaaaaatcgccgctgtaagtaaaaaaggtgtagttacacttaaaaattatggagagacaaaaattaagatccgtgtagctgcaagtggtaattataaggcggctgaaaagacgatcacgttgacggtaaagccggtaaaagcaaaaacgggttcgctgaaatcgactgcaaagggcagttttgcgttaaagtggaaacaggataagaaggcgaccggctatatcatacaatattctaccgataaacgttttgagaagaatgtgaaaagcacaacagtttcaagtaacaggacgacatcgaagaagattggaaagctgaaagccggtaaaaaatattatgtcagaatctgttcctataaaaaatcctgtggaaagaatataaaaggcgcttacagtgacgtaaaaaccgtaataacaaaaaaatagacaagaaaacgataattagatgatataaaattttttgtggaaaatgaataattgaacctgaaatcctgcaaaaaatggcttgttacactgtgaaactttaataatttagtgaaataaagaaaaaaatattgcacatggattcattttataataaaataagtgtgtcaaaacgaaaccagcgggagaaccgttaggagcatgcagtgtaaagcacattgtatggagtatatactaaattaagtaaggagagattgtaaaatgggatacgttgatgaagtactcgaagtagtaaagaaaaaaaatgcagatcagcctgaatttttacaggcagtaacggaggttcttgattccttaagacctgttattgatgcaaatgaagagttatacagaaagaatgcaatcttagagagaattacagagccggatcgtcagatcatgttccgcgttccatgggtagacgacaatggacaggtacaggtaaacagaggattccgtgtacagtttaacaatgcgatcggaccgtacaagggcggcttaagacttcatccgtctgtaaaccttggtatcatcaaattcttaggatttgagcagattttcaaaaactcacttacgacacttccaatcggtggtggtaaaggtggttctgatttcgatcctaagggcaaatcagacagagagatcatggcattctgccagagctttatgacagagctgtcaaaatacatcggagcagatgttgacgtacctgccggagatatcggaacaggtgcaagagagatcggtttcatgttcggtcagtataagagaatccgtggttccttcgagggagttcttacaggaaaaggacttacttatggtggatctcttgcccgtacacaggctaccggatatggtctgttatacctgacaaacgcattatggaaagatcacggcatgagtcttgaaggcaagacagccgcagtttccggatctggtaacgtagctatctacgcaatcgagaaagcacagcagttaggcgttaaagttgtaacatgttctgattctacaggctggatctatgatccggaaggaatcgatgttgcattattaaaagaagtaaaagaagtaaaacgtgcacgtttaacagagtacgctgctgcaaaaccatctgcagaatatcatgcaaaacagaatggtgagcacggtgtatggcagtacaaagtagatttagctcttccatgtgctacacagaacgagttagaccttgaggatgctaagatgttagttgcaaacggtgttacttccgtaacagagggtgctaacatgcctacaacactggaagctaccaaatacttacaggagaaaggtgttctctttgtaggtggtaaagctgccaatgccggtggtgttgctacatctgcacttgagatgagccagaactccgagagactttcctggacattcgaagaagttgatggaaaactcaaaggaatcatggagacgatctacgctaacatttctgacgctgcaaagagatacaatgcaactgttggtggacagactgactatgttgccggtgcaaatattgccggatttgagaaggttgtagatgctatgttagctcagggtgtttgctaatcaattagcagataagtcccgattacagctaaataacgattgagaaatgtccccgtatattgctggaaacggtagtatacgggggttttatttgtattaggggtagctagtgcagatgttgtaattatgcataaaattttcagaaaagaatttgctttgtttgacataaaaagacggtgttcatataataataatagtacccagacagataaatttgtctgggtgcgctgacaccttaaaaatctgacattttagccagttcgtaggctggcaggttggggagcaacagaaaaactccacagttaagccgcacatggagaggcggacggttggcagacaacagaaaatcagcattaaaagaaaagagaaaaggttgtccgaaagggcagcctttttcaagttaatggggtatggatggcaaagtatgacaagaaagcagctttaaagattatgatagaagctgtaaagcaatacgaagaaaaactgaatgataaacagtttctaatcatatatcgggaaaggaaagatataaagacagtaaatgtaggatttcgggatatgaactttttacatatgactggtgtgaaaacaagattgtctgcacaacaattttatgcggcttgcctggaatcaaaactttctgagtatgatttcgaaattgataataaaggaaaagtgcaacagaaattaatggtgttaccatatctggcgaagaaccagagtatgcatgaacttagggtaagtgatgaaatatttgaaatgattttagtggatgaggaatgaaaatagtaaggttataactcccttgttgtccaacccccgaaatggtagtataatcaaaatacacaaatcaataaacaaatgggggcaacacatatgaacattttattttttctgacaccgaaggaggacgtagcacatgtggaagagacggacaccatgcgtcaggtgcttgagaaaatggaacatcacggttacacagccattccgctgcttggtgtggaaggaaaatatattggtacgatcacagagggagatctgctctggtttttaaaggaccgcaatttcccggatctgaaactgcttgaggatatgccgatcacgtcgatcgagcgtagaagggataatcaggcggtaaagatcgatgaatccatggagaatctgtttgacaaggtaatgaaccagaactttgttccggttgtggatgataaaaaggtgtttatcgggatcgtgaccagaaaagatgtgctggcatatcttgggaagaaagcggctgctcaggcgtaatgataaaccgtccgtttgcggcgctgataaaaaatcgataaaaacagtgtcacaaactctgccaccgggattgcaagccacacaccggtcacccccaaaatggctggcagtgtgaggagtgacagcaggataaaaacaaaggttcttgtaaaggatatgattgccgaggttttaccgtctgagagtgccgtaaagagagcggatgaaaaaatgttataaccgctgaacaaaaaggtcacacagaataccgaaaaaccgctgacggcaaggtcataagtcgctgtttttccacccacaaacaaaagtacgatcggctcggagagcaggttacagcaaatagtaattataatagaagaaacgatcacgaagcgtctgcagattttgcagacgcttttcagtccgcctgtattttttgcaccgtaattgtaactgatcacaggtgcaacacccatggaaaatccaagaaaaagcgcattaaataaaaattgggaataaagcagtatcgtgattgcggcaacaccgttttcgccggcaaggcgcagcatgatcttattgaatgcataagtgatcacggcgtttgcaatgtttgtcaccatctcggatgcaccgttaaaacttgcagcggaaaggacacttccatgaaaatgaaattttgtaaaataaagatctcccttgacaaagaaaaag

SEQ ID NO: 886 - DNA, 10082 bp, unidentified
  source 1..10082: mol_type = unassigned DNA
atgaaacaatataccgcaaccgccaacgacgacggcgttcgtctttcccgctttgtgcagagcgtgacccgcgattttcccaccagccttttgtacaagagcttccgcaataagcgcgtgaaggtaaacggaaaaaaggccgtgccggagtaccgcattcaggcaggcgacctgatcgagctgtacatcaacgacgagtttttcccgccggaaggcgcaaaaaccgtgcagaaggccgcgccgaaaaaaaagcagaatcagcccaaggtcaatgtcatttatgaggacgaaaacattgctgtgctgtacaaacccacccaccttttgtgccacagtgaccgcaccggcgatgcaaaccttgtggacgcttttacccagtatctgtccgaaaaaggcgagtacgatccccacggcgagaaccggttcaagcccggcatttgcaaccggctggaccgcggcaccgagggccttgtgatcgccgccaagagctacaccgccctgcgggacatgaacgagatcatccgcactgacctactcaaaaaggagtactacaccatcacggtgggtatcccgcagtccgggcggttcaccgcatggtgggagcacgacgagaagaacaacaaggtgagcatccatgcacaccagtcgcaggacgagcgccgcaagcagatcattacggacgtggacgtactgcgcaccgccgggccgttcgccctgtgcaagatcggccttgtcaccggccgcacccaccagatccgtgcacatctggcctatctgggccgtccggttctgggcgacatcaagtacggcaaccgcaagatgaacgagcgcaccggcaccaaaacgcaggccctgtgcgctgtgcgggtcactttccttgatattcccgaggaaaacaccctgcattatctctccggcaaggtcgtcaagctgaaggacccgcagatcataaagcagttcgatgcgctggataaaagcaaggcggatggagaaaacgaccatgcataaaatcgacatgaacacgtggccgcgggcagagctgttccggttcttttccggagtgtcgcagccattttacagtgtcaccttccgggtggacgtgacgaatctccacgcctacaccaaagcccgcggcatttccttttattatgccctcggctatctcgtgaccgatgccgtgaacagcgtggtgaatttccgctataccatccggaacggcgaggtctggcttctggataagcgcatccccagcctgaccgacctgaagcccggcagtgagcagttccacatcgtcacactgcccaagaccggcacgctggacgagttctgctgcgctgcaaaagctaagagcacagcacagcagagctttctggatcaggactgcgagacggacgcgctgatctacatttccaccacgccgtggtttgatctgaccagctgcaccaacgagcgggattttgacaaagacgatgccatcccccgcatcacatggggcaagtatgtaccggaaaacggccgcgaaacgctgggcatgagccttgaggtgagccaccggttcatcgatgggtatcacctgggacagttttatcaaaaacttcaaaaaagcattgatgaattgtaaaaaacggccgctgtactttaccgtacagcagccgtttttctctttgttctttactttttgtcggagtcctgctccgccttttcctgcgattcctgttcacggcgcagctccttgatgcgctttctctcgctctggacatggggccatggccagctgaagccctcgttctcacggcaccatttgaccagcggatagaaggcgaaagccagaccgaagaggtacagcagagcgtacagcagggcatccagcgtgatgagtgcatccagtgcaccgatcaccgccaccacgcagcctgccttcaaaaagaacaggccgttctggcggcagtattcctcaaagtgctccgccttgacggcacggcggccctgatctccccagacacggggatttttcatgaccgaatagccgtagaataccatcatcaggccaagggtgagctgaaagccaaaaaacatttatgatccctcttaatcttcaaacagcggcttcatcaggggcaggaaatccagcgttgcaaagtaatcgcgcggagtctcggcacggcggatcagacggtgggtgccatcctcgcacagcagcacttcggcgctgcgcagcttgccgttgtagttgtagcccatggcagagccgtgtgcaccggtgtcgtggatataaacgatatcgccaatgtcgatcttgggcagcatccggtcaatggcaaacttgtcgttgttctcgcacagaccgcccaccacatcgtacatatggtcgcaaggctcattttccttgcccagcacggtgatgtggtggtaagcgccgtacatggccgggcgcatcaggttggctgcgcaggcatccagaccgatgtattccttatagatgtgcttttcgtggatggcagttgccaccagtgcgccgtaggggccggtggtaaagcggcccatctcagtaaaaatggccacatcgcccatgcctgcgggcaccagaatttcctcaaacttcttgcgcacaccctcgccgatggccatgatatcgttctcggtctgctccgggcggtacgggatgcccacaccgccggacaggttgatataaccgatgtgcacgccggtggccttctgcacccggacagccagctggaacaggatacctgccagctccgggtaatactcatcggaaatggtattggaagcaaggaaagcgtggatgccgaagttcttggcacccttggcggccagcttcttgtagctttcgatcatctgctcctcggtcatgccgtacttggcatcgccgggcttgtccatgacctgaaagccctcttcgctctcgcccagactgaaggttccgcccgggttatagcggcagaagatgttctccggcacaccggcgacacgctccagaaattccaccatggtggcatcgtccagattgatataggcacccagctcgtaggccttcttcatatcctccacgggagtctggttggaggagaacatgatttcactgccggagaaaccgcacacctcgctgagcatcagctcagtcagggacgagcagtccacgccgcagccctcctccttgaggatctgcaggatgacagggtttggcagagccttgacggcaaaatactccttgaagcctttgttccagctgaatgccttgttgatgcggcgggcattttcacggatgcccttctcatcgtagacatggaacggcgtgggcacatcctgaatgatctcctgtgccatcgcctcggtcagaaacggtttcttttccatagtaacatccctctcattttatatgcacgcggccgatcgccgcagtgacatcagtagaaactcctttcgtcatcgctgatgcgatgccacccattcccctttttgtcgctggcgcgacatctgtttttctctttgttacctgtggtgacatttttccccggcgcagggagaatctgtcccggccgggggaagtctttctcaaagagggaggctttgccgcacggacaagctccctctttgagggggctgtctgcgcagcagactgggggagtttacagcttcagattctggcgggtgggggtgaaggtcgggatcatctttgccagctgctgcaccacaccctcgtcgttgtgctctgccgcagcggcaagctcctgcagctgcccgtagaactcggccagatcgatgctgcgcggcgaagccacaaaaattttattgtgctgggtgcggcgcatcttatcctgctcctcgtccatcatcagctcttcgtagagcttctcgcccgggcgcagacccacgatcttgatctccatattcacgcccggctcatagccgtaaaagcggatgagctgctttgcaagatccatgatcttgaccggctcgcccatgtccagcacatagatattgccgctctcggccagtgcaccggcctgcagcaccagctgggccgcttccggaatggtcataaagtagcgctcaatgttgggatccgtcagggtgacaggcccgccttttttgatctgggcctcaaacagcggaatgacgctgccgtggctgcccagcacattgccaaaacgcacagccacacacttcatatccgtgttgcccgcaaaggtctggatgagcatttcgcagatgcgcttggtacagcccatcacactggtggggttcacagccttatcggtggaaagctgcacgaaccgctccacgtcgtgttcgctggcgctcaccagcagatttttggtgcccagaacattgttcttgaccgcttctgcagggctgacctccatcagcggcacatgcttgtgtgctgccgcatggaacaccacagtgggatgatatgtttcaaaaacctcatccagacgctttttatcgcggatggagccaatgagcaccgttaccgggatatcccgaccgtacttctgctgcagctccatcaaaagctcataggcgcagttctcgtagatatcaaaaataagcagcttgccgggcttgaagcgcatcacctgacggcacagttcgctgccgatggagccgccgccgcccgtgaccagaacggtcttgccggtgaggtagccggagatctgatcggtatccagcgtcacttcctcacgggaaaggaaatccgccgggttcaactcgcggaaggctccctgctgcggtgtaccgctgcccaccagctgcgggtcactgagcagctgcaccgcacaatgggtgctgacgcacagatcgatgacatggttcagcttgctgcccttcagggtaggaatggcgatgatgatgctgtggatgccgtagcgcttgcacaggtccgggatatcctccagcgtgcccttcaccggcaccccgtggatggtctggttgagttttgtgggatcatcgtccaccgccaccaccgcgtgaccatattccttattggatttgcacacgttgatggcccatgcaccggcttcgcctgcacctacgatcatcaccgggcggttggggtccttgctggcagcgccgcgcagcttttcgcccagcgggtggttcaggaacagccgccatgccagacggctgccgcccaccagcaggaagatgagcaccgccgccatacagttggcggagttgaacagcacaccgtggatgcacagacggttgacacagtagacgacaacggtaggcacagccaccgttcccgccagacgcatcaggtcgcgttcaccggcatacttccacagtacggagtacagcccgctgaacagaaagctggcaatgtacaccgccacgatccatggcagattttcgtacagaagctcacggttatgcggccaccaggcagcttccactgctccgtctgcccgcagcagcagcgcaaaataaaagctgaatgcaacaatggctgcatccagcagcacaagcagcgcccggcgcgcaagcacctgcggtgtgttcttttcatctttcacaaaaaagtcctcttttacatacggcacaaaagccgcagttttggccggaaaagcttccggtttcacagagtatccggtacaccggacagccctatctttatattatactcagaacactgcagaatgtccagaaaatttgaatccgctgccaaactctctctattttttcggtctgccgggccggtgcgcagcccagagcgcggctgcttcctctccaaggcccagcggccatgccgccagcaggaacactcctgtggtagcgcagccgcctacgcccaacgcggccagctgcaaaggcagccgagccgcaaacccatccgcaagcagcttccgcagcgccataccagccgctgcagccagcacagctgccagtgccggtgcacccagccagcggcggaatgcatgctgcgtgccgctggaaaacagcagatgcccggtgttggccgcacaggtgtacaggctggaaagcaggatcactgccaaaaagcccttcatgccaaagcgcggcagcagcgccaccaccccgccaatgcgcaggatggaatcccacacgctgtagcggaaggccgccttctgctcccctacccctttcatggcaccgtccaccatgctttccagatacatcagcggcatggcaggagccagcgtttccagataaaacccggcatccgcactttggtacaaaagctgtgccagcggccgtccccacacccagaacagcacccctgccagcgcggaaaaatagccggtgagcctcaacatccggtccagaagtgttttgagccgttcggtctggcccagaatgtgggcctgcgtgatctccggcatcagcagcaccgaaagactgcccagcaggccaaatgggaacgtaagcagcggcagagccatgcctttcagttctccgtactgctccagcgcggcggtgcgcccgcccgcgttgatcagatagaccgcaaggcaggcgggcaccagcatattctccgccgtgtgcagggcgcttgccagcacccgcccgccctccaccggccacaggatctcccacagacggcgggccgggtctgccgggcggacggctttttgccccgcaaaggcactgcgggcatcccgccggtaaaaggccagcatacacagcgccgacaccgcttcgctgacggcggtagctcccagcaccagcatacagcgcacgcccaccgcaaggccctcggtgcgggtaagcgccagtgccaccagcgcgatgcgcaccgtctgctccgtaagctggctgaacacattgggagctacatgccgtcgggcgatgaaaaaaccgcgcagcaccgacgagaccgccatccatggcattcccagcgctgaaacgcgcaaagcaccgacggcgcggacatcgccaagccacaaccgggccgcaagatccgctgtcgtcagctgcagcgcggcggcaaacagccccagcacaagtcctgccgccagcagacggcgcagcaagccgcaggctgcaccacgggcggaagccgggccgctgagttcctcggccatgagccgggtagccgccaccgaaacgcccgccgttgccagcgtgacgaacagtgaatacaccgccagcaccagctggtaaaggcccatcccctcgccgcccagctcgtttgccagccagatgcgcaggcccatgccggccagccgcagcaccacgtctgaaccggtgagcagcgccgcatttttcaaatagctctgccgcatggcacacaccctcctgacagtcgcagtctcccttttcagcctatgcatctgcactctgaaaaagacgagcggcgcggcgggttgtttcctgagcgcttttatggtatagtaaaggggcggcctttgcagccgtattctgatcaaggaggaagcacacggccaatgcctctgagccagccgtgcgcaaaaagagaatgagcgaagaatgtacccatgactgctccagctgtggagcagcatgttcttcccgcgatgcagcgcccaagcacgatgcccccaaccccaacagcagcgtcaaaaaagtcattggcgttgtgtccggcaagggcggcgttggcaagagcatgaccagcgctctgctggcctgcgccatggcacgccgcggttaccactgcggcattctggatgccgacatcaccggcccgtccattcccaagctgttcggcatccatggccgtgccatggccgacgacaagggctgctggcccatccagagccgcatgggcatcgatgttatgagcatcaacctgctggtggaaaatgaggaagaccccgttgtgtggcgcggcccggtaatcgccggtgctgtcaagcagttctggaccgatgtggtctggaaggacgtggactttctgttcgtggacatgcctccgggaaccggtgatgtgcccctgaccgtgttccagagcctgccagtggacggcattgttgtggtggcaagcccgcaggagctggtgagcatgatcgtggccaaggccgtgaacatggctgagatgatgaaggtgcccatgctgggcattgtggagaacatgagctacatcgtctgccccgactgcggcaagcacatcaatgtgttcggcaacagccatgtggatgaggtggctgcaaagcacggcctgcccgtgctggccaagtgtcccatcgatccccagctggctgcgctttccgatgccggcatgatcgagacctacggcggcgaatatctggaaggtgccgcagatgcctgcgaaaagctgctgaagaagtaaaaatcgtttctctgccctgtgccgtttgcgtggtgcagggctttttgtttgcagaaaatatggctttctgcgcctgcgaaatgcagcaaaatggagaaaagacgttcttttccgtatttcttttgttctgtcagcgctttaaaaaacaaggttctgtgccgtttttttcttttatttttcgttttgtgaagcggtctcaacttttcatctgtttttttgaagcattttctgctttctcgctattgtcaaacccacagaaatgctttataataataaagcggtctgcagccataagcaggccggtgtgtaagaacggaaatccgggatcgtcccaaagcgttttagcagcgcgtccgctgtgcggcgggctgggcggtttcgtctttttcaaattttatagagtaattgggaaaaggagtattctactatgctgacaaatgaatacctgaagcgcgtttacgaaggtctggaaaagcgcaatgccaacgagcctgagttcctgcaggctgtgcgcgaggttctggagagcatccagcccgttgtggagaagcaccccgagtacgagaaggccgctctgatcgagcgtctggtcgagccggagcgcatcatcaccttccgtgtgccttgggttgacgatcagggcaaggttcaggtgaaccgcggctaccgtgtgcagttcaacagcgccatcggcccctacaagggcggcctgcgcttccatccctctgtcaatcagggcatcctgaagttcctcggctttgagcagaccttcaagaacagcctgaccaccctgcccatgggcggcggcaagggcggctctgacttcgacccccacggcaagagcgacatggaagtgatgcgcttctgccagagcttcatgaccgagctgtaccgccacatcggccagttcgtggactgccccgccggtgatatcggtgtcggcggccgtgaggtcggctatctgttcggccagtacaagcgcctgaccaacagcttccagggcggcatgctcaccggcaagggcctgaccttcggcggttctctggcccgtaccgaggctaccggctacggcctgtgctacttcaccgctgaagctctgaagtgcatgcgcaacgacagctttgagggcaagaccgtggtcatctccggttccggcaacgtggcgatctacgcctgcgagaaggctacccagctgggtgccaaggtcgtgaccatgtccgactccaacggctacgtctacgatcccaacggcattgatctggcctacgtcaaggatctgaaggaagtccgccgcggccgtatcaaggagtacgccgagacccacgagggtgtaacctatgttgcagattgcaccaaggtctggactgtcccctgcgacatcgccctgccctgcgcaacccagaacgagatcaacaaggagtccgctgaggctctggtgaagggcggctgcactgtcgtgtgcgagggtgccaacatgcccagcaccccggaggccatcgaggtctacctgtccaacggcatcctgtacggacctgcaaaggcttccaacgcaggcggcgtggccacctccggtctggagatgagccagaactccgagcgcctgagctggacctttgaggaagtggatgccaagctgaagggcatcatggagggcatcttccatgcttcctacgatgcatccgtggctgccggttccgagggcaacctgatggtcggtgcaaactgcgccggcttcctgaaggttgctaccgccatgatggcacagggcatcacctactaa

SEQ ID NO: 887 - DNA, 10960 bp, unidentified
  source 1..10960: mol_type = unassigned DNA
atggacactcaacaaatagatgttatggtagccgacgcctcacatgaggtttacgttgacactattttggaaactatcagaaatgctgccgccgtacgaggaacaggaattgcggaacgcacacacgaatacgtagcgacaaagatgaaggaaggtaaggcgattattgctctttgcggtgacactttcgccggattcacctatatcgaatcatggggaaacaagcagtacgtagctacttccggtctgatcgttcatcccgattttcgtggattagggttggcaaaacgtatcaaacaggcttctttccaactcgcacgtctccgatggccgaaagcaaaaatattcagtctgacctccggagcagcagtcatgaagatgaacaccgaactgggttacgtacctgtcactttcaatgaactgacagacgatgaagctttctggaaaggatgcgaaggatgtatcaaccatgacattctggtagcgaagaaccgtaagttctgcatctgcacagccatgctgtacgatccgacagacccgcggaacataaaaaaagaacaagaaagaaataacatttaaaagatacagcactatggaagaaaagaagaaaaaagtagtggtggcattcagcggcggactggacacatcgttcaccgtcatgtacctcgccaaagaaaaaggttacgaagtatatgcagcttgtgccaatacgggtggtttcagtgaagaacaactgaagacaaacgaagaaaatgcttataaactgggagcagtgaaatacgtaacactggacgttacccaagaatactacgaaaagagtctgaaatacatggttttcggaaatgtgctgcgcaacggtacttatcctatttcagtcagttccgaacgtatcttccaggcattggctatcgcacgctatgccaacgagattggtgcagacgccatcgcacacggttctaccggagccggtaacgaccagatccgtttcgatatgactttcctcgtattggctcccaatgtggaaatcatcacattgacccgtgacatggcattgagccgtcaggaagaaattgattatctgaacaagcatggtttcagcgcagactttactaagctgaaatactcttataacgttggtttgtggggtacttctatctgtggcggcgaaattctcgactccgcgcaaggactcccggaaacagcctacctcaaacatgttgaaaaagaaggtagcgaacagctccgcctgacttttgaaaaaggggaactgaaagctgttaacgacgagaagtttgacgacccgatcaaagctatccagaaagtggaagagattggtgcagcatacggtatcggccgtgatatgcacgtaggcgatacaattatcggtatcaaaggccgtgtaggattcgaagcagctgccccgatgttgattatcggcgctcaccgtttccttgaaaaatatacattgagcaaatggcaacaatactggaaagaccaagtagctaactggtacggtatgttcctccacgaaagtcaatatctggaaccggtcatgcgtgacatcgaagccatgttgcaggaaagccagcgcaatgtgaacggtacagcgatcctcgaacttcgcccgctttctttctctaccgtaggtgtagaatcggaagatgatctggtgaagactaaattcggagaatacggtgaaatgcagaaaggctggacagccgaagatgcaaaaggctttatcaaagtgacctccactccgctccgcgtttactataataaccacaaagacgaagagatatgattaaagcaggaatcattggtggcgcaggatatacagcaggcgaattaatccgtctgctgctcaaccatccggaaactgaaatcgtatttatcaacagcagcagtaatgccggaaacaaaattaccgacgtacacgaaggcttgtatggagaaacagatttaagattcaccgaccagttacctttggacgaaatcgacgtccttttcttctgtaccgcccacggcgacacaaagaaattcatggaaagccacaacataccggaagacctgaagattatcgacctctccatggactaccgtatcaaaagcgatgaccatgactttatctacggtctgccggaactgaaccgccgggccacttgcacggcgaagcacgtagccaatcccggttgttttgcaacctgcatacaacttggtttgcttccgctcgccaagaacctgatgctgacggatgatgtgatggtaaatgccattacaggaagtacgggcgccggagtgaaaccgggtgctaccagtcatttcagttggagaaacaacaatatgagtgtgtacaaagcattcgaacaccaacacgttccggaaatcaagcaatcgctgaagcaactgcaaaacagcttcgatgcagatattgacttcattccataccgtggagacttccctcgtggtatctttgcaacgctggtagtcaagaccaaagtagcacaggaagaaatcgttcgtatgtatgaggaatattatgccaaagactccttcgtacacatcgtagataagaatattgacttaaaacaagtcgttaatactaataaatgcctgatacatctggaaaagcatggcgacaagctattgattatctcttgtatcgacaacttgctgaaaggcgccagcggacaagccgttcataacatgaacctgatgttcaacctggaagaaaccataggactacgtttgaagccttcagctttctaaaaaacagaagaattatgaatttattcgatgtatatcctttatacaatatcaacattgtcaaaggtgatggctgcaaggtatgggatgagaacggaatagaatatctggatctctacggaggtcacgccgttatctccatcggacacgcgcatccccactatgtagcgatgatcagcaatcaagtatcaaaacttggtttctactcgaactccgtcatcaataagcttcaacaagaggtagccgaacgactgggaaagatttccggttacgaagactacagcctgtttctgattaacagtggtgccgaagcaaacgaaaatgccatgaagctggcttctttccacaacggacgtaccaaaatcgtatctttcagcaaagcgtttcacggacgtacgtctcttgcagtagaagcaactcacaatccttccattatcgctcctatcaacaataacggtcatgtcacctaccttccgctcaacgacattgacgcgatgaagcaggaattgtctaaaggagacacctgtgctgttatcattgaaggaattcaaggtgtaggcggtatcaaaataccgaccaccgaatttatgcaggaactccgcaaaacttgtagcgagacgggaaccatcctgattctggatgagattcagagcggatacggacgtagcggcaaattcttcgctcatcaatataacgatatcaaaccggacatcatcactgtagccaaaggaatcggtaacggcttcccgatggcaggtgtcctaatcagcccgatgttcaaaccggtatacggtcagttgggaactaccttcggtgggaaccatctggcatgtgcggcagctctcgccgtgatgaatgtcattgaacaggaaaatctggtagagaatgcaaaagctgtaggtgactatttactggaagaactaaagaaattcccgcaaattaaggaagtgcgcggatgcggactcatgatcggacttgaatttgaagaaccaatcaaggaactgcgcagccgcctcatttacgacgagcacgtattcaccggagcaagcggcacgaatgtacttcgcctgttgccccctctttgtcttagcatggaggaagcaaaagagttccttgcccggttcaagaaagtactctaaccgctcatttgattaataaacagccaacgataaaagcagcctctattagaaatttagttcttattctggctgctttttgttttttcgtaattaaccgttacctttgtctgtaacaactcattaaaaacaagcgtatatgaaaatagccattatcggtgcaggaaacatgggcggttcaatagcccgtggcctggcaaaaggaagtctgatagacgattcggatatcattgtatccaatcccagtgccggaaaactagagaaactgaagaatgaatttccgggtatctctatcacgaacaataatgcggaagctgccgcaggagcagatattgtcatcctcgccgtcaaaccgtggtttatggaacctgtgatgcgcgaattgaaactgaaaagcaaacagatactaatttctgtagccgccggcatcagctttgaagaattggctcattgtgtcgttgcaccggaaatgccgatgttccgtctgattccgaataccgctatcagcgaactggaaagcatgacgcttgtcgctgcccgcaacacgaatgatgaacaagacaaattcgtcctccggctattcagcgagatgggaacagtgatgctgattcccgaagataaaatagcggcagccactgcattggcatcctgcggtatcgcttacgttctgaaatacattcaggcagccatgcaagccggaattgaaatgggactccgtcctaaagatgccatgcagatgatagcccaatccttaaaaggagcggccgcactgattcagaacaatgacacccaccccagcgtagaaatcgacaaggtgactactccgggcggaatcaccatcaagggaatcaacgaactggagcataacggcttcacttccgctatcatccgagcgatgaaagcgtcgaaataacaataagactgtcagtaagttcaggcacggattacacggattacgctgttgctttatacaattataatactaaaaaccgtgaaatccgtgtaatccgtgcctgaataaaatgaaatcatttcgcaaaattactataactaatcacttataacttcaacaatatgaatgaccaaattaaacagatagcagaacgccttcgcggactacgtgatgtactcgaattgacttctgaagacattgcccgcgacagcgacatttctgctgaggaataccggcttgcggaaactggagagtacgatatctccgtcagtatgttacaaaaaatagcccgtacgtacaatgtagctctcgacgccctgatgtttggcgaagagcctaaaatgagcagctactttgtgacccgtgccggcaaaggtgtcagcatcgaacgtaccaaagcttataaataccaatcgctggcttcaggattcatgaaccgtaccgccgacccgttcatcgttaccgttgaaccgaaagcaatcgacgagccgatccattataacaaacataacggacaggaattcaaccttgtcatcgaaggacgtatgcttatcaacatcgaaggcaaagaaatcatcctcaaccaaggcgacagcatttattttaactctaaacttccacatggcatgaaagcgctcgatggcaaaacggtacgttttctggcagtaattatgtaataacatcatggtagaaagatttttatcacagacctctttcagttcacaagaggactttatcaaaaacttaaaaataaacgttccggagaatttcaacttcggctacgacgtagtagatgcctgggctgccgaacaacccgacaagaacgctttgctttggacaaatgacaaaggcgaaagccgccagttctcatttgccgatatgaaacgctatacagacatgaccgcttcttacttccagagtctgggtatcggccgtggcgacatggtgatgctgattctgaaacggcgttatgagttctggtatagcaccatcgccctacacaaactgggagcaaccgtcattccggctacccacctgctgactaaaaaggatattatctaccgctgcaatgctgccgatatcaaaatgattgtagctgccggtgaaggaatcatcctgcaacatatcatagatgctcttcccgaatgtcctactgtagaaaagttaatcagtgtcggtccggatattccggaaggtttcgaggacttccatcagggtatcgaacatgccgccccgtttgtacgtccccgccatgcgaacactaacgacgacatctcactgatgtattttacttccggcactaccggtgagcctaagatggtggcacacgacttcacttatccgctaggacatatcgttaccggtagcttctggcataatctggatgagaacagccttcacctcaccattgccgataccggctgggggaaagcggtatggggcaaactttacggacaatggattgccggagccaatatcttcgtctacgaccacgagaagtttaccccggcagctattcttgaaaaaatccaggaatatcatgtcacttccctttgtgcacctcctaccatcttccgtttcctgattcacgaagacctgacgaagttcgatttatcttcactcaaatactgcaccattgccggagaagcattgaaccctgccgtatttgaaacgttcaagaaattgactggtatcaaactgatggaaggtttcggacaaacggaaacaacccttaccatcgctaccatgccgtggatggaaccgaaaccgggaagcatgggactgccgaatcctcaatatgatgtagacctgatcgaccatgaaggtcgctctgttgaagccggtgagcagggacaaattgtaatccgcaccagcaaaggcaaacctctcggacttttcaaagaatactaccgggatgcggaacgcactcacgaagcttggcacgacggtatttattataccggtgatgttgcctggaaagacgaagacggatacctgtggtttgtcggtcgcgcagatgacgttatcaagagctccggttaccgcatcggcccattcgaagtggaaagtgcattgatgactcatccggctgttgtggaatgtgccatcaccggagtacccgatgagattcgcggtcaggtagtaaaagccacaattgttctatctaaagattataaagcacgtgccggcgaagaactgattaaggagttacagaatcatgtgaagaaagtgactgctccttataaatatccgcgtgtgattgagttcgtggaagaacttccgaagacgatcagcggcaagattcgccgggtagagattcgcgagaatgacaacaagtaagtagaaaatagtttctaatcaataagaaagcgatattatatgaactgtaatatcgctttctcagtttaaagagaatgatccctcatccgcctattttttcatcaagcgttcgatatattgtatctggaaacgataaaaatcacggctttcctgattgcctacggaactattcgccttatagagctgaagtattttctgcaattgcccgaaagaggaagattgcaacaacttctgattcaaaggaggaatgacaggcatacgcatggtggctgactgttcctcggatgcggcggaacagcagcagcgccatttctccgaatagaatgaatcggccaatccgattcgaagtccccccatgggtggttgtataaatcccgcattggtagccagtgcttcgatggctgccgcctgcattttcatctcagtataattgagtgcctgtccggcaatggtagattggaatatagtacgatagacgtcatccaaataagacgtgagtgtatagttgttctttgcgtctactacgcctccttcataaatacgttgcaaccgacgggcatcgtaaagtgttgccgcacctccttgaatcagaccgtcggcaccattcaagtcaaatccgaagcggattattttctccggtataatcagccaattgtttgcttcccgcagttggctgacaacccatttcatggatgcggactgttgacttttgggtacgaatacacgtacgccgtctttttctcctacacgattgtaagtatatacaactcctcccacataccccagtgtatgtcccaaataattagaatactgtccgacaatgctggcaaagtaatcttttaaatcctgataagtatctcccttcacgcccatccagtcttccaagttcttatagacgattttcagattgctgataccgtaatcacccgcctttatcgggtcattgcctaaatcttccgtttgggcggtcgggtcttcaataatccccatttgctgtaatccgaattggtacatcgggtcaccggctttctcttcaatccatttggctagaaccttagattgctctttgggagtcttattgcccggaataaggcgatatccccaattgatggcatatatgtcatacactcctaaaataggaggcgtcagtctcacgcctttctcaaagtcgccgggttgggcaacgtagttgttgcgggcatagtccatgatgctgggagtcgtaccgtatttctgtgtgaaagccggatcgcgcaatttctccacggggtaggaatggctagctcccatgttgtggagcaaacctaacgtatgtcctatttcatgagagatgacataacgcagtgattcgcacattacatcgtcaggaaacacattggcacgtacccgtttatctacggcaccggtttgtacaaaccgccagttgtgtacaagttggatgacattgtgataccaaatgacatcggctgtaaggatctctcccgaacgggggtctacgtaactggggcccatcgcgttcggtatcgcgtatgtggcatatttcacacaactatagcgcatatcatccggatcgaagttagggtcgttcggatacatcttggcttggacggcatttttaaatccggcagcttcaaaggcagtgttccagtctaagataccttgtatgattgtttcacgccatttttgagggaatgctgtatctacataaaatacgatgggttttatgggctctaccagctctccacggaaataggcttccctgtctttaggttccagcctccagcgatggataaaattataggtggttactttatcttcctgggtgtcgaataggttacggaatgaatggaaatatcccacacgattgtcctgaaagcgctgttccatcagcgtatccggcaattggagtatcgagcggttgagcatcagcgtgatgcactggccgttttgattgttgcggagattcatttgtgtgcgtacttccatattggacggaaacagtttgactcctttgataatggaagcgtccggtgcaaaggagtaggacttgcgtataccgtcgtgtatgggagagatgatgcgttggtcggtggtgaagaaatcggtaacatcaatcgtcaagttcccttgatatttgcttttcactttgaaggcagctaccacgggattggtaaagttcttatggaacgatggaagtacagggtccccttccggtacagcgaatacaagttggcgctgatgtatgtacacattgatgctgtcagtagagaaataaaagcaaagtggttcacactgcatttgtcccgccactcctaccccagtattactggtctccgccaatcgggtagccaacagataatcatgcttaaaggcttcggaaccgagttccagcagaagctttccctctttggtataagcgcagagcatgccttcctgccttttcatgccctctatcagtttgtcatattccgtttttttagggtcggcgggaggcgttacggcttctgttttaccttttttctttttggtcgttttcttgtcagacttaggtccggcaaatacaagcatggggatgcaaaatgccgccaatgacactagtagtaattttctcatacgatatactttcttttaagtttgaatattatttctttggattgaagcttgccagtagttgttcatagtatgctatgtatcggtagttttccgccgtcgtatttttgcgaatctcggaaaggcgtttcttcacccagcccgttatcatttttcgggtggcggaggtgattgttccgtttcctatgcgtgaagcccagttataaagaatcccatccgagacgtcttgtttgcggattgcttcgttgcaaatttgcgcatatttgttccagtctctttggtattccgccaccagcagatggttgcgcaacattatttcgtctcctttgaagagtgggaagcgggtcatctcttcgaaatagcgttttaacccttcttcatcaatcttatatacagagccttcctgtttaaagaagtcgcttgcatgtgccgaccacacttgatacaacttatcgtctaactgttgcggatcatattgggctttaaattcgtcctgatgttcctgcacgtagcggaaaagaggatgaaacggttcgcggatatagcggaagaaaaggtcgtaaagacctttgctctccaacaattccttctctttcccttccagcagctccaatgcaagttgcatagcctctttacgtttcatgtgttcatcgagagtcacaatatactgcaccataaattcttcactgcgttcccctccctcatacttcgtttgcaggacttccagcgttttgccggatagggtgcgttccgtacgttctataaattcgtcggctgtacaaccgcccacggcggaattcatcaacgtcccctctttggtcagatagagaaaagtaggaaaggcttttacgctgaactttttggcaagttccggcccctctcctttttccatgtctatcttggcgcatacgaagcgcccgttcagataatctcccaacttcttctgggtgaaaacctggcttaccatcattttacatggtccgcaccaagcggtgtagcaatctaccagaatcggtttgttggcagcctgcgcttgcgtcagcagggattgccatgcgggattgtcgaggaaagaaaccccttctccttgctgggcgtacgtgatggtagtccagcaagcaagtaatgttactatgatatgctttaacagtcggttcat

SEQ ID NO: 888 - DNA, 23396 bp, unidentified
  source 1..23396: mol_type = unassigned DNA
atgcccagaggaatgatcatccaagtcttggcagctgcgggcagggaagcggagaacaccaggtcggtggcacctgcggagaagcagaagccggcacggaaaccggagtagtaggtgatgacggtaaagatgccgtacagagcagcgtacacaacgtacagggggaatcacaggaacatgaagccgaactcgaagggctcggtaacgccgcagacgaaggcgcagattgcagcggacagaaccaggccgatggcagccttcttgttcttagcggtcttgaccatagccagagcagcgcccaggacaccgaacatcatgcaggggaagaagccggacatgtacatgccaaggctccagcccacatcagcagaggtctcgccagcccagaagtggctcaggtcgcccagaccgatggtgtcgaaccagaacacgttgttcagagcgtggtgcagaccggtggggatgagcagacggttcaggaaggcgtagatgccggcgccgatgccgtccatgccagcgatgccgttgccgatcgcgaccagagcgtcgaagatgacgggccagacgaacagcagaacaacggacaccagaatggagatcagaccggtagcgattgcaacgaagcgcttgccggagaagaatgccagccagtcaggcagctggatatccttgaacttgttgtagcaggcagcgcccacaacagcggccagaatgccgatgaaggagttgccggcgaccttctggaaggcgatgtaggtagcagtgccttcttccaggtgacggaccatgccgaccacaccggggttcagcagctgctgcatcatcaggaagctgaccagaccggccagacctgcggtgccgtcgttgtcagcaaggccgacagcggcaccaatggcaaacagccatgccatgttatcgatcagagcgccgcctgccttgaccagcaggaagccaacggtgtaagctgcaccggaggttgcagcaccgggaacgcccataacgcccggagcaagggcataaccaagacccatcaggatgccgcagatcggcaggaccgcgacgggaagcatcaaagctttgcccagtttctggagatacttcatcataaagcacattcctccttaagaaatgtttgtgtttacagacgcctctggttgcaggccgtccataattccgtaatagaatagtaacatatttccgcaaaaaaaagaaagtccctttcgccttttttctatcaaaatgcatcaaaagtcctcatttggcagtttttcagtcgataatttttgggttttccgcacaagggtcgtctttatgttgaaaattcttttctttttacgtacattttgcccaaaggcttgcatcccacagccgaatcgggtactatactattataaagaacatgcgccctctcaggccgcttcgcgtccagctctcccaaagggagagcccttggcaaaaccgcaaactttgcacggactgccaaggcctcccactttgggggaggtggcattgcgcaagcaatgacggagagggcgaggatgcaaaataaaaggagacagcattatggaatggactgatatccgcctgaccgtggccaaggccgacgccgacaacgccgaagccgttgccaccatgatcgccgagggcggcatctatatcgaagactacagcgacatcgagcagcaggtggccgagatcgcccatgtggatctgatcgagcaggagctgctggacaagccccgcgataccgttatcatccatatgtatctggagccgggcgcttcccccgtggaaacgctggccctcattgccgcccgcatggaagctgcaaacatcgcctacaccgtagagaccgagggcgtggagcaggaggactggcagaacggctggcgcaagtattatcaccccctggaaatcggcaaacggctggccgtggtgccctcgtggcagcagtacgacactgaccgggtgaagctgatccttgacccgggccttgccttcggcaccggcggccacgagaccaccagcctgtgcatggaagcgctggacgagcgggtgaccggcggcgagcgggtgctggacatcggcaccggcagcggcatccttgccattgcggcgctgaagctgggcgctgctgtggccgagggcgtggacatcgaccctgtggccgtgcgcaccgcaggcgagaacgccgcgttgaacggcgtgcaggacaagctgaccgtgctggtgggcgacctttccgataaggccagcggcaaatacgacatcatcaccgccaacatcgtggccaatgccatcctgtctctggctcctgccgtgcccggcctgatggcggagggtgccacctttattgccagcggcatcatcgacagccgcaaggacgaagtgatcgccgggctggaaaaagccggccttgccgttgtggaagtgaaggagaagcgcggctgggagtgcatcgtctgcaagaaagcgtaattacagaagctttcatgatttctttcagctggcttgccctctccgtcaccttcggtgccacctctcccaaagggagaggccttggcacagagatgaagtttgcgtggactgccaagggctcccactttgaggaaagacttcccccggccgggggaagatgtcaccgtaggtgacaaaagggggaatctggatttgcgaagcaaagactgagagggcgaggacgtttaaggagaaccactatgccgcaccgttattttaccaccgagatctctgacggcaccgccaccctgcgcggggccgatgcccaccatcttgcccgtgtgatgcgcgcaaggctgggcgatactgtcattctatgcgacggcaacgccgtggaatacaccgccaccatcaccggctttggggacgagtgcgtggagttccgggtggagccgggctatcccagcgccgccgaacccagcgtggaggtcactctgctggccggctaccccaagcaggacaagctggaacagatcatcaagcacggcgtggagctgggcgcagcccacatcgtgcccttcttcagccggtactgcgtggcggcccccaaaaaagaggagcagaagaacgagcgctacaaccgcattgcggtggaagccgccaagcagtgcggccggggcgttctgccggatgtggccctgccgctggcaaactttggtgccgtgtgccgtacctttgcacagtacgaccttgtgctgttctgctacgagtgcggcggcgcgcccctgcgcgacctgctggccgcagcaaagcccgccgatggtgaaaaactgaaaatcgccatcgtgaccggagccgagggcggctttgccgccgaggaagccgagatggctgcaaaggccggtgccagaacggtgggccttggcccccgcatcctgcggtgcgagaccgccccgctggccgtgcttgcgtccgtcatgaccctgacggggaatctggaataatgctttgtgctgcccggcagcgcctgcgggccttccggacagcaacaaggggccgctcccggaaaggagcggccccttgtttttttattgttccgctgtgcagacgcagggcagatcagtcaatgagacccttgtcctttgcattctgccaggtaaggcagacgcgcagcttgctgaccgggaagcacggatggaacttgttgttgtcctcgtcgaacttcatcagctcctgctccaccatccagtgtgcagccttctgggcatcggtatcgtcggcgtcaatgtccgcatacaggtcctcatcggtcatgttctgcggctccggcttgcctgcacgctcccagaccagctctgccagttcgatgcggttggaaggcagaggaaggccctgcatgttcatcagacggtagatgccggtgccggtctcataggcacccaggattacagcgccgccgatgatgacaccgggcaggacggggtccacggggcccaccgggtccaccgggtctaccgggtccacaggcggctccacggggtccacggcttcgtacacggctctgaccgtcacgttgcctttgggcatttcaaagttcgccgtggtatggtcctcctcattggggaagctcagcaggtcattcatttcattctgtacaacgccgttcaagatcacgatcccggtccagcctgcgaacttctgtccatcgggggctgggtctgcggtcagggtgaccggggtgccttcgtagatctcgtcattggggtcaaccttagtgtcaacgcccccgaccttgatcgttgccgtggcatccttggcggtcagggtgtagccgggtgcccgttgggtcaggtaataatagtgctgtgccttgtcatacgccacgcggtagctctcgttctggcccacaaggtgcagcttgtttgcattgcctgcgaccgtgagctgacggccttcttccgggtcggcaaccttgatggtggcgggggtggtaaaggtatcgctgatggtgatcttcttgccggactcgaggtaaatatcgctctcgttattctcaaacgtggcgctcttcagctctgcggaggtgctgctgccccgaccgagataaatgccgtatttgctgtttttgatcgtgcagttctcaacgaccagcttgccgccgtccccatatttataatggtaatacgaccctgccggttcgcccgaagaaatggcagcattgtcgcccgtgcaatccacagtggcaccattgacgctcaatgtgccgccgttccataccttcagtgcaggggactcgtagccaagattaagatactggttggtgttggtataagtaccgccgacaaggttggcggtggcgcccgtcacaaacacatcgcagtaggttccggtgacttcggcatctgtgacgttcagcgttgcactattggcgacgcgcagcgtcggacgatctttgtatcgcgggaggtccttataggtgcgggagtaagagccgccgacgatattgacctgactgttcatggcgttcatgacccagccgacgccggtggctttcacataattgaaggacgagctgggggaatcattgatccaaaacgttgcgctgaagctctcgctgcagtcgtaggtgccgccgttgacgatcacattggctcccttatctgtttcaatagcacgcaggacggcgttcatggtgagattgttaaacgtccagtcgccgccgcacagatagcatgcggcgatgtcgtcacacggccagttatagatgccgccgttaagcactgcggtgcccgtgaagctgttttcggcatagaagcagcggttgaaggcgaggccctctgccgtcttgatggtctgcccctcagcgttgacggtcacgctcttggcgttgcggactgtaataaagttcgcacagtcgtctttattcccactcttttcaaaggtcgttcctccggtgacgttgatgaccacatcctcgtcctcagcgtcgatcacgatcccctctgtataggtaccgctcatggaataaaccttgccatgatctgcaatgaaatccttgttgatggtcgtcgcgctgtcggtgggcaggggatacccctctccggagggctctgcagacgcatcggaattttcctgtgcgctcacagtgcgttcaaattctgtacttccctccagagcaaatgcgctcacgggaaggacagaggtcatcatgcagcctgcaagtaccgcactgatgagccgtgtgccaaacttcttcataaagatgactcctctctcgtttttttcgtgcatgcaagcttttttcgcctgcccgcacgttttaaacatttaaagtatagcacttctgcaacaaggcgcaatcttcattctgtacgaaccttttggacccccccgttttttcgtgcgttctgtaaaaaaatggaagagagaatgcttttgcagccgcagaaaaaacagcccggaacgacccacagatcgttccgggctgctgtgtcaaaaatggtttggagcgtcagagctccagcagggccttcttcacgttcaaaaggttctgcgggctcaccgagaagctgcgcaggcccagctgcaaatactgcaccgtgttggccgggttgcccaccgcaaggccgcagatggtcaccggcacattgcgcacctttgcggcatccatcaccatggtgatgagctttttcatggccttactggccgggcggtagtagtgctcggcgctggcaagctcacggtcggcggcgtgggtgtactgggtcaggtcgttggtgccgaccacaagaaaatcgaccccatgctctacaaattcctcagcggtcaggcaggcagcgggtacgctgagcatcacgccgaactttgtatcttcgttgaacgccacgccgcgctcccgcaggtgctcgcggcagcgctccaccacacgcatggctgcgtcccagtcctccacattcgtcaccatggggaacatcacccgcagcgggccgcgggcggcggcgcgcagcagcgcacagagctgcgtctcgaactggtggggctggcgcagactgttgcggatgccccgcaggccaagcttggaagactgcaggccctgataggcgtcggaaatggtgcggtctgagccaaagtcgaaggtgcgcaccgttaccgggcagcccttggcggcagcaagacaggagcagtagaagaaatactgttcctgctcgtccagaatgcggcccggcagcatcatgtagccggtgcgcagcaggcccacgccctgtgcaccggactgcatggccgtgtcgatgtcctccggcccaaagcagttggccagcagctcaaagggctggccgtcctttgtcctgctgggcagagcatgcagctgccccatctcttcgttctcccgctgcagctcgcagatgcgggtctcggcctgctggcgggcggcagcgtccgggtccagcgtgcactggcccccggtggcatccagaatcacggtgcggccgtcgcagtcgtccagaaaatcccggcccacctgcacgatgcccgggatattcattgcccgggcaatgatggccgcgtggctctggccgctgccctctgccgtgatgatgcctaaaatcatgccggagggcacgctgaacaggtcggtgggcatcagccgctctgcggcaaggatcaccgggtgatccagcgccagccacatgcgggggcggttggtgatgatgttgatgacccggcggcttgcgtcgaggatatccacactgcgcagctgcatgtaagggttgtccttcatgttggccagctggtcggcgtagcgctggcccacctgattcatagccgctgccgcgccaatgcctgcattgatgcagaagcgcacctcgttcatcatgccctcatcgtccagcatcatgctctggaactggaagatggcctgctcgctgggcgcagcgcggtctgccatggattccagctcgtcctgcgccgtgcggatggcatcggtgagcagctgcagttcccgggacggtttaaaggggcccacggtcgtggtctccacatggtgctccagacggctcacctgccccagcacaaggccgggagaagcgcaggaacctttatacactttcatgttcggtcacctccggcaaaagctcagcttccggcgtggtcagggtgcgccagaccagcgcctgcaaaaaggtattgggcagcagcgcggccagtgcggcccgcgccgcatcggcactgccctcaaacagcggtgcaaagctctgcatccgtgcctgatcgcactttgcaaggaatgcatcgcacaaagtatgggtggtgtagtaatgggccgggtccacaccggcatcttccgcggcggcttccagcggggcaaggtcggcatccttcatcttggccagcagcagggccgcatccgccgtcagggtgaccgggtatttctcccgcacggccttttgcacccgctcaaattttgcgtggaacgcagcagcgtccgcgcagctctgggcatcacaggagacagcataggcacacccccgcagatatcccatagcgcggcgggtatcatagtagcccagctcgatgttgcggcgggcggtgtcggggtcaaagtgcaggatatcgcccagctcccagtagctgcgcaccatcacggtgggcaggccggtgaggttggggcgggtgatgcccacgccttccagatcgacgcacaccagttcatccgcgcccatgcgtttggcaagaccggtgggcatgttgtcgctgtagccgccatccagaaacttgaccccgtcgatctcccgcgcacgcagcgccgggaagcaggcagcggaggccatcaggtagtccttgacctttcctgccgggatctcgtccagcgtcagctcccggggctttaagccccgctgctccaccgtgacaaggccaaagcggatgggagccgcgcgcagggcatcctcgtccagaacccgctccacgatctcttccagcggggtcacatccatgccgccggctttcaccacgctgcgcaggaactggtgcagggccgaaaggtcggcatcctcctccggcagctccatcacatccttgctgcggatggccagccacatatcgcgggccgtctcgtactggtccagcacgaacatggcaccgttcaggctgccaacgctggtgccggtaatgatctgcgggtgccagtccagctccatcagcgcgcgccacacgcccacctgatagctgcccctggctccgccgcccgccagcaccagagctttgcacggagcactgcgttcatccattgcatccgcctcctttgatcgtttccggttttgttcagattatagcatatttccagagaaatttcttccgttttttgtaaattgatgcctttctcccggcaaagaaacatggtatacttgtcaggatctcaaaaggaggcattctcatgcactgcaagcaatggatttttgatatggacggcaccctgaccgacagcatgaccgtggtgtgggagggtgcccccgacgcactgctgcgccgctatggccgcacccctcggggggatctgcgcgccacactgctgaacatgggaatgcaggagggcgcacagtatctgatccgggagtacggcctgccgctgaccgaggaaagctatttttccgtgatgcgcgaggtgatcgccgaattgtacgagaccgtggagctgaaacccggcgtgcgcacgatgctggcaaagctgcaggccgagggcgcacgcatgtgcatctgctccaacacctgggccgaacagtgccgcaccgtgcttacccggctgggcatcgcgcagtatttctccttcatcgtggaagcgcggggcgtgctgcacaaaagccacccggaggtgttctttgagtgcatgagccgtctgggcggtgcagaccccgccgcctgcgccgtgtgcgaggatgccgtatacgccgccgccaccgcccacaaggccgggtattacgtcattggcatcgcagaccgcacctctgccgccgacgagccggagatgcgccgcatctgcagccagttcgtgccccggtgggatgcgctggactggacacgtgtgtaagaaaaaagggccgcagcgtgcggttcttttctttatctgatccttctttgctcttgcattttgtgcgcaagaagagtatgatattataaataggactgccccaagggggaagtgtcctcatttgtgagaatacactctgtgatttttaatataaaggtataatatccgtaaagaggagaccttccgtcatgaacaacccactcgtcagcattatcgtgcctgtgtacaacgtgcagaatagtgttgcccgctgtctggagagcatttgtgcccagacatggaaggatatcgaggtcattctggtcaacgacgggtcccgggacgaaagcttttccatctgtgagcaattccgtgaaaaggacccccgcatcgttctggtggacaaatccaattccggtgtgtcggagacccgcaactgcggcatgtcccttgcaaggggcaagtatgtgcagtttgtggacagcgacgattatctcgaccctgattttaccgagcggctggtgactgccgccgaagcgaacaacgccgatctggtcattgcaccttactggatggtgattcccgccaactcttccaaggccacgcaggcactggaaaacctgcaggagaaccttggcatcgatgccgagaaaaagcccgatgatatccgtgaatacggcttcctgcccgagggcatctacgaccgcgatacctttgccctgcgcctgatggagaagcccgcatccttcttctacagcgtgctgtggaacaagctctaccgccgggatattctggcagaccatcatcttcagttcaccagcgaggtgcgctgggccgaagatctggttttcaacctggaatacattttgtacgccaatgttttcgtatccatttccaaagcgggctaccactatgtgcagaacccccagagcatctgccacacccagatcaatctggcttccatcgtgcagaacaaactgcaggtgttccgctattacaaggagctgtacacaaagctgggcctgtacgatcaggtgcagccgcagctgtataaattcctgaccgcgttctccgagaacgcctatccctccggttctccccagaagatcatcatggacatggccaaccactggggctttggtgttctggatgcttccgacaaggaaaagaaacacaaaaccgaacccgatgcctgatctccgggcacgaaaaaaagagccgtgaaagcggctcttttttgtttgccattttaccggtcgatccagctgcggaaggcttcgcgcactgcaccctcccgtccgcgcgggatggggatgcgcgcaccgctgcacatctgcagctcgcccgccgtcagcagctgtgccgccgccagattgaccacataggagcggtgcggctgcaaaaaacgcccgtcttccagcagcggctttgctacctcggcaaaggacacccgcagcgaaagggacaccacatcctcgccgctgagcagatggaagtgcaccacatggtgggtgcactccagatattcgatctgcgcataggccagcgcccgcaggccttcggcggtgacaacggtcattgccgggccgtactccggctcggtggcgcgggcaagcagggccgaaagctcctgctggtgcaccggcagaagcagatactgcatggcatccacccggaaagcgctgtaggcgtgggccggtgtgcgggccgcaaaggccagcggagccctgcggccccggcggcgcagctccgcagccgccgaaagccctgccggggccgctacagcgcccagctcgatgagatacaggtcaaaccgttctccctcggtgtcccggcgcagcagcgcatctgcatccggcagctgctgcacgatgcacgcatcctgccgccgggcaaaatattccatgcactggcgttccagcccgctgcgcaaggccgcgtccgggctgcataccgcaatgtgaaataccatctcacattctcctttccgccagccgcccgccttgatttttgcgcagggctggagtatgataaataaaactttgctgcatcgaaaaaagaaaaaacggagggacccgccatgccgcagccgcttgtcagcgttattgtgcccgcctataacgcggcgggcttcatctcccgctgtgtggagagcatcacatcccagagctacccggagcttgagatccttctgctgaacgacggctccaccgatgacacccttgctgtctgccggaagcttgctgccgccgacagccgcatccgtgtggtggacaagcccaacaccggcgcagcagacacccgcagctgcggccttgcccttgcccacggcgaatacatccagtttgcggacagcgacgatcacctgctgccgggctgcaccgcaaacctggtggctgctatgcagcgcagccatgccgaccttgtgctggctccctaccggatgatggtgccccgcaaggatggcggctatgacacccgggagtacagcctgctgcccgccggggtgtacaacaaggtggattacctgtggcagctcaccggcaatgccgctgccttttactacggcgtgctctggaacaagctctaccgccgggatctcatccagatggcgcacatccggttcgagcatgtggtatacgccgaggaccagctgttcaacacccggtatctgcaggtggcacagcggtttgccgccatcgacgaagccgcctactgctacatccagaacccgcagagcgtatgccatacgcaggtgagcgcggcggacatgctgcgccaccgcagccggatgtaccacacctacaaggaactgtgcatccagctgggcgtgtacgataaattccgcctgcggctgcacggcatctatctgagcctgtttgaaagccctctgcccaacggcccggtgcagaagctttccgacgcatttgcccgcacccacagccgcatctgagaaaaggagaacctatggaatttccccttgtaagcatcatcgtgcccatgtacaacactgccgggtgcattgcccgctgtgtcaaaagcatctgcgctcagacttataaaagcattgagatcctgctgctgaacgatggctccaccgacgacacccttgccgtttgccgcccccttgccgccagcgaccaccgcattgcactggtggataaaaccaacaccggcgcagcggatacccgcaatcagggcattgcgctggcccacggcaaatacatccagtttgtggacagcgacgactggctggcccccgattttacggaaaagctggtctccgccgccgaggcccacaccgccgatcttgtgatcgcgcccttctggatggtgtacccggaaaactatgtggagcacatccgcccatgggaaaaggcactgcagcatgtgctccggcgcaatccgccccgcacccgggcctatggctatctgcctgccggggtgtacaccggacaggagtacgcaaagcatctgatccagaagccaaacaccttctactatggcagcccctgcaacaagctctaccgccgtgacctcctgcggaagcacagcctccatttccgcaaagaattgtttgcggaggatcagctgtttaacaccgaatatctgcgctatgtgcgcaccgccgtttccatcccggacatcggctattactacctgcagaacagccagagcgtctcccactccagagtgaccaccgccgacatcctttcgctgcggcggcgggtgatgggcctgtacaagagcatctataccgaactgggcatctacccggagacccgggcggccatcctgcgttcgccctttggcgaaaacgagttcactcttccgccgctggacaccccacagacgcactgctgcaagctgtgaccctataaaaagcacccggctgccgccgagagccgctctggctcctgcacggctccgggtgttttttgcgctttctcagcagccgatggcggcacacttctccgccagccagctgcgctcttcgtcgttcaggtgcggtgccagctttgcaaacacctgacggtggtaatcgttcagccatgcgatctcgtccttatccagcacaccgggcaggatgggagaggtggcaatgggcacgaacatcagcggttcaaaaccaaggaaggtaccgtactggttatcggccttgtgcacgcacaccagctcgttctcgatgcggatgcccacgaggtcggtctcgtaaacgcccggctcgtcggtgaccaccatgccgggacgcatccgggtggtgttgcggctgttcagggcatgggggccttcgtgcacgttgcccacaaagctgacgctgtgaccggtgccgcagcggtagttgatgaggtgccgccacagcggttcccgggcaatagtgtcgatcatcttacactcgcagtaatccagccagacggccttggcaaggtcgatgtggctctgcagagtccatgtgtagaagcgcttttcgtcctcggtcagcgggccaagcgggtaggtgcgggtgatgtcggtggtgccgtccatgtaggtggcaccgctgtccaccagcagaaagcccttcttttccagcacagcgtgatcttccggggtggcgtggtagtgcatcatggctgcgttgccgccgtaggccgcaatggtgccaaagctttccacaaggaatttatcgtccgcactgcggtacttgtgcagaatttcatccaccgtcagctcggtcagggtctcaccggcagcaaggcggctttccagctcgatctggaaccgcaccatggccacagcgtcccggatatgggcctgctttgtgtgggcaagctccgtttcgttcttcacgcccttcatcatcagcagcgggtcggtgccgtccttcacggtgagggcagggttctgctccagcacctgatacacggcgtagttcaccgtggagcactcggccagcacggtctggggttccgtctcagcagcgaggaacttcagcacatcatcatactccgccagcgtgatgccgttggcttccagctctgcctttgcctccggggtgacgcgggccgtgttgatgaagagtaccgcgcggctgggggtcacatagcagtaggccatggcatagggagtgcactcaatatccatggcgcgcaggttcaaaagccatgccagattatccagcttgcccacaaactgagcggtgcagcccagctccttgagcttgctgcgcagctgatccagcttttccgccggggagaagcccgcatattccttcggcaagatccacgctggggtatccggcagggcagggcggccctctgtccacagctcgtcctcaaggttcagggtcttgatgaaagcgcccttcttttccagtgcctttttcaggtcgttcacgagggccgtgctggcggtcaggccgcacaggcccagtgcttcgcccacattcagggcatttgcgcagtattcctccacggtgggcacgccgggttcccccatgcgctgcagcttgatctcggtacccgcaatttccttctcggcctgcacaaaataacggccgtcggcccacagggcgctctcggtgcgggtgaccacgaagttggagttctcgccgtggaacccggagaaccaggtcaggctggtgtaatggcagggcaggtattcgctggcgtggggatcacccacagggatcagataaacggccacgccgtttgcagccatggcggcacgcagagcggcaaggcgctctggaacggtattcatgctcatatgatttgcttccttttctctcaccggaaagcccggcagcggtgcatttctgtttggccttattgtatcattccgggaaaaagattgcaatgcaggggcgggacggtttggaatgacctccgcttgcgctctggccatgttcagcggaaaaatatttttatatttgtggttcagaaacgcctgcgggcgtttctgaaccactgtttcaccagaggggtttgcagtttccggcgcaagcgccaagtttgcgggcacgccagaggctccctccccgagggagctggcaaaaccgtcaggttttgactgagggagttcgttctccctcaaaatgccgccaatttgcaaaaaaagttacaattttttcttgaaaaaggccgttttcccattgacagccttgttataataggagtgtaagatttttgagccagcactctgcggctctgtgtgctattcgaagaaagaggcaattgaatcatgaccaaaatcgatattttctccggcttccttggtgccggtaaaactaccctgatcaaaaagctcatcaaagaggcctttgccggccagcaggtggtgctgatcgagaacgagttcggcgagatcggcattgacggcggctttctgaaggaaagcggcatccagatcaacgagctgaacgccggctgcatctgctgctctctggtgggcgacttccgcaccgccctgcagcaggtggtggagcagtaccaccccgaccgcatcgtcatcgagccctccggcgtgggcaagctctccgatgtgacccgcgctgtggaaggcgtggccgagcatctggatgtgcagctgaacagctttgtcaccgtggccgatgtgaacaaggtgaagatgtatatgaagaacttcggcgagttctacgacgaccagatcagccacgcaagctgcatcctgctcagccgcacccagaccgccagcgaagagaagatcgccgctgcggtcgccatgctgcgcgagaagaaccccaccgctaccatcgtgaccaccgcatgggacgagctgaccggtgagcagatcctgaaggccatgtccaccaaggacgacttcaaggcagagctgatcgccatggctgcaaaggccaacgaagagcacgcccacgaggacgaagaagagcatcaccaccaccatcaccacgatgacgagaacggtgtgtgcagctgcggccatcatcacgaccacgatgatgacgacgaggacgagcacgagcatcaccacgatcacgatgaagatgatgatcacgatgagcatgagcaccatcatcaccacgatcatgacgaccacgaccattgctgctgcggccaccatcacgaccacgatgacgatgatgatgacgacgagcacgagcatcatcacgaccatgacggccactgctgctgcggccaccaccatcatcatgaccacgatgccgacgaggtattcaccagctggggcgttgagacggcccgcaagttcaccaaggcagaagtggagcacgccctcaccgagctggataccggcaattacggcatgatccttcgcagcaagggcatcgtgaacggcggcgcagacggctggctggagttcgactatgtgcccggcgaatgggaagtgcgtgcccgcggtgcagatgtgggcggcaagctggtcgtgatcggctccaagctgaacgaaaaggccattgcagagctgttcggctgctgagcttaaagtaaaaaggagaaaccattcctatggcaaaagaaattccggtctacctgtttgtgggctttctggaaagcggcaagaccaaattcattcaggagacctttgaagaccccaacttcgactccggcgacaagaccctgctgctgatctgcgaggagggcgaagaagagtataatcccaaaaagttcgcctttcccggtgtgaccgtcaaggtgctggaggacaaggccgagctgaacccgcagaatctgctcaagctggaaaaggaatccggcgcaggccgtgtggtcattgagtacaacggcatgtggctgctgcaggatctggccgaggctctgcccgagagctggatcgtgtaccagtgcatcgccaccgccgacggcaccaccgccctgacctacgcccgcgacaactccatgcgcagcctgctgctggacaagatcgcccgcagtgagctgatcgtgttcaaccgcgctgaggccgtgaacaacgatgccgcccgtcaggagctgcacaagctggtgcgtcaggcttcccgcaagtgcgatatcgcctacgagtttgccgacggcagcgtggcctacgacgatatccctgatccgctgccctttgacatcaacgcggacatcatcgacattccggatgacgatttcggcatctggtacatggactgtcaggacgagccccagaagtataccggcaaaacggtcaaattccttgcacaggtgtgtcagaccaaccgtgccggcaagaacagcttcgtgccgggccgttttgccatgacctgctgcgtgcaggacatccagttcgtgggcttcccctgtagctacgatggctacaaggcgctggagcagcgcgcatgggtgcgggtgaccgcaaaggtaggctacaagttccataacatctaccgcggcaaaggcccggtgctcaccgccatttcggtggagcctgccgaaaagccgctgaacgatgtggtaacattctcttgatctgatctttcaaggaggtcccggcatgaaaacactgtttcgtatccttggcacggccgctgctgtggccgttaccggtgctgccattgtggcactggacaagatcctgaaccagaaagacccgctccatgtggaggaagtagagttcccggaggacgccgagcagaacgctgaggaagccgccaagactgccgaagcctacgccgaagcggaaaccaaagcctccgatgctgccaacgaaaaggctgcagaagaagctgcgccggaagctcctgccgaagaagcggcagctgctgcccagcccgccgaagaagcctctgccccggcggcacccgcagagggcggcgagaagccggtgttcgacccggaagctcccaaccagaaccctgtggaagcaggccccgctgttgctcccaaagacgagagcggaaaattcgatcccaccaagattgccgaagccagcgactttggcgactgggaagaacagggctgcaaaggataacctatgacccaaaaagggacgatgtgatgttcacatcgccccttttttgttattgtcctcttgccagctgctgcagctttttcctgtccagcacctgcacgccgccccggaacagccgcacccagccctcctgcgcaaagtatttcagcatccggctcaccacctcgcgggcagaccccatatattttgccatctggtcgtgggtcatgcgcacctcgtcgccgccggtcttggccagctcatcggtaagaaaaatggcaagcctgcggtctgcgctcatgaacagcacctgctgcatggtccacatgctgtcggaaaagcgctccgccgtcatctgataggcgtagcagcgcacatgcacattctgctgcatcagcctgcggaaaacgcccgcgctgatgcagtaggcctcggtgtcctcttcggcatcaatatacaggtcgatgttcaccgagtccatcacgcaggatgccgacaggatgcacacctccccgccgaacaggcggtagagcgtcacgtcccgcccgtcctccgagagcaggtaggcccgcagctggcccgagcgcagcagcaggatgcccacacagctttccagcgggctgtgcacccttgccccctttgcgtagtgcaccggccgggtgtagcggcagagcatgtcctgttcgtcaggtgtcaggtcgttccagaagggaaaacctttggccagacaatcgcggtgttcctttgttgtttccgacattgcttttcatcctttccgcagggccttggcggcttcagtgcccgcctgcgcgccctcatacacggcctttgccatctgcagaaggccgccggtgcagtcgcccgccgcatacaggccgggcacggtggtctgcatcttttcgtccaccacgatgcggttcccgtccacctctgcgccgatcttcctagccagtgcggtgctgcccgccacgcccagcgccacaaatacaccgctgacaggcagctgcacaccgccggacagctgcacgccggtgacaacggtttcgcccagaacagcctccacggcctgcggatagactgtgacctccggcgggaaatccgccgtcagcggtgcgccgttggtcagcagggcaacgctttttgccaccggcagcagagcctgcacctcgtgcagggcgtactcgccgctgcccagcaccgctacgtcctttccacggtagaaaaaggcgtcgcaggcggcacaatagctcacgccgtgcccctccagcccggcaaggcccgggatgcgcggcaccgcccgggatgcacccgtggcaaggatcacagcgtccgccgggtaatttttatccactgtttctacggtgagtttatccgtataggtcaggcccacggcttcggctgtgacgaatctcacaccaaggcgctttgcattctcgatgctgcggcgttccagttccgcaccggagaccggctcggcaaagccgtaatagttttcaattttttcggcgcggtccagcgcaccggggcctttggtgagcaccgtggtatccacaccggcgcggacagcgtacagagcagcggaaatgcctgccgggccggaacctataatgatgatgctgggcatgggaaaaccctccttcggatgcatttttctacagtatacacctttttttgaaaaatttccgtgaccgggtcgcaaagcatcggtttttcggacggtcctgcttcggttcgctgtcagcggatcgtcccatgcacaaacgcgctgtcgtacaggaatcttcctgctcggcagcgcgcttttttctttcagaacaccagctgcaccagcagcacatagcacagcgtaccgcctgcgacactgagcagggtctcatgcttccacttgtgcaggcccaccgtcaccagcagggcgatggcctccggaatgccgcggctgcccgcaaagggggtgacgcttttcaggcagtagacgatcagcataccaaagatggcggcgggcagcacccggcccagataccgcaccacctccggcggctgctgatccttggaagagaacaccacaaagggcagaaagcgggtgatcatggtggcggcggtgcacactgcaatggtcaggcccatctggactgcggtcatgcgcccacctcctcgccgcttttttctgcttcagtgccttcggccttttcgatcggtttacgcagagccagcagcaggatcaggatgcatcccatggagggcagcaaaaagctgccggagccaaaaaacaccagacacgccaatggggcggcaaggccgatcagggcgctgtagtgctgccggtccttttcccactggttgagaaagatcaccgtgaacatggcggtcatcacaaagtccacaccctcggtgctgaaaggcagcaccgagcccaccaccgcgccaagaccggcactggccacccagtagaactgatccagcagggtgatgaagaacatgaaccagcccctgtccaccccttccggcggctcggccgaacaggtgatggaaaaggtctcgtcgctcatggcaaagatcatataaaagctgcgcaggccgtagcccttgtagcgttccagcatggcaaggccgtagaacaaatgccgcgcctggatcatcagcgccatcagaaacgccgaaaggggtgagaacgcgctcagcagcaggcttgccagcacaaattccagcgaaccgccgtacaccacggtgcccatgagcatgggcatccacactggcaggcccagcgactgcacataaatgccatagcccatccccagcacaaaatagcccgccagcaccggaatggtctgcggtgcggcggcacgcagtgcccgccatacggtgctctgccgccttgtcaattgttgttcggttacgtgttccattggtctttccctcaaaatacgatgccggtttcctctttggcctcattgccgccgataaacccattctctcgatatgaatatgtctgtattataacaggtctcacggcttttgcaaaggtgtatccccactgcttttggcagaacgacagatcttttctttaaattttatgcaatttttaacggatacaaagtgactcgcggtcagtgctttattattttaatgcagtaaaggttctttgcaggatcctgttcctgaaatatccctaaaatgccggttgcgctttcgtcatactcgtttgacagatgccgtcttttccggtatcccgtccgtatcgcaaggacggctggccgaaaatacccgccttttttcgttcattctgtatttagcgggaggacattttatggcaaccatgaaggacatcatccagagcccgctgccgccggccctgttcggctccatggctctgggtctgttcgccagctctgccagcggcagcaaggtggtcaagggcggcatcaagggcgtgctgccggtgctcatcatcatgacggtgctctccctcgccgcacgccttgcaggctacggctccgtgctgggtggccttgtgggcatcttcatcatcgtgatgctgcccatcggcatccttacctcctatgtgctgtggaagaagggcaagatccaggtagtagataaagagcagaagtaaggggaaacaaaagaactcccggacggatgtccgggagttctttgttgcttattctgccttttcgtccttcttgagcatatccaactcgggcatcagctcggtgctcacaatggtgagcatctcctccagctttgcacagtcctcgggggagaagcgctctcttgcgcgctccaccacagtgtgcaggtaggaatagctgatgttgtagtaatcgatatacttctgggtggggcgcaggtgatactcgcgccggtcggtggtggactggatcttttccacatagcccttcttcaccagactgccgatcttatacgccgcgttgggggtggagatctgcatcatgcgggaaaactccgcaatggtgggttcgcccatggccatgatgccctccatgcagaaggactccaccgtggtcagcgtggcttcccgggtggcaaaacgctgaaaaatgttctggtagaaatgcagcttgaatttggtgtatacgtcctgaaatgcctgttccagcataggtcgtgtgcctccgatagttcattttatttaaaaataccacgttttggccgcggcgcaaagcgaaacagctgaattttgggcaggaatttattctgccgcctttttgttcgtgcgcacacggatcacgctgagcaccaccagctctacggcaatggcaacggccagcaggatcagcgaggtgaacaggctgccgtttgcgccaaggaaagcctgtgcaatgcccgtgatcacatagcacactgccgcgcaggaagccgccgtaatggcgtagggcagctgggtggacacatggttcacatggctgcagtgggcaccggcggatgccataatggtggtgtccgagatgggggagcagtggtcgccgcagacggcaccggacaggcaggccgcaatggaaatgaccagcatctcgccctccgggaaggcatggcacacgatggggatgaggatggagaaggtgccccagctcgtgccggtggcaaaggcaaggaacactgccacaaggaagatgatgaccggcagcatgtactgcagcgctgcagcagagccactcagcaggttggcaacgtaatattttgcgcccagcaggccggtcatgccggacagggtccatgcgagggagaggatcagcatgggactgaccatggccttgaagccctcgggaatgcaggcggcaaagtcctgaaaggtcatcacattgcgcacgcggtagaacacaaaggtgaacagcagggcaatgctgctgcccagcaccagacctgcagaagcgttgcagtccgcaaaggcggtaacgaagtccacgccctcaaagaagccgcc

SEQ ID NO: 889 - DNA, 17073 bp, unidentified
  source 1..17073: mol_type = unassigned DNA
attagtaccggtttctgaagattggagggatgttcaggagggatgtaagaaatcccgctccgacaaactttcaaaattcaacgaacactcgtgaatttctcgcacagacacgaaaagtcacgaagcggattttgagtccccctcgtctgccattccgacacaccggctgatatgcaattcaaaagaacgttactattatagcggattctgcgcacaaaatcaagactgagtttccggcggaaacacgtggactgttcccgggcagagcgggcagcagacggccggaaaactgcactccccaatttgcgtcgctttgtgcggcacagtacggtgtctgatgaggaaatttgacaaaaataaagagcttacgttgattttacaggatcaaaacgacacattccgcaccgcaggctgcaaggggtgaagattgacgtattctggtaaaaaatagtataatgttattcgtgaaggaatgccgtgcggcccaaaacgcgcggttttgcagcgggggatatgcgatgatgagcaaaaaagacagaacacgccagcagatggaagaggaaatgcgccagctccgcaaggtgttcatgacagtgcgcctgatgaaggcggacgaggtgcagggcggcaaaaagggcagcgcgccctgctatgcccagtggcggcgcagccgtccgtgtgaaaactgcgtggcaaggcaggcgctggaaaagaacacccggaaaacaaggctggaatactttgggcaggagctgtacgagatcacggccagctgtgtgcaggtggatggccaactctgtgtgctggagctgacccgcaagatcgaccgcagcgttctgttggacccggaaaacggtgagcggctgctcaacagcattaccgacgagcgggaaaagcgctaccgcgacccgctgaccggtgcctacaaccgcacctattatgatgaaaactaccgctaccgcagtattaccgccggtgtggcgatgctggatatggacgatctgaagttctccaacgatgtttacggctccggtgcgggcaacagcgtgctggaaacggcggtaagcaccatccggcgcggcctttcggaaaaagaccgcctgatccgctacgacggcggcaggctgcttttgctgctgccggacatccggcaggaacagctcagcccgcgtctggaacagatccgtctgcagctgcaggcggccagcgtgccgggctactcccgcatccgcatgtcggccagcattggcggcgtgtggatcgacgacgaaaatgtggacgatgcggtgcagcacgcggaacggctgatgcactatgcacgcatccagaaaaacaccgtgatcaccgagcgtcagccggagccgcacgccctgcagcccacccacagccgccagagtgtgctcatcgtggacgactcggccatgaaccggatgctgctcagccagatgctgaacagccagttcgacactgccgaagcggcttccggcgaggactgcctgcgcctgctggaacagaaccccaccggcatctccgttgtgctgctggatatccacatgaccggcattgacggctttaccgtgctggaagccatgagccagcgcggaatgctggaagagatcccggtcatcatgatctccagcgaggacaatgtggacacggtgcgccgcgcctttgatctgggtgcgtccgattatatcagccgcccctttgatgcaagggtggtgtatcagcgcattaccaacaccatccgcatgtatgcaaagcagcgccgcctgagcgccatggtggcggatcaggtgtcgcaaaaggaaaagcgcagccaaatgatgatcggcattctgagccgggtggtggagcgccgcaacggcgagagccgcacccatgtgcagcacatcagcaccctgaccggaatgctgctggaccatctggtgcaaaagaccgagacttaccccctgacgcaggagatgcgccgtaccatcagcatggcctcggtgctgcacgacattggcaaaatggagatcggggagcaggtcctgaacagcccagagccgcgcacgccggaggatgaagaaaccatgcgccagcataccctgctgggtgcacggatgctggaagagctggatgcctaccgcgacgaagattttgtgcgggtagcctatcagatctgccgctggcaccacgagcggtacgacggcagcggctacccggaccagctggttggcgaacagatccccattgcggcacaggtggtcggccttgcggatgcctacgaaacgctgaccactggcagcggaagccagccgccggtaccctgcgcgactgcagtgcagatgctttgcaccggcgaggccggggcgttcaatccggtgctgctggactgcctgcgggagatcgagaacgagatcgacgatgccatgcgtcgtcggccggagaccttataaatcagaccggagagcagcccgaacgggaaaggccctacggtttcttctttgtccagatgtgaaaacgaaagtccagtccttgcccgcaggcgcaggctgtgttacactgtaaaaaacacagtcggaaatctgcaaaaaacaggaggagatcacttttgaaacatctgcatcggtttgtgcgccgcgctgcggcgtttgtgctggcagcagcgctgtgcgtttgcgtgctggccccggcggcttcggcagccaccactatgggtggcgcggacacgaccctgatccctgccgaggaggaaaactgccttgcatggctctttggcaccagtgataccatcaccatgccttacctcaacatcaagggaaaaggcctgcagcgcaatgtcacgctgaaccttgtggactgccttgtgggcattacctacacggagcttggctccattggcagctatgtcagtgccagcgccgcccagcaggcgtggaaggcgcaggcggtggccatccattcctatctggaataccacaagcagtacggctcctcttccaatgcgctcatctacactccggtggatcagatcccgtcctcggcacgggaagccatccgcagggcggtggaaccggtgaaaaatgagatccttacctacaacggcagcgtctgcgacgccgtgtggtcggccagtgcgggctataacacccagaccggcgtgtacggcacctgctccagccgggacgcatggggcaccgatgtgccctatctgcagagcgtggagagcccctacgaggagcagtaccacaacaagctgcgccgggtcatcggaaaagattatacctataaagagtataacgacagccgcaccggcgagccctacatcagcgccgacaccacccacaaggatctgggcggctttgtgcagtacaacacctttgtttccaatggccgcagctaccgctatatcggccagtttgtttcctcccgctactgcttcgactttggcgcggacgaaagcggcactccctgcatgacctattacggctttggccatggcgtgggcatgagccagtgcggtgctgtgggttacgcacaggagcagggcatgggctaccgggagatcctgagccactactacacgggtgtgagcatttccacttccagcagctccggcggtgggctctttggctggctgcacagcctgttccactggtaagcagtggaaaactgcaaagaaatgcgcgcaaaaccttctcaaatcatgccggatttggtatactataaatcgtgtgattttttgagagatcattttaagataaaaaagttccataggagcggagatcggaatggatcaggaaaaagaaaccaaacgacaggccgagcgctgccgtgcactggcgcagcgcatcgtgcgggagctgacccctgccagcattcaggtgctgggcggcagcggcgcactggccgaagcattggaaaaggccggcgcacagctgctgccggagaatgcagagcagggcaccgctgctctgctggtggtggaggacccggaatgggtggatctgcccgcactgcagtgtgcacaggtgctgctggtatgcaccgatgcatcggccatggctgactgtgcaaagcagttggccgcacagggcctgtaccgggattttgagtggaagaaccgtggcaaagcccagcagaccgcgctgttctgccgcagcgccgctgtgcaggatgcacagcagctgctggcaggctacgagatgacgctggacgatctgcgagagcggatgcagcaggccgagcgcaccggcgaagagcagacggctcagctggaacgcctgcgcagcgatctttcgctgagccgcagccatgagcaggatctggaaaagacactgaacaatgtgaccagctctactttctggaagatgagctggccgctgcgctactttgtcagcaagggccgtcagctggcacacaccttcccgccgttcgtctttctgggccagctgcgtcgggtgggcatttccggcgtgcgtgcgcaggcaaaggccaaaaaggaatacgcgaagctgttcccgggcaggaccatgcgcgccgaccgctttgccagcgcagagctgctggtaaggcaggcggccgaccagcccgccgcgccgcgcatcagcatcgtggtgccgctgtacaatacgccgcagcagtttctggtggagctgctggactcggtgcagaaccagacctatcagaactgggagctgtgccttgtggatgccggacaggacgagacggtgggccagaccgtagcagcccgtgctgcggaagacccccgcatccgctaccagaagctggaaaagaacgagggcattgcgggcaacaccaatcagggctttgcactggcaacgggcgagttcatcgccctgctggaccacgatgatatcctgcacccctgtgctctgtggtacgtggcacaggccattgccgaacagggcgcagactttgtgtatacggatgaagtgacctttgagggcgacatcgaccatctgaccgtttaccatttcaagccggattatatgctggataatctgcgctccaacaactatatctgccacctgagcgtgttcagcgcaaagctgctggccgctgtgggcggcgatgagcgtgcagcctacaacggcagtcaggactatgatctctacctgcgcctgaccgaaaaggcgcacaagatcgtgcatatcccgcatctgctgtactactggcgctccagccccaccagcgtggcaagcaacatttcggccaagacctactgtctggaagctgcggtcaaggccctgtatgctcactacgagcgtgtgggtgtgccggtggatgaagtttccatgatcccgggtacgccgggcttctataagacggactataccatcacaaagccgggccgggtcagcatcctgatccccagctgcgaccattcctccgacctgcgcacctgcgtggagtccatctaccgcaggagcacctatgaggatcttgagatcatcgtcatcgagaacaacagcagggagcctgccaccttccgctgctatgaaaagctgcagaaggagcacaagaacctgaaggtgatcacatggcagggcaccggcttcaactacagcgccctgaacaactttggcgcaaaggaagccaccggcgaatacctgctgctgctcaacaacgataccgaggtcatttctccgcgctggatcgaggaaatgctcatgtacgcccagcaggaccgtgtgggctgcgtgggcgcaaagctgctttatccggacaacaccatccagcacgcgggcatcggcttcggctttttgacccttgcggcccacatgcacaagaacttcccggtgggccaccccggctatatgggacgtctggtctatgcacaggatgtgtatgcggtcactgccgcctgcctgatggtgcgcaggagcgtctacgagcaggtgaacggtctggacgagagctttgctgtggccttcaacgatgtggacttctgcgtgcgcgtgcgcgaagcgggctataccaacgtgttcaccccgtttgcacagctgtaccactacgagagcaagagccgtggtctggacgagaacccggtcaagcgcaagcgctttatctcggaggtggagcgcttccagaagcggtgggcaaagcagctggccgcaggcgacccctgcatgaacccgaactttgacctgatgaaagaggacttcagctttgatatcaaaccgctggagtaaaaccctctcagtctgctgcgcaggcagctctcccgaagggcgagctttatgaggaatttttgattgaaaagaggaaccccggtggagctttctgcttgtattgtagtttataacggcgcggatgaagcgctcagggcggcacagaccgtgctggactgcacccgccgccacccgctgacgctgtatctggtggacaacgccagcccggacggcagcggccagtgccttgcaaaggccgcgaaggacggcaccctgcacatccgcgaggaccagaaggtggaggtgctctgccgcacagagaacggcggctttggcaccggccacaacatggtgctcagtctgctgcaaagccgggtgcactttatcctgaacccggatatccagctcactgcggatacgctgagtgaccttgcggactggatggcacagcaccccggcgtggtgatggtgcggcccgcactcaccttcccggacgggcggccccagcgcctgccgctgcgccggtgcagtgtgcgggccatggtgtaccgccagctgccctgcctgaaattctgggcaaagtacaacgagcgctatctcatggcggacaaagacctgacaaaacccaccgagatcgagttctgcaccggcagcttctcggccgtggacactgcggtgttcaaggatgtgggcggctttgacgaggactacttcatgtacgtggaggatgccgacctcacccagaagatgcgcacccggggcaaagcgtatctggtgccccagtatacggccatccatgcatggcaccgcgccgcgcaccgcagtctgaagccctttttgtggcagctgcgcagcctgctgcgctatttctccaagtggggctttgcgtggtaactcccccagtcaatgcctgcggtattgccagccccctcggagagggggccttttgggcggaacaaatgcgagattgaaggagtttcagaacggcttttccggaaaatttttcgggaaagccgttctttcttgctttttgtgtgatttgatagtaaaataaagtgaactgctatcccattttgccgttccgggcaggggagagcggctcctgaatttgtttacagcggacgcagctccgctttgaatccatacgtcatccgggcggtctcctgtctgggcggcgtacagctgcacaacttttcaatctattttaaaggagtgcacaaatatgaaaggtatcattcttgccggcggtgccggcacccggctttacccgctgaccatggtcaccagcaagcagctgctgccggtctacgacaagccgatgatctattaccccctgtccacgctgatgctggcaggcattcaggacatcctgatcatctccaccccgaccgatacgcctcgctttgaggcgctgctgggtgatggcagccagtacggcatccatctgcagtataaagttcagccctctccggacggtctggcacaggccttcattctgggcgaagagttcattggcgacgactgctgcgccatgatcctgggcgataatatcttctacggcaacggcttctccaagatcctcaagaccgccgccgccaatgcggaaaacaaaggccgctgcaccgtgtttggctactatgtgcaggacccggaacgctttggcatcgtggagttcgacaaggacggcaaggtgctcagcgtggaggaaaagccgcagcatcccaagtccaactacgccatcaccggcctgtacttctataacaaagaggtcgtgaagatggcaaagcaggtcaagccctctgcccgcggcgagctggagatcaccaccctgaacgacatgtatctgaagaaggacgagctggatgttcagctgctgggccgcggttttgcatggctggacaccggcaccatggacagtctggtggaagcagccgattttgtgcgcatgatcgagaagcgtcagggcatcaagatcagtgcgccggaagagatcgctttcaagtacggctggatcgaccgcgacaccctgctggaaagcgctgagcgctacggcaagagtccttacggccagcacctgaagaacgttgcagacggcaagctgcgctattaagcaaaagaaaggcatacccatatgaaaatcattgttaccggctgcaagggtcagctgggcaccgagatcctcaagcagctgcgcgaaggccgcagcgagatcggccccatccccgaaaaactgctcaatgccacggtgatcgccgtggacctgccggatctggatatctccaactataagatggtggacgagttcatccgccgcaaccgcccggatgtcatcatcaactgcgctgcctacaccaatgtggacggctgcgaagtgaaccatgatgccgccttcaaggcaaatgccatcggcccccgcaatctggcacaggcagcggaaaagaccggtgcacgactggtacacgtctccaccgattatgtgttctccggccgtgagaacggcggcgttgcacaggacgaagccaccattcccggccccatcagcgcctatggctctactaagctcatgggcgaaaagtatgtggagcagttctgccaccgtcacttcatcgtgcgcaccgcgtggctctacagctactacggcaaaaacttcgtcaagaccatcgtgaacgcaggcaagaagtttggcaagctggaagtggtcaatgaccagtgcggcaaccccaccaacgcggtggatctggcccacgagatcctgcagctgtgcgtgacccacgagtacggcctgtatcactgcaccggcgagggcatctgctcgtggtatgattttgcgtccgagatcatccgcctgtccggcgtggatgccgctgtggcaccctgcaccagcgaggaatacaaggcaaagcacccggaaagcgccgaccgccccaagtggagcgcactggacaaccggatgctgcgctgcaccgtgggcaacgatgtgcgcgactggagagacgctctggcctgcttcttcgcccactgggacggcgacaacgggatgaaagactgaaaagaggaaattgaacctatgaaaacatatctgatcaccggctgcgccggttttattggctccaactttgtgcattatatgctcaagaaatacccggagatcctgctggtcaatctggataagctgacctacgccggcaatctggaaaacctgaaggatgtggagggcgacccccgccatgtgttcgtgcagggcgatatctgcgacaaggagctggtggaaggcctgttccagaagtacgatttcgattacgtcatcaactttgccgccgagagccacgtggaccgctccatcaagaaccccgaaatttttgtgcagagcaacgtgatgggcaccgtcaacctactgcagcgcgccaaggaagcatggtatgatgccgatgccaagacttggaaagagggcaagaagtacctgcaggtgtccaccgatgaggtgtacggcgcactgggtgcggacggctactttatggagaccacccccctgtgcccccacagcccctattcttcctccaaggccagcgccgatatgttcgttatggcattccacgatacctacggcatgcccgtgaacatcacccgctgctccaacaactacggcccctaccagttcccggagaagctgattcccctgatgatcaacaacgtcaagcaccacaagcagctgcccatctacggcgacggtatgcagatccgcgactggctgtatgtggaagatcactgcaaggccatcgacatggtagccaacggcggcaagatcggtgaggtgtacaacgtgggcggccacaacgagcgccccaacatcttcatcgtcaagaccatcatcaaccagctgcatgaccgtctgcaggacgagggcatcagcgaggacctcatcaagcatgtggccgaccgtctgggccacgaccgccgctacggcatcgaccccaccaagatcaagaacgatctgggctggtaccccgagaccccctttgaaaagggcatcgtgctgaccattgactggtacctgaaccatcaggagtggatggaccacgtcaccagcggcgattaccagaactactatcaggatatgtacaagaataagtaacagcctgtagatcaagcaaaaccaaaagccggacagcccgcaagctgtccggctttgtttggttcaaggggtgttcttccgctttgctatatggcaccttggtcttgccggcggcgcgaaagccatttcaaatcgtcccgccttgggtggtgtctaccacaaaatccgccgtctccgcaatgtggtactgggcaaaatagccctcctccagcggcacccaccgggcggcaaaattggcatatcgctccccctcccgcgcctgcaggcggcgggtctgctcttcttttgcgcaggtaaggaacacccgcagcgtttcgtaaccggtcagcagcgggtggtggctgtagctgccctccaaaatcaccagcggctgcgcggccagctcccgcgcgggcaggtacgcaccctcgcggcaggaataggcacggtactgcaccggctggccctcgtaggctgggcgcagggcttcgtcccgcaggcgggcaaggtccatattggcgcagggcgttttctcccagccgcggatgcgctgtgcaggcggcaggtaaaaatcatcggtgtgcagggtgatgctggccgggaactgccgggccagcgtatttgcaagggtggtcttgccgctgccgcagcggccatccagcgccagcaccagcggctttgtgggctgctgtgccagtgcggcggcaagaaggaagatcaggcccggcggtgcaatgttctgtggcatggatgcgtgctccttttataagatagaactttctcagtcattgctgcgcaatgccagctctcccgaagaggagagcttttgaatgcgctgactctataaagagctcccccttcgggggagctggcgcgttagcgcctgagagggttttccttattataccataccgtgcctcaaaacggtaggatgcgaaaaaaacagaccaaagcaaatgaaggtttgttacgaataacttttttcaagaaaagtgttgacaacggcccaccgctgtggtaagatacagtcacgttagaaataactaaccacaagaaacagatcggcaggccgaagccttgaatgctccgtgcaaagctgcttcttttttggaatcagggttagtaatatctaacttataaccacggcgcatccggggaacaatagcccggagaaacaaggcgggagggcgcagacatggaacgtaattttgaaacggtcatgatcgaacagtgtgccccggtgctggcaagcctgaaaccggcaggcctgttccgctatgagacccgcgactgcgccgaccttgcgcgccgggtgaaaaactggaacactcagctgaaccccaagggcctgcgtgtgcgggtgctcaagggctgcgtgctcaaccaccggtatcttgtgtatgtctaccgcgaaagcaagctggctgccgtgctggcagatgaaaaggtgcagagctttctgcggcaggagggctaccgcctgccggaagcgggcgaagcaccggatgtgggcaatatgctcactcagctttcccgcaagctgtgctgttcggcagaatttccgcatgagatcggggtgttccttggctatcctctgggcgatgttgtgggctttatcgagaaccgcggcaagaactttacctgctgcggctgctggaagtcctatggcgacccggatgcagcgcagaagcactttgaccagctgagcaagtgcacagcagtctatctgcggctgttccacagcggaacacccattctccgccttgccgtggcggcttaaaatttgtcattctcttttcaaatactctctttttatcctggcacctgctggtgtccacgcactggcaggaaagaaatcctccttttgacacgcggccgcgcggtgcagactgaccactgtaccacgcggctgtgtcatttgcagcaaaagagcacagcagagcagagaaaaagctttgtgatagtttacaagatgccgccaaaaaagaacaagaaaatgtaaacaatggctaactttaattcaataatttgagttagttgttgttgattgtggtgaaaaaacggaaaaaatcgggcagaaaaattgtttgttcatatgaactaacttttaattatgaaaaaactattgacataaaaggttagtgagcgtaaactatccacgttggtagttgcggctgactaaccgcagcgatatcccagattcaaacaggaagggaagcggaagtatgatgcctttgacaatggcaaaagcaggggagaccgtcaccatcaaaaagatcaccggcaaggacgagatccggctgcatctggcagagctgggttttgtggtggacagtgaggtaacggtcgtcaacgagatcgcaggcaacctgatcattcaggtcaaggagagccgcatcgcgctggacaagaccatggcaaaccgtatcatgattggctgaacagtgcccaggcgctgtttgggagctgctccgaaactggaatagtctctctataaagacaagcagaggaggatggttaagtatgaaaactctgaaagacgtaaaggtcggcgagactgctactgtggcaaagctgcacggtgaaggtccggtcaagcgccgcatcatggacatgggcatcaccaagggtgttgagatctatgtccgtaaggtggcacctctgggtgaccccatggagctgaccgtgcgcaactacgagctgagcgtgcgcaaggccgatgctgaaatgatcgaagtagtctgatcccaaagggaggaaggattaagcaatgagcattaaaattgcacttgccggcaacccgaactgcggtaaaacgaccctgttcaacaatctgaccggctccaaccagtatgtcggcaactggcccggcgttacggtggaaaagaaggaaggcaagctgaagggcgataaggatgttatcattcaggatctgcccggtatctactcgctgtctccgtacacgctggaagaagtggtttcccgtacttatctggtcaaggagaagcccgatgccatcctgaacatcatcgatggtaccaacattgagcgtaacctgtacctgaccacccagctgatcgagctgggtatcccggtggtcatggctgtgaacatgatcgatctggtgcgcaagaacggtgataagatcgacctgaagaagttgagcgcagagctgggctgtcaggctgttgaaatcagcgcactgaagggcgagggcaccgaggctgctgcaaaggctgctgtggctgctgcaaaggctaccaaggctgctgagctgccccatgtgttcaccggcagcgtggagcacgccattgcccacatcgaagagtccattcagggcaaggtggatgaccgcttcctgcgctggtatgccgtcaagctgttcgagcgcgacgagaaggtcatggacgagctgaagctcgacaagagcctgaccgaccacatcgaccagcacatcaaggactgcgaagctgagatggacgatgacgctgagagcatcatcaccaaccagcgctatgcatatatcaacaccgtcgtgggcaaagctgttaagaaaaaggcccgcgtggagcacctgaccgtttccgataagatcgaccagatcgtgaccaaccgtattctggctctgcccatcttcgcactggtcatgttcctgatgtactccctgtccatgggcacctccattgcagacggcggctgggccattggtacctttgccaccgactggaccaacgatgtcctgttcggtgaaattgttcccaatgctctgggcggcttgctggagagcatcggcgtggcaggctggctgtacggcctgatcatggacggcatcgttgccggtgtcggcgcagttctgggcttcgttccccagatgctggtgctgtttttcctgctgtccattctggaggatgtgggctatatgtcccgtgtcgccttcatcatggaccgtatcttccgcaagttcggcctgtccggtaaaagcttcatccccgtgctggtcggtaccggctgcggcgtgcccggtgttatggcttcccgtaccatcgagaacgagcgcgaccgccgcatgaccatcatgaccacctgcttcatcccctgcggcgcaaagatgcccatcatcggcctcatcgcaggtgcgatgttcggcggttcttctctggtggctgtctctgcttacttcattggcatggctgccatcatctgctccggcgtgatcctgaagaagaccaagctcttcgcaggtgatcccgctcccttcgtgatggagctgcccgcataccatgtgcctgcatggggcaacgtgttccgtgcaacctgggagcgcggctggtccttcatcaagcgcgcaggctccgtcattctggccgctaccgttgtgctgtggttcctgcagggcttcggcttcgagaacggtgtcttcggcatggtcgaggatcaggacaactccgtgctggctgcgatcgctaccaaggtcgcatggatctttgcacctctgggcttcggcaactggcgtgcaactgtcgcttccgtctccggcctgatcgcaaaggagaacgtggttggtaccttcggtgttctgtatcacttcggcggcgagctgtctgagaacggcgatgagatctgggctgctgttgcgcaggactacaccgctctgtcggcttacgccttcatgatcttcaacctgctgtgcgctccctgctttgctgctatgggcgccatcaagcgcgagatgaacaacggcagatggacggccatcgccattggctatatgtgcgctctggcttactgcgcagctctggtggtttaccagctgggcggcatcatcaccggtgagattggcttcaacttcttcaccatcgtggctgctgttgttctggttggcttcatctacctgctggtccgtcccaacaagtatgctggtgacaacgaggtcaagatcgacgtgaccaagatctgatcgaaccgcatgacattgtgaaagggtgtgttttgtatgatggaattcctcgctgcaaattttaatctgcccacgatcattgtggcagtcatcgtgtttggcggtgtgggctggatcacatggcactcccacaagcatggcggcggctgcagtgggtgcagcggctgcggcgaaggcggctgcaatggcagctgcagcggttgcagcggctgtcactgagcattgaaatgatccgcaaagggcgcgggctggaagtttcggctcgcgcccttttttcagaaacaaaaagttagctttggataacattggaaaatctatcagaaaagagagtgatcgggatggaacttacgtcggcgcatctgcgctatctgctggcgatctacgaagtctcacagacccatctggatatcagctcccgcagcattgccgaaaagcttggcgtgaccaagccctcggtggtgcgtatcatgaatctgctcatggagcgcggcatgatcgtaaaggagcactacggcaagatctatatgacagaccgtggcatctgggtggcaaaacaggtggatcgggagctgaaaacgatcctgacccatttcccaccggtcagtgagccgctgagcgaagaagagcgctttaccgctgcccttgccatgaccagtgcactgccggagcgcatctttaccggcgaatatgagcgtctgtttggcagtgatgcagaaaaagcagaaacggagaaagcccagtgatcaacaaaaaattgctgtcctttgaccgcggtgcgctgcgctatgtgggagccaatgtggctttccaatggctggggatgctgtgcaacgtgatctttgtgcgggccattgcccagctggtgggcgcagcctttgcgggcagcctgaccagtgcacagctgtggcagaaccttgtgctctgccttgccacggtgcccatgcgctttgcctttaccatgctggcatcggccatgagcgatcgggcttccaaggatgtcaagcgcaccctgcgcagcagcatctacgcaaagcttgcccgccttggccccaactacaccgagacggcggccaccagcgaggtggtgatgctggccagcgaaggtgtggagcagatcgacacctactttgcaaaatacctgccgcagctgttttacagcctgctggcacccgttaccctgtttgtgctgctggtgggtgtgcacgcacggtcggccatcatcctgctgtgctgcgtgccgctgatccccatgtccattgtggcagtgcagaagtttgccaaaaagctgctggcgaactactggggcgagtacaccacccttggcgacagcttccttgagaacattcagggcctgaccaccctgaaaatttatcaggccgacggctggaagcacgagcagatgaatgcgcaggccgagcgcttccgcaggatcaccatgaaggtgctcaccatgcagctgaactcggtgacactgatggacctgatggcttacggcggtgcgggccttggcatcatcagcgcggtggctgcatttgcggcaggccggctgaccctgaccgccacattgaccatcgtgctgctggcggcggactttttcctgccgctgcggctgctgggcagctacttccacattgccatgaacggtgccgcttcggcagagaagatcttcaagcttctggcagcggaagagcctgccgatggtgaccgcgtgcccggagagaatacgactctgaagcttgagcatgtcacctttggctacgagaaagaccgcaccatcctgaacgatgtctcctttaccattccgcagggcagctttgtctcgctgg

SEQ ID NO: 890 - DNA, 23795 bp, unidentified
  source 1..23795: mol_type = unassigned DNA
tgaacattttgtgaaccttccgattggggtggagaatttttgtgtcctctcactcctagaatcggaaaagggctatttcgcaaggtgttttgaaaaaagttcaaaaaatttttgagccgcccaattcagcgtgttttctgattggacggctcatcttttaattatgtatctgttagctgctgcacaatgcccggaaatgctttttctgtatcttgtaaattgctgcgttataaattccggtaagattctggcgagtcatgccaaggtgttttgccgcctctgtgaaagacagaccatggaacaggtggatgtgaacgacctttctctgcaaatcagtcaaagtagcgagcaattcttccactctttcctcacttatcattctttccagtgtgctgactgcttcatcgactccctccaggatttcttctttatactccctgtcctcacgggatggcatccactttccttggatgatctcatagttcataaaaatccgatcctcgccttccagaacaagccggatgtgccactcgtagtcgtcaaactctgcttcctcaatgtgatgtcccgccccttctgctgcatcatatttataatgtacacagtcgcggagagaaaaaactgtcaccctcttgtgcgcccggtagatcacataaccgttctggtagacattgatgctgccatgattttccaagaccttttcggtaaccactggcacaccagatacctcaagtgccttcacggttggaacacgctgttccttgtacgaagggagttcaacaagctttttcagatccttgaatgtcatcataatgtccacctttctgccttttggctgcgggcggtctgaaacaaaaaatgcagcaaaagttgtcccagacttacccgttttttttgaacgggaagtctaagacttctcctactgcatcgctatttcatgattcacttttaaagtgtgatgtttagtctctcatatatagaattgctggaagggcatttcgcaaggtgtttttgaaaaaaaattaaaaaaaccggaacaggatgagttactcacaggcgcactactgcgctgcattcgctcattctgttccggcctatatcacatattgctacggtatcgctctaacaaacagatattgtattgtagacccaaaagaacgtctgatggagctggtcggctaactaagtgccgcctaagattccacctctgcgctttcagtgtccgatgaagcactatgcttcaggcttctttccggcaatcctccgccgtggcaaattcaatgttcttcacaggcagaccgtgaatgtactccaccagagattcggcagaaatataatcttcacagccaccacgcttgatctggagcatattctttccatcaacgacactgcgattcccgatccgcagcccttttggggtgcggatttcatgttctccgttgctcatcttttcacggcctcctttgtgttggtttaagtttcttcttatcttctattcaacttcaccttttgaacttccgctcttttttcatctttttcatcttgcatatttacgatttttacggtataataattcaaaagatgatagaatatagcatatattataagcaagtcatatcgccgtgtcaagaggaaaatgtgaaaatttattgcatcttactgattgaatatttacaaattccattgcacattgttacagcacgataactactccatagaaaggttgcaaacatgaaatttggggagaaagttcgcgatctacgaaagaaacattctttaacacaggacgaattggcgcaatgtctgggtatcaacaaacgaacgatcatcggatgggagcgtgatggccgctatcctcgcagtgttgaaatgctcgaaaagatggctgatatattccatgtacctttgacctatttacagccggatcagtctttatttattgaacgtgccgccgaagcctacggaaaaaagggcaaaatagaagcccagcatctcgcatttgagcttactgagctatttgccagcggagagttgaccccgcaggatatggacggcattatgtatgaaatgcacaaagcctattttaagtatcgagaacaaaaacgagaaaaggaacgaatcatgaacctgtaaatcactgttctattcactatgccatccccgaaaggagattacattatggattctgcatttattcaccaagctgctaatgaacttgtacaaaatgtcggaactcgcaacattaaacagatcgcgcgcagttgtagtctggacatcaatgaaacatctcgcattaaagatatgttgggtttactttcgctctattttgataagccactgatccttatcaatcgccagctggacaaacagacaaagcagatggtgtgcggctatgcgctggggcattatctggagcatcagctgctcatggacttgcataccctggacaagtttctgaccattaaggacaagcacatccttctttacgagcataacgctttcacatcccacctgatgctggacagtgatgaagtctatcaaatgacaaagcgtgggttggacgctgctcagattgccgctgctaagggaatccacctcaatctggtgctggtgaagctgctggaactgcatcatctggggtacgatctgcgtcactaccacgcccagcatcatgcgtttatcaagcagttcaaccttccggcacattttcagtttgatgtggccgccggatgaacttatgttcttataactctaaaacccgtaatgaacggcacgttatgcctgtccatcacgggtttttcgtgttatttcagttttgcgaggatttcatcggcactcatgccttcggcaagcagctttttcagaacggactctgcttctgtcttttttgcttcttctgcagctttggcatctgccttcgccttttttgcttccagcgttgccacttctttttcggccttcttcagagcagtcttcttctctttcaggtcagcctttaaagtgtcaatgttggcggtgatggatgcaatctcagcagtcaaggaaacaatagattcctgcttctccgcgatctgagatgcgtagtcattggtggtattggtttttggacggtttttgctgcctttcgttctgggcattgtgataacctctttccttcttcaaaatattaaaagattactcgttatcgttacctttattttcatttccatcatgcgagaactgaagataatttgtaccccgcatggcatctgcatgatactcttcgctattcctaggactcgattccgctgtaccccgaaccaaacgctcatccattggtccagtttctctacatgcttcaagtatactcttcatatcttctctatctggcatattacttttccccttataatcccaaaaaaatactaataatcgctaacgcaatcaaagcaacaatactcacgcagaatgcattaacgcacctattaaatgcggtatagcctttttctaatactgcattgttcttcgatgtatgttgaacataaagccttccaataaatctcactgctgttgtgtctttttcatctggaactccttctgttaatagtaatccagcatccaatctttcaaatctcacactcttcaataaactaacggtcataacaagcattccaacattacttataacagccacaacaagtaagattgtatatataattattcctaacaattcagacccactttgaggcacatctaattttcctgccttttcaatttgcgttgttaataaagcaaacacaaatgcgcaagcagctaataaaatgtataccttgttttctagtttttccgctcttgtaacacaataatcatattccgcctttattgcctcaaaacagatatctgcacttgattctgtactttcagcatcgtgtattgttgtgtctctctctaaatccacctgatatatttggtcattcacttttacattatatctaatcatgtttcacatcttttcaccattgcatcttcacatcttcgccgaccataaaatcgttgcctgctgctcaccacgaagaggtgtgtgattattacgagcagcgcagggagctaccgctcccagtatatcacaagtctgcaaataaatcagccttgtacacgccattctccagcatcttcttgaagctgtcctttacggctgcgacatcttcgtgataggtcatcccgtaccaggtatcgttggttttcaggaccttcacagacatcttgccttcattcagcagttcaccgatgaagataggaatcagatactctgccttcagcggattgcccggcacttctttctcaaagaactctttgaagccttcttccagtacatctaaaaattccggagtcaatccccacatattcatggaaaccagagaattcacatcgactgccacaccgtctgcttctgcaccatctgcagtcttcacgatgttcttggtctccacaacctcagtcaagttgttatcctcgtccatcttgcagataccacgagtcacaccgccattatcagacagggtgttcttcagcacaaaacctgccatacaggactttccgccatttaccagatagtcatgaacggctttgaatccctctttgccatagtaatcatctgcattgatcacaataaatggagtattgatcacactctttgctgcaagcacggcctgacctgttccccacggctttgtccggccttccggcagtgttgctggaatatcgttaatatcttggaaagcataatcaacagtcacattgtgagcggagcaaatagaggcaatgcgctcaccgatgacctctttgaactctttctcgatatccttacggataataaataccacatggttgaaaccagcttcaatcgcatcatggattgagtagtccatgatgatatggtttgcatcatcgaccggctccaactgttttattcctgttccaaatcggctgccgattccggcggccatgataagtaatgttgttttcatttatttcagctccctttcacaacgttctaatactgctgcgatgacttgatccatatcgtaatatttgtattcgcccaagcgaccaccaaaaacgaccttattttctgcatctgccaacttcttatactcagaatacagcaagctattttttgtgtcattcacagggtaataaggttcatcgcccggcctccattcgctactgtactccttgctgataatggtctttggaatatcgtttccattttcatccttgccgaactcaaaccacttatgctcgataatgcgtgtccacggtgtctcacggtcagtgtagttaaccgctgcattaccctgaaaattagatttatccagaagttcattttcaaaacggacagaacgatattccaacgtacccagtttgtaatcaaagtaggcatcaatagggccagtgtaaactactttgtctgccaatgtatctaattcagatttatgttccagataatcgatattcagccgaacctcaattccatccaacaagttggcaatcatcttggtgtaaccaccaacggggataccctgatacaatgcgttaaagtagttattatcaaaggtcaggcgcacaggcagacgttttataatgaaagaaggaaggtctttacagtcacggccccactgcttctcagtgtagcccttaataagtttctcataaatatcacggcccacaagagagattgcctgttcttcaaggttctgcggctcaccagtgatttcctttcgctgctcctcaatcttggcggcagcttcttctggtgtcacgacaccccacattttattgaatgtatacatattgaaaggcagtgagtagagttcacctttgtaattagcaacgggcgaattggtgaaacgattaaactctgcaaactgcgtaatatagttccatacctttttattattcgtatgaaaaatatgcgcaccgtacttatggacattgatgccctcgatattctcagtgtaaatatttccagcaatattagggcgtttatctacaaccaatacagtcttaccatgtgtttttgcttcatgggcaaaaatggcaccatataaaccagaacccactatcaaataatcatatttcatatttcattttccttttcttataatcaatatgcccttatcggaaatttgatttttctcaatcctttagttattcccacagcaattataagtgagcccaaaatacggacaaaatagatcactgcagctcctacttctgttccaaaaacaggaataccaaatttccacattgcaactgcaagaaccgcataatttaatggttcagcccacagataaattccatatgtatccgcagagcagttcagtatttgttcatccgaccacttgttttgtaatattgggttaataaactcagcaagttcccaaatccataccactccagcaaacgacagtatcgtatttgttaatagccattgcactttaaggacacgaaaacttagcgcatacagaagcacaaacagaacagtttcaaatataatgccaatcgtttccgattcacaatatcttttcaggatttgactccatcttttccgaacatcatcaatcgaatgcccaagccaaaaccaaataagccacttaaacggatttccaaaaggaacaatttgccgagtatatttatagaaatataggccaatcaatgccattactccaacaattaaaaactgcaatccttgtttttttatgtacttaataatgatatagtccataacgaagcaacagaacagtgcttccagaaaccatagataaacagcattagggaatgcaatttgcatcactgcgctcagtaatgggtgattcatacctgcatagtatcctgccagcattttaataggtatgttccaaaccagccaaacaaatagcatcggagctaaaagtcgctttgctttcgtcacaatgagcgtccaaacagacgggtagcgttttctctttaattccatcgaaaagacaacaccggacagacaaaaatatgcaggcatatgaaacacataaatccaatccgtaagatacgttgctactctatggaatgtcgtatcccccaccatcatatcttgcatcagctgatcgtattgtattccaccaaatttagtttttattgtataataacttgcatggcctataactaccagaattgttaatataatccttaaaatatcaagatcataccgtctgtctgtctgtctgtctgtctgtctgtctgtctgtctgtctgtctgtctgtcatgattgtcctttcctcaccgatcactgtcaagtgctttttattttcttataaacttttttaccttaccaaatatttgattcacaatctctagcaccagtggctcatgcgtaagaataagaaccaaaccataacttccgaagaaaagaattgcggacagcagcaccgtaaagaaggaattccatcccagcatttttacccagacagaagccgcacatccgatagccaatgccactaccatctgtggatactggatcttgctgtaagcaggtacaatttcatttttcaatgcgccgaattggacaatccataccacaatttcagcaatcaaagttcctattgctgcacctgccgaagcgaaacgcggtatcaaaatgaaattgatgatcaaatcaactaccgcgcccgcaatttcagaataaagaacgattttttcccttcccaatggaaccaacatctggattcccataacattagtcaatccaataaagataagggtcggcataataatctgcatcggcaagactgcatttccatatgcgtctcccgacaagaagaaaatgccttcttttgcaaagattataaagtacagcatcattggaagtgcaatcaggaatacaaagttaattgccttatgcgcaatgcgatagaattcgtcaaccatcttatgttcgatatagtaggatgctctcggaagaagaaccacaccaagcgatgtaacaatgctgacaagaatcgttttgatttttaccgcagcattataatagccaacatcggcatctgttttcataaagccgagcataactgtatccaaatgcgtataaatcgttgttgcacacgacatcgcaaagaaaacagcgattggcttaaagtgccgcttaaagtgatattttcctacggggcgcatcccaatgaacttatgtgtattgataaggttaaatacactagatcccgacgcagcaatcaaagtgattgcaccataaacaacgtaatctgccttctgatgaacaaaagcaaacattgttataagcgcaataaatttgaatacaatggagcgaatcgttatgtatgtatactgctccaaagccttatacaaccactccatgccaatgacattaaaaatgattgtcaagctcacaatcgcatacaatgttctttccgccctcagacgaggtacaaaaatcaaagcgattgccaaggccgcataggaaacgatactcattaccaaattgataataacaagttcctgcgctgtccgggttaattcttccttattgtcacgaacctttgcacacgcacggataccataggtagggattcccaactgtgcaaacatcgcaaaataagaaatcaatgatgttgcaaaagatacctttcccgttccttccggcaacaaaattctggaaacatacggaaaagttatcagcggaaaaatgaatgatgacatcgttaagatggcattcattataaagtttaatttcaatgatttttgtttttttgccatagcttttattctctcacctcgacatcacatatttttgtttcataatcaagtaatgcacagaacatcgccataacaaagaactgatcatgtatataccagtgaatgtcaatatacattgttgccacctgatacaaagggaacaacagatagaaatagttattcttttttacaaataaagtccatgctttctttaatatgcacccccataatgcaacaacccataatactccaaaaaggccatacgaatacaggattgaaaagatgcctccgtctgcaaaagcaaatacgccccaatttatatggactctatatggcgtagaagcatattcatatgccattggcgaagatacccatccagcaccaaacagccatttggtttctgcattttcgagaataaagtcgatcaaatagtgtcgtacatctaacgacgtatctccattcaacaagtattctatactttgctgtaaaaatggagtattcaggtatacgatgtatgctccaatacatgcaactaaaaacactccaattttcttatatgaaacattcttccacaacataaagccaaccactgtggaaatcaatattcccataagcgttgatctaaactgttgtacaaacatcgcttcaaacagaacagcaatcatcacaataagcgaagcgactcgcttctttttattcaagaaaagattcaatgcccaaaaatatgcgaacaccataagaacaatagggaaatagaatctaatcgatcccaatctttttgtcataggtgcatatgtaaaaattgtatccgatttaatgtattgtgcgattcctatcattaactgaattatcgcaatcatgataaagctacgcaagattttaacatatgccttatcacttcgatttaatacatattgaaagacaaaataagcaaaaccatatatccaccactgcatctgccgacgaaacgaagtgatcaaacttgcgtcacgatacaaaacaacctcaaccgcagcagcaagaagtgaaagtacaaatggtgaaagcattagtagcgtaaaaccgcttttttcaatttttagaccatttccaacacaaatagcatatcccgccagcaacgccaacatgatatacgccatcaaattgtaattgttgttaactggaaccaaatataatatattctgtcctaagacgtaaaccaccacaagcaatgctattattatatctggtttatgaactttaactttcatgactttcctcagataaattcttcagcctcgaatcaaaggcgtttctatcgtattttccaaatgtatacgccgaaattccctttagaatcacattgacttttggcattcgatatttaatgttgggtttcaccaaaatacgaacacattccttcaagccttctcgacggaatcgagcagcagaacttttcgattcgtaagtttccttgttaatcagcatatttcgataaaaatagaaatacatcttgattctatttttgttttcttcatcacggattgaaagattcttcacattgaatcgtttgtgaagaacgctactctgtgccgtaaaatatgcaggcccatagtattttgttaatcgtaaagtatattcagtatcatcgccccagatgaaataccagtccaacggcaagccaatagactttactgccaccgtgttaatcagcagcgaaacaaacgtagccgatttgattttgatcatctgtttatcaagattaaaataccagtctgcatatccatttttcgttgccgaagtatccacaacgggaaggttcatcggttctccttccgggccaaagacagtgcttgcaaagaaacttgcttttgctccaatttgacttgcagagtcacacaaaccttccagcgtatgcgaattcggaatcgtatcatcatccatcagccaaatgtaatcacattcggaatatgtttgtttgattccctcataaaaaccgcccgcaccaccagtattcttttccatttttacatatcgaaaaatctggttgtcaaacactccacctttggagaacaattctcccgttccatccgtactggcattgtcaataacaacaatcttatccggcattctggactgtgccagtattgcatttaagcactctatcagaagtgcttttctattataagtaactaccaaagcatatactgtcattcaattcttacctttcaattattttatcctcattgtctaaaatcattttctttctctcatcataagacgcttgtttgccatcaatcttaaaattaaagccatgcgatatattcttttgataaaagttatctaatgtagttatttttctagcagggttgccgcaccataccccccccccacatcaagaatgctctttgtaacgacacttccagatccaataattgtattatcggcaatgctaacaccgtacataacaatgcttcccattcctatgaacacgttatcaccaattctaattttcccaacaacatctgtaaacgcagagttttcgcatttacagatagaattatcatgggtcacaaatcgcgttccgcttgaaatcgtgacattatttccaatcgaaatcaaatatggctcactcgtcatagggtcattaaacagccttgcattttctccaattttcataccctttgaacgaagcatctctatttttagaggcatcgtatctttgtgaagcgctttatatagttttgttaaaattttatatttcagtttattcatgcgttcacctttccgcttcttcctaaaatcgttctcgcaaaaagttttcccgttcgcaaaactgtatatcccggtcttttcgcaaacgctttactagtaaactggaagaatctattatacttatgctcattgaacgctgttgactgcaaattcaagtaatgctctgcataaatgtatgcctgttctgacttactcagttttgcaatatcatccttgtatttttccaaatactgaacttttgttttgtaaaagacttccgttttttgtcggttcgcgcctatttcattcttgaccagtaaaatgtctggtattgcaatcaaactgtactttctaaaataacgcaccaaaaattcatagtcctgatgtctgcggaatgatgtatcaaatccattcagttcacggacaacatcggctctcataaacaagttagagccagaggacaaagggaatcctgctgccagcgtttgcgcaataaaattgccgcttttgatttctgtacgccgacgaatcgttttcccgtcttgcgtaatttcacatccagtataaacacctgcatagttcgagtcgctgcactccgaaagagcttttacacagcgttctaacctttcaggcgcatattcgtcgtcactgtccaaaaaggcaatataatcacccgttgcagccgcaatacctgtatttcgcgcagcagaaccgttcatgttatgctcatgcttgatatagcgaatccgcttatccgctgcatattgctccataagcgtttccgtttgcttgcgcccctcggtttcagggttattgtcgtctacaataatcaattcccattccgggtatgtttggttctggacgcttcggatgcttcgacccagaagctccggcttgccataagtcggcataatcacagatactttttccattccatacctcatccactcaatgatttttctttatctttttcagcatctgccatgttcccataacaagtttgctgtgtttgattctcactttaattgcattttttctgttcttacgaataaattcatccaaatattcttctctgaatttcggatcaatcgcatcataatacttccaccaataagatgccattggaaaacttctgctcaaccacggtttctgcggctgcgcatagtgaacgattgccggacttttatatgccgaatttattacttcaatctcacttttagtcaaatttctttcactatcaggagttagaccattcaagggacaaacattatattttctgtctgcaaactgaatatgttcaaaacagactgcattcaaaatatcctgatcctgatacggatacttcattggaactctatccataaatgctttcacaaggtcgtagtctctcattgctttcaaattgaaaaccaaaacaccagcatttacataagtatctatggtatttatacccagtttcctgctatgtacaagtcgttcttgtcctttcaaactcgacaacgctggatttccggcaacaacacccgtcaaccacacatcctgtttttgagcatcgtaaatttccgacacatcacctacaacaataatatccgaatccaagtacaaacacttatcatattgtggtaggagttccggcaatagcagtctataataagttgcaggggttatataagaaatctgcatctcaacattttgaaatgcgtttttcatattaagaaaattaactttgcagttgtcgcggacttcttccagttttgaaagtacattcttccctttttccggcatactatcgggaatcataacataaatatcaaagttccattctaatttagcatttttcagcattgaatatgctgccacataagttggaactacataattttcatctgttgcaaagacaactggtatatttttttcgctcatttacttgtcctcatcggaagttcaatccaactgccgaatttgtaatcccactcttccggctcaaacggcatcaatccgctccaatggaaaaatgtcatctcgccaaaaagaatttttccattgacattgtacaaatctacccgcacttctggcattccctttgaaagtatgcccgcaatgcgaagcatctcgtcgaaattcgtcggcttctttatctctttatcagcattaggatgaccattggtaaagggcaaatggtgaaactctgtgtcaaagaaatcaaatttagtatctgttccacgatcagttgcaataaacattgctttcggcttgccatcaaagcagaaaatcttatagtcttttaattcgtagccagattcgtccaccgtatattcctctgcgataattctaggcttgacatctttatacggccactctctatgattgagaaagtaatttcttttaagacaatgttcaattttctttcgtgcctgttttaagtccaatgttgatttatctttgcaaataatcaaaccaccagaatcatgtgtacacttcaaaacaaattgattgggaagtttgtcaaagtcaatttcgtcaaagtgattccatacaccaagacatggaatcaggtgttcccttccaattcgttcttcaataaacttccgtacttcatatttatcgacaagttgggtgtaaagaggatttctgtcataaatcttcagccattgcaacttttcactatatgtttgaggattatcgaagttacactctttacccatcagatacttaaataaaattttgagatattttttatcagcttcaggactaccttgcagaatatgtcccaaagcataaatgctatataatttccactcagaaagtttcattttattttccgcccttatccatcaatttcaaatacaaattttgataccgtttactcataccctctgccgtaaaattttccataacggcggtataacttctctcgcccatttcaggcaaattctcatccaccatctgatccatcaaggctgaaagctgctccacatttccaagtttataggaatggccacactgagggtctgcttccaaaacctccatgtgctgcggaatgtccgataaaagtacaggtagcccgcaagccatcgcttccaaaacaccattaggcagtccttcggatttacttgttgccaagtaaacatcagaagcatggagatattcatttacgttggacaccttaccccggaacaaaatatttgtattcttagaaaactcgtctttcagtgcttcaaaattcgttccatcaccaagcagaagtaaaactgcatctgcatttttcttcattgccaaaaatgcggtaattgcttccctttgattttttctgtcgataaatccaccgctatacacatagatgacttttcctaacggcaaatcaagttttctccgcacgtcatctatttcgtcacagtttctttttgtatattggctcacatccacgccgttgcggatatacggaatctccatattctgacggcttctatacatttttgtcaaactttcggaacacgtcacgaaaggttcgcctgctgccatacgtttcttaatcaaattcaaatcgagaaaagccataactgttccgggaattttcccatagtagtcaggataatcctcataacaataatttctgagcgtaacaaagtgaattgctttcttatagccgagcgtcattctgtacggcggcataccgacaccctgcacaatatccggctgcaactgctctaaaagttgtccaacctctttctttccaaagagaacagactttttcttgctcatgtttgcagacagtacggggatacccagctttttatactcatcaatcattgaattgtctgcatcttccggccacacagttaccaaactaggctcaaagacctctttgtccatattgcgaataatattcagtgtctgtttgattgggccattctttttacaatttgtttctacaaaggtaactttgatttttctcattatgttcgttgcctttctttatttgttaaacaactcatctacgattgactccaagccctcattgaattttgcattgttgctgctaatcccatgacccatgcctgctacaatccgatcgtaattggttataacatctccaagggtttcaatatcttctacttcaataatcgttcccatccgttttgcgacatttcgtgcaaattccacctgatggtcattaacgtgttcattgaactgatgctgccgtggcacaacaataggtgtttttccaatctgaagcggcataataaaacttgctgggccaccgtgggtgattacaatgcgcgcatctgctacattcttaatcatttgctggtacggaatcaacttgctccactggcaatattttggttcgtatgtactgaaacccgtctgaataatgacatcttcggttataacgccatctttttttaattcatccaccttttgaatcaaccgattaaatggttgctcatgtgttcccactgtcacaaaaatcatgttggctttctccccccctactatcttagaatatacttccgagatttactgctttggggtaaaccttcttctgctcatcccattgaacgacaaatttatcagcaatagggtaaaccatctttccagtcatagttggtttatcaatacgatcaaacacctcgatgtataccacttttgctcccatcatttttccgatatagaaaaacggaacggctactgctgcaccacaggaaacaatcaaatccggcttttccttatgcagaacatcccatgcaattttggtgttttttaccaatgctttcaaactacgatttgtcgggtaatagcacggataaactttttctccctcaagcagactacgcgcatcctctttatcaaacgtaacccaaaaccgctctttatccttccaaaacggtttcaacatatataagtgcgtcaagtgtccgcctgacgatcccactaaacatactttcatcttcgtactcctgctaattagtcacggcggaaaatatcgcgcgtataaaccttatccttcacatcatccagacacttatcatagcggtttgcaatgattgcctgactctgctttttgaactcatccaagtcattcacaacaagactgccaaagaatttctcgccatctttcagggtcggctcataaatgatgaccgttgcacctttggccttaatacgcttcataacgccctgaatagaactctgccggaagttatcactgttgctcttcatcgtcaaccggtaaacgccaaccacaacttccttttccttgctctcatcccagctatcgtttgcttcataagcaccagcaatttcaagcacacgatctgcaataaagtccttacgggtacggttcgattccacgattgcttcaatcaaattttccggtacatcggcgtaatttgcgagcagctgtttagtgtccttgggcaggcagtacccgccgtaaccgaagctggggttattgtaatgagtgccaatgcgcggatcaaggcagacaccgttgataatctgctgagtgttcagccccttcatctctgcataggtatccagctcattgaaatagctgacgcgcaaagccagataagtattagcaaacaacttaactgcttctgcctcggtaaagcccatgaacaaggtatcaatgttttccttgattgcaccttcctgaagcaattcagcaaaagtgtgtgcagcttttaccagacgagcattatctacatccgtgccaacgataatacggctcggatacaggttgtcatacagtgccttgctctcacgcaggaactccgggctgaagataatgttgtcgcagtgatatttttcacggacgctcgcggtgaagccaacaggaatcgtagacttgattaccataattgcttccgggttatactcaatcaccagtttgataaccgcttcaaccgcagaagtatcaaagaaattcttcttgctgtcataattggtcggagccgcaatcacaacaaaatcagcatcagaatatgcttcttttgcatccagtgttgcagttaaatccaattctttttctgccagatacttttcaatgtattcgtcctgaatcggagacttttttctgttaataagttcaactttttccggcacaatatccacggccataaccttatgatgctggctcagcagtgttgcaatagaaagtccaacgtagccagttccggccacagcaattttcaaatccttaaaatctctcataattactttctcctctctctttgtgtttttattttgaaaacacactttttacatactcgtagctgttaatatcgccaatgtcataccgctttcccggcatgagataagcgtgcatcggtgtctgcttgctcaaccaagctgcaaagctgcccggtgcgtcatagccgcaaccattgtccaacgcttcctgaatccgctttacatcacaggcactgtagcaatagaacggcggcacagcaagatttccttttggctctttcggcttttcctcgtagctggtaatcaggtcattcccgtccagtgtgataattgccgttttctgctgctttttcaattcattttcctcatggcacatgacgcaagaggtattcttctccttggcaaacttcacaaatttggaaaggctgaaatccaacacattatcaccagccataaccagaagatcatcgaccagattcagcttttctactgccatctgaatatctttgacagcccctagacgagtttcattggtacttgtaccatcgtcaatcaccgtaatctcataaggccgcgttttgaccttctcgttcttccagttcacaaaatgctgtgcgaacttatgattggaaatcaccacaaattcgtcaatgtcagtggtatccaccaaatcatccaccaaccaatcaaggatggatttctcgcccactttaagaagcggcttcggaaaattctccgtcagcggataaagccgtgtagcgtagcccgctgctaaaatcaaacatttcatctatgtattctccttacagttccactccatcggcactctcgcacagatggaaactatactttcctttcaacgccggaaatgctttcaaatactcagagcttactttggcctcaatatcttcggccttgtccggggcgatcagtgccatacagcagcccttgaaacccgcaccagaaaagcggccaccgtagatgccatcagtatcaaccatgatctcatacagctttttcagttcatcgcagccacactcatagctgtaaatagaggattttccgctttcaaaaacaagctgcccgtaaccatctaaatcacctttgcgccacaattctgcacccttttcggcacgagcaaactcactgtaataatgttctgcacgtctgcgccacaactccggcaaacgatctttataggcttcaaagacctcatacggcacatcgcgcagccgggtgtttgcaaaagtgtcgtagtccatccctgcatagcccatcagtgcataggccgctgccttgcactcgtcctgccgcagattgtacttggagtttttcaaagaacgctccaagccagagaagaagattgccaccttataaggcttcattttctcactggtggggatcagttcatagctatcgtctttcgtgtcaaggtacagcaggtgattcttcttggaaagcacttcgcagctttgatcgagtttgccgcaagaaacaccgacatactggttttctgctgcctttgccgtgagaatcatctccatcggttcaagatggatgccattcactttgcacagtgcggataagaaacaaataatgaccgatgcagacgaggacaagccgccaatcggcagactgccttcgatgatgcccgacagaccaactttcaatcggtacttctcgcccagcatcttagctgcaccacgcagatggtctgcccagtcgccctgcttttcatccggcaccgcacttacaaagaactgagcgcgtttcggaaaatttaacgactgcaattccacaacaccgttctgcttcggatggtaggccatgtgaattcctttgtcgattgccagaccgttgatttttccatactgatggtcgatatgcgcacccagcggactgatacggtacgggcagaacgccacatcaaacggctcctgatgatataattccttgtaaacctcaacacacttcatggattcgttttcctattcttcttgtttatttgtaaaactttgcgtaccactcagcgaacttccgcagaccctcgcgcaaactagtagagggtttatatccgaagtcacgctccagtgcgctcgtgtctgcataggtcacaggtacatcacccggctgcatcggaaccagtttcttgtgtgcgtcaaagtcgtaatcttccggcaggacaccagcacgaatcagttcttcttgcaaaatctgtacaaagtccagcagattttccgggttctggttgccgatgttataaactgcatacggaggaacgggcagaccatcttcaccatttttacgttccggcgcaccctgcatcacacggacaacgccctcgacaatatcatccacataagtaaagtcacgcttgcagttaccgtagttgaaaatctgaatcgtttcgcctttcagcagcttgttagtaaagccgaagtacgccatatccgggcgaccagcagggccgtatactgtgaagaagcgcagacccgtggaaggaatgttgtacagtttagaataggcatgtgccatcagttcattggacttcttggtcgctgcatacagcgataccgggttatccaccttgtcatccgtactgtacggcacttttttattgctgccgtatacggaagaactcgacgcataaaccaaatgttccaccggagtatgcccttcatcgtaagaatggcggcaggcttccagaatgttatagaagccaatcaagtttgcttccacataggcatcagggttcgtaatggaatagcggacacccgcctgcgcaccgaggttcactacgatttccggcttatactgctcaaagatagattcgatcacagccttgtctgccagattaccttttacgaagctgaaattgtcaaactgctccaattcgttcaaacgtgcttccttcaggcgcacatcataatagtggttcatgttgtccagacccacaaccttgacaccctccaccgtggagagcagtctctttgcaaggctagaaccgataaaaccagccacacctgtgatgaaaacactcttgtttttcagatcaattttagttttattttccatcataatttttcttatcctcccttgttgaatcccctgcttatttcattgcacgacaacaagcctgtatacagattgcggtaacaatctatacgcaggcttgtcctcgtacctccttattctgttttctgctctatcagctttcgctgtggtgggttaagtatagagcgcaaccagaagccattagcacctgaaatcacactggcagtaacgcaccatgacaggcagaaacaggttgaggtgaaaaggtcaagccgcgtaaacccgcatgaaatcaggcttttctctggttgtccatattatttcacactccccgtaaccgaagctgggattgttgtaatgagtaccgatacgcggatcaaggcagacgccgttgataatctgctgagtattcagccccttcatctctgcataggtatccagttcattgaagtagctaacacgcagagccagataagtattagcaaacaacttaaccgcttctgcttcggtaaaacccatgaacagagtgtcaatgttttccttgattgcaccttcctgaagcaattcagcaaaagtatgtgcagcttttaccagccgagcgttttctacatccgtaccaacgatgatacgggaagggtaaaggttatcatacagagccttgctctcacgcagaaattccgggctgaagataatattgtcgcagtgatatttttcgcggacacttgctgtgaagccaacaggaatcgtggactttatcaccataattgcttccgggttatactcaattaccagtttgataaccgcttcaactgcagaggtatcaaagaaatttttcttgctgtcatagttggtaggagctgcaatgacaacaaaatcagcatcagaatacgcttccttggcatccagagttgcagtcagatccagctccttttctgccagatacttctcaatgtattcgtcccgaatcggagatttcttgttattgatcatctccaccttctcaggaacgatatccaaagccgttacctgatggtgctgtgccagcaacactgccagcgaaagcccaacatatcccgtaccggccacggcaattttcaaatctttaaactccttcattattactttctcccttgtatacttatcttgagaacacactcttcacatactcatagctgttaatatcgccaatgtcataccgtttgcccggcataacgtaagcgtgcattggggtctgtttgctcagccatgcggcaaagctacctggtgcgtcataaccgcagccattgtccagtgcttcctgaatccgctttacatcacaggcacggtagcaatagaacggcggcacagccagatttcctttcggctctttcggcttttcctcatagctggtaatcaggtcattgccatccaacgtgataatcgccgttttctgctgctttttcagttcattttccacatggcacatcacacaggaagtatccttttcctttgcgaactccacgaacttggaaagactgaaatccagcacattgtcgccagccataaccagcaaatcatcagctaaattcagcttttccaccgccagctgaatatctttgactgctcccagacgagtttcattggtgcttgtgccatcgtcgattacagtaatctcataaggccgcgtcttttgcttattgcttttccaatcctcaaaatgctgcgcgaacttgtggttggaaattaccacaaattcgtcaatatcggtggtatccactaaatcatccaccagccaatcgaggatggacttttctcccactttcaggagcggcttcggaaaattctccgtcagcggataaagccgtgtagcgtagcccgctgctaaaatcaaacatttcatctatgtattctccttacagttccacaccatcggcactctcgcacagatggaaactgtacttaccttccaatgccgggaacgctttcagatactctgctgtgacctttgcttcaatatcttcggccttgtctgggtcaatcagcgccatgcagcagcctttgaatcccgcaccggagaagcggccaccgtagataccatcagtgtcagccataatttcatacagttttttcaattcatcgcagccacactcgtaattataaatggaagatttgccactctcgaaaaccagctgaccgtagccttccaaatcacctttacgccacagttctgcacccttttcggcacgagcaaactcgctgtaatagtgttctgcgcgtctacgccacaattctggcagacggtctttataggcttcaaacacctcatacggcacatcgcgcagccgggtatttgcaaaggtgtcatagtccatccctgcatagcccattagtgcataggccgctgccttgcactcgtcctgccgcagattgtacttagagtttttcaaagaacgctccaagccagagaagaagattgccaccttataaggcttcattttctcactggtagggatcagttcatagctgtcatctttcgtatcgaggtacagtagatggtttttcttagaaagaacttcgcagctctggtcgagcttgccgcaagcaacaccaacatactggttttctgcggccttcgccgtgagaatcatctccatcggctctagatggataccattcactttgcacagtgcagacaaaaagcaaataatgaccgaagccgacgaggacaaaccgccaatcggcaggctaccctcgataatgccagacagaccaactttcaggcggtacttttctcccagcatctttgccgcaccacgcagatgatcagcccagtctccctgcttttcttccggcactgcatttacaaagaactgggcacgcttcgggaagttcagcgactgcaactccaccacaccattctgtttcgggtggtaggccatgtggattcccttgtcgattgccaaaccattgatttttccgtactgatggtcgatatgcgcacccagcggactgatgcggtacgggcagaacgccacatcaaacggttcctgatgatataattccttgtaaa

SEQ ID NO: 891 - DNA, 24055 bp, unidentified
  source 1..24055: mol_type = unassigned DNA
tcaagcattatttgcgccctcttcctcaatgatatgtgccattctgttctttgctttttcaagctttagctgaagcattgtaatttcatcttttacagtcttatatttgtctgcaatctctttctgtttttcaattggtggaattggaataacaagcttcgtcaactgctcaactccgatatttggaatcgttgcaccaaccgttatactccttagtgccgctgtaccttgctcacttccaaagaatgctgcaagataatacggatctgccttttcttcatcgagctctataatataaagatttccgttacctaatattctttgtccttcctttacttctgcaacagcaatcttgtaaggatatccattcttagagagaataaggcagtgatttgataaacaatacttatcatttttcttatcaatagacttcaaataaggtaattccttatcaataagtccatttttgatgttagccagcatcaaatactgcatgtctgtaggcactgtagtagtaatttcatctaatgccttagcattaagctgggctccacgagtaattcttttaatcacatcgccaaatgccattccatctgctacatcatggacaatatatcgattcatacttaacacataatcgttatctcgaagctgctctgcacttacatacatgcttatatcagagttgctcttagttgctttaataataagagagatgttttcagcactcagttcatttactcttcttccctctacaaagagttctgaagcatcaaccaagcgcactcctttattattacggctaaaaactatcattgaagttgcaatagttattcctgcaaataacctagccggtaaagcaattacacattcaatcaaaccattctctatgaaatagcttctaattgctgaatcactctgattccatgtacttccattagtcatgatgcctacagcttttccatcctctgaaagcatatcaaccattaagctattgaacagccaatcagatgatgtggcttttgaaacagatggtattctcttttccaactgctccaaatactgatttccaagacctaattctttaatcctcattccaaacggataattcgcaaaaatcttatcaaagcgtctgccattatcttcgtctaatcccagttcaaagatgtcctttgcttcaaaagtaatcttaccttctgataaatcgttgtaaatctttgctattgcaatagaagatacaagtttatcgaatccatatgcttctacagttggatgatttttgacaacatcagccacaacagttcctgcaccacagcagaaatctgcgaatttatcattggcttttatctcaagtaattcatcagccaagtttcctaagctttcaggtgtcatcatcggatcagataaatcccttaaaagtgaaactaaatagaagattttctgctcatgagcttttgtaagttccattaattccttccagttttcagaaatataaaagtcttctgcgactttcttaatgtcagcatctattcttgcatcttcttcaaatgaatatgcggcgtgtgcgctgcaatcaaatgactttgccaaaaggtaagcagccactgtaacatctccaaacactccaaaaaatccttttcctgccatcgaagtcttgcttcttaaaattaactcaatttcatttttgcaaacaaatatttcatcccaaacagctttaagttccggtgtaagctgattagctgtttcattgtcaataaagttgccttttacttcattaatttcgtttaacaatgcgatcactctttcttggttttgaataaccatctttatttcttgattatagattaccaagtttatttcagtttgtcaatatctttttggtttttcagaaccaatattttaaaattagattggatttaattggattaaatagtgatttttgaatttaatggtgtcaggcaccaatgtggtcttctcattttatttctttctagtttgccggaattgtaaaaccattctcaaatccacgtgaaattaaaatgctctgcatttctcttagtacttgcagacaagtatctctatttactgtcggattttcaacaacaaattttactggatgaactaaatttctttttaatctaatgtcatgtgctgcattagcttctgaattccagctaggattgtatatttccttcaaacgacgaataacaccatataggtttatatgcatgttatcgtcatcaacaaaataattcgtgttttcaagctcagatagccaatctaataatatagtttcaagtatagatccacacagtatcatacatgctttatatgccccaacttccaaacaactaataagttcttttgcgtcgtcacttagtagcttctgtatcaagtccttttttccatctttatgttaccaagaaattcttcgatcattaaactctgaaatggatgttcttcgctattaatagacttatcctctcgtagaaactcgttcattctatcgatttgaatgggctgacttgtattgtgtccagcttgaaaagttaaacgtgctaattcctgcatcctatctgatggaatcgatacaagaatttcatttattgttgatggagtcacctgaataaatggagaattataaaaaatatatttatctgcagtttcactctgcaaatataaatataaatattcaggacatactttttgtgattttacaatataacacgaaccacctacagtaatgtcttttttgggctacttgtttactaaatatactcttatctttccatccgaatgaagtgaagaaattactatatctccattttccaataatcgcaccttctgtgtaggatgacaaattttcaatttttcatatggtattgggtattcaaaattcataaaagaaagttgttttactccatatgctttcggcatcctttcaattccacaagattcttcggctttatctgtattattcaatcattttctccccaaaaataaaaaagtctccccatgggacacatcacatatgtgagaggtgcggggagtcctgttgctattatcttatgctaatttctaaaatttaatggtgcctgaccccactgtgttaaatacagcaaaaatctccagctccgtgtgctcattgacacgcagatccagcttccagtccttgcgctccgagcagtagttctctctgatgacagagaatcataatctttggtagtattggttttgggacggtttttgctgcctttcgttcttggtataggtgataacctctttccttttatagttgtttaagtatagcattataaaatcacagattcaactcctgagcatttcttattataccaatccatattcctttatttttgtgccaatcattccgaaataaaactgtcctagcacatcaatttgcgcggcattaagccaacctttcaaaaatgtatccaaagcagctaattgtgctgttcctataaattcagaaaactccataatatctacatcttctcgataatcctgagcatacattaagcatattgaacgtctaccataatagttgaatatcaacgctgctgttgttaaaagtgtctctaaatctttagggaagtcacttcttctaagtaacgactttgcagtattggccggctcatctacaaaattctgcattgacttgattgatgcaacagtttccacttgctgtttcatagagaaagaaatattttcgccaatactctcatatcccaaaattttaatagtttcaatttggcttgcatgatattccagaaagccacgcaccatggcgtttttctttttatccccatttacgagattctccgtatcgagcagatgcgtcaattcgtgaaatatgacataatcgccatgcaattgtggtttccacagatcttcccacacttcaatggaatgcgactgactttgaaaatcaaatcgatgagttgcccatgctccccatccagacgcattcgcatcagaaagcgaaatatgttttgaaatcaactcaaatgaaggaagcgatgatactcccataaaatgtttataatcattcttacgtttattcacatactgcaaaagtaatccatttgccatcttttcctccttttacacaaaacaacatcagcatactcacgcttcaatcaatgtaagatactgccttcccaacggtgtgattttatagctatctgaacctgacaccttttttagcttcggaatctttacacttcctggcttggattttttgctttctttttcaaggttttggaggtatttaacaatctctttaagattattatcattaatttcctcgtttttactttgcaaaagtccaaatcgttcgagcttttctctgatgaatcgcatttgttcaaaatcaacgtgaatgtctttacagatgtccaaaatattttctccatcgtttccaagatacgaatacgatttcaaaacacgaatatccaaatcgcttaactgtgaaagtgtcttaaaaaacatcaatacaatatccagatttgtgttatctgatttcagcaagttaacatatccattgacattatacttaaccattgcctcttgtggttcttcgacaatattatcaagcaatgcttctgtaatctgtctttgatattccaaattactttgttgtaatttcacaattttattttcaagttcatcttgatttctttgaacaatttgcaaagcctcaactacgtttctttccaaacgattctgtttatatgagagacgaatattatttgcgacaggaactaccgcaccaacgatttcactagccagcattcctacaccctcactgactataaatccacctgcctcttttactactgctggcaaaacctcttccactgcaacatttccagcttcttctttggtagcatcaatgaaatcttttaatttatgtttttccattgcaaatcatccctcactttccaatataataattcacacgcatgtgtgcaataattgttaaagtgtggtccagaggtacggcctctaggtgtagtttcgtttatttatgtcttactcttcactcggctattttgtttcatgtaagtgttggctacgaaccccacatacacccgtaggaaatcccatctgaacccacatataagttaccatcagactgttcatcacagcgcctccatcaatctcaatgtctctaacaaatcatttggtttcgacctttaactttatgcaactcagccaagttccaaataaaactataaacgacaaattattctcacatcttcgccgattgtaagatcgttgcctgctgcttaccatgaagaggtgtgtgattatccgagcagcgtagggagctaccgctcccagtatatcacaagtctgcaaataaatcagccttgtacacgccatccgccaacattttcttgaaactgtcccttactgctgcgacatcctcatggtaggtcataccataccatgtatcatcggtcttcagaaccttcacagacatcttgccctgctccagcagttcaccgatgaagattggaatcagatactcggctttctgaggattgcctggcacttctttctggaaaaactccttgaaaccattttccagcacatccagaaaatcaggagtcaagccccacatattcatggaaacaagagaattcacatcaacaaccacaccgtctgcctttgctccatctgcagtctttacgatgttcttggtttccacaacctcagtcaaatttccattttcatccatcttgcagataccacgagtcacaccgccattatcggacagtgtgttcttcaacacaaagcctgccatacaggacttgccgccatttaccaagtactcgtggacagccttgaagccttccttgccatagtaatcatctgcgttgatcacaatgaacggggtatcaatcacgttttttgcagcaagcacggtctgaccggttccccacggctttgtccggccttccggaagttctcccggaatatcgttgatatcctgaaacgcataatccacagttacattatgagatgagcaaatagatgcaatgcgatcgccgatgacctctttgaactctttctcgatatccttacgaataataaatactacatggttgaagcctgcctcaatcgcatcatggatcgagtagtccatgatgatatggtttgcatcatcgacctgctccaactgtttaattcctgttccaaatcggctgccgattccggccgccatgataagtaatgttgttttcataatctcttttcctcccttattacacactatcctttttatatagaagatttctattgtgaattatgaagttcaataaataatatggaatattataatatcggatcatttcgatttccccagtacaatcggagccatgttttcaattaccaatccagcaatataacacatagcaataaccaccactgaaattattaatgccatcattgttcgattaaattcacaagaatcactaagcatatttttcaccatcaggcaaatagattggaagaaaacaactggaaatttgtgcagaagcaatattgccaatgtatttctcccaagcactcccaataaacgattatgctgaaaaaatagagccaaacacacacacgctccaccaagtaaaagcgatgtcaaaacaaacagaatcggatgtctcccatacgaataaattctcacttccgcaaaaccatttatattgcttaataatataccgattaaaaccaatattggaactaacagcataaattttttacaatttcgcatatcgtactgttataccagtacccctagttcacaaaaacctatcataaatagacctgattccatttgaaatggcaattttagatcaaataccccatgccagcaaatgctcccggccaaaaacactataattgtaagtattcttaatctttgcccccccaaaaaaaaattttattaataactttttcaagcaaataaataattaaagacactgcaaaaagacacggtaaaaaccaaagtggcgtattccatttcattatatcggattgagaattcccgtataatacaacaaataaatcccgtggaaacttaagcttttcctctattcccaaaaaggccaccattaattcatatactgccatacttacaaaactaaaagatatatatgggattaataacccttttgctttctttttcacaaaatccatccatgtactatttgttttcaatgtgattcctgcgagaaaaaagaaaagcggaacatgaaaagagaatatccatcttcttaatgttcagtagttagcacatgacctaaaactataaaataaatacctattgcctttgctacatcgacccaaagtatcctcttattcatgttttttcaccctatctatttcacattttttatgaatcttaacaagaagcaaagatatcatttttctgttaacaaaaagaaatactgctattcctaaaaagctcaacacaatatctatatatagaccagtgaagcattcagctaaagacaatataagcgttggacaaaaaagcagtaaaaagtgttttttatcaattgtgacattaagttcatctctgttttgtttctctcgtattaaccacattattaaaaatccaagaaatgtggaaaccgatgcagcttgtaaacctataaatctaatcaaagcaatatttacagccgcattgataagtgcaccgtatatacttgtcaaactagcattttttgtttttttatctcttaggtatcctacaccataaaaagaggcaaagctttgaaaaactgtacccaaatacaaaaaagagacataccttgctgccgtatggtaatcagaattcataaataataaaatgaatatttttgttattggattcaatacccacaagagtccaaatgaaagaatatacaactgtttaaaaacatccgaataaaaggaactcggttttttttctgtatcagatactgcaacgtcttgccaggatgtagtaaacaaactcaagataacttgaagcatcgtcggaaatttatatgatatcgaataaattccattcgccgatgcattcaaaaaaaatctaattatataacgatccgaggaattgataatccaccagtttaattggtttggaaccaatgggatcgaaaatttaagcagcttttttataacagatgtattcggtttaagccaataattgatcctcagttgtttttcaagaaggaaaataacgaccaatgttataagattagaaataatggcactttgaaacagactttctactccttgatgtaaacagcatatttttataatattgagcgccaaaaaaatcactgtatataaaatacctgatactgcaaaaagtttttgatttttcaagcctctcaatagtttttgaattgttgccaatgccctcgaagttataagaacaccaacaaagaattcgcaatatagaatcggatgaatcgaattaatgataaaaattactcccgctgcaattaacgaattaattataagcacctgtatagtagatcttatgtaaacttcatttcccttgtcagttcttatcatccagcgaaatgcagcatccgatatttgcattgttacaattggcgtaagcaaatttacagttgttaacaccaagtcgtaatttcccatgtcctcagtagaaatataatatgtataaagtggtacaataagaaacactaaaatttttgacccaaaatttccaatggcatatattaacataccttcaatgagatttctgcttttacttttttcctctgacatgaagtttttcctcattctttcaaaatctctatcaaattatcatacgattttttcaacgcgcatgttgttttataattagtaattgaaagtaaattttcaatcttatatttaagcttttcaaacgacaaaccatcattcagcataattgcccattcttctctttttatcgtctcaaaaaaagatgtaaccttcgaatcccatacaagtccaatagacggaatatcgtaagcggctgccaaaatcaatgaatgcaacctaaaagatataatgtattcgcatgttgcaataacatcaacgagttcaactggtcttgtcggccttttttccaacagtttctcttttccaatagatctcaatgcgaaacaagcgaattcataatcatcaattgctccatttgtaaatacaacgatttttcttttatgatactctaaaaaatcaatcatatgctttataaaatcaatgtactcatcttctgtaattgctatattatttcgaataagcatcttgtaagatataataccgatgcctactcttccatctattttttctcttttaccatacacatttgcactattaattgctggatcaatagtttgtagtacattctcacttccaaaaagagacttaaattgtttcacgccatccctaatagtaatgctataaatgctatcagactgaaacactttacatagtaattttacagattttgatgaaagtttccccatcccgcaacagttgaacacaacctttttattgtacttttctgcatatgaaacaataatcgctatccaatgaacaaaatagtccataaatagctggcctcctgcgaatacaatagtgtcaaatttatcccaattcaatttatcaagattttcttttaatcgcattgccccttttttctcaacatatacagaaaatagcggcgtagcttttaaatattccttcacgacaatctttaaatttttgttagatgattccacgaaatcgttttctgtatagcctttctttcccgaaatggacaacccaaaaggctctactcctcttgcaattttacaagcttcggatactgtatcataaataacatcatcacccaagttattgctatacctagctgctacaatcaaaatactatttctattcattaaactttactccaaaaaaatctatacggaaccgttccccacattgctcctgctctcgtaaatcccaaatacaggaaaaaaaatataatggctgtaatcattcctattttcattaacttacggttattccgattttgtaccttattaagggcgtgtggaaatgctatcattaaaaatggtataaaatacaacgaaaatcgtgctgtaacattaatgataaatgcactgaatctaaataatactgcaagataaacagaatacatcagcatactttcactccagtataccgtagtatctggcgttactctgtgcatttttataacacccccttttatcgaaaatgtagttcttccatattttccacaacgatacggtcgacatgaaataacatcgcaattatatacagcactacaatatacaaaaataatggctgcgatggcgaacattccaagtgtatgaaacgttatatatccgcctgaatcacccgcccctgatgcactatataaaccatacaaattagaaagcgatgaaatacttataattttttcaaataaaaatctataaacgagactgaatccaactgtcacaatcgtcaaaatgtaaacagtattttttttgaatgttaatatatcacataagataaaaagtagtgcaatgattgcagatgtgtggaagaatgtcgctattacaacatagattgcaaatttcacatactgttttcgctttaacgcttctaatcccagtagaataactcctacagccatcgcttgacgaattacattcatgctcatcataaatatatgataacccaaaaaaaacactgtagaaaacacaacatcatctgaatttctatatataaaatgtgcgtatggaattattgagaacaaacttgtaaaaatcacaaaacactgtgtacttgttgaaatctgacctattattttacaaaatgcacagaatccaagttcccaatctccgcttatcgtaacactttgaagcttatcccaagatacgtttttaaataatggataatacttattataataatgactcaaatcaattccaatttgatcacttctcagcatcgcaactattacaattgcgctaaaaaccaaacacaaatagcgttttctatttatttcacttgcattagcactaaacgcatacccagccaatgctagtaacatcaaaacaatataaactgtcatccttatctcctattagctcggatcagcatttatataatttcacaagagattctactaatccttcaacctcaaatccagtccctgcaagagattctcgttttgactttacacaaccattatttttaataatttcattgcaccactcactcgcagatttattaagcggtattctatgcatattgtcacttacctgaacatcaatcggaaccttatcagacccataacattgtcgacctgacatctgtgcttcaacgaaaacaataccaaacccttcaaatttagatggtaataaaaagacatccattgcagaatacaatttattaacatcatcccgtattccgagcaattttacggatgacatcaaattcttacgttttacatatttttcgacggcagttttcaaattgccttctcctgcccaaatcaagtaggcattatctacatgtttttttatcttctcaaaaatatctataatgaaaaaaggatttttttgttctgttaatcggcctacaacacctacaacaaatttatcttctatttcgagcgtctctctcagcctttttctagcggtctcatcataaataaaagatcttgtatcaataggattttttataactaaatatgttttttttccaaagagagaatctcctgcataacttgagcaggctgcatatcgattggccaaccaaacactgggaatttcataaacaaaagatctgatccttgcttttaacgacgatgtttcttttggattatgagcatgatagattcttatttttacaccacactctttagcagctttaagagcttctaatgcgtttaatccacttaaatttacatgaagaatatcatatcttctatcaataatcttttttatatagctccaattttccttatttggtttattagtatcaaatgggagcgtataaatattactaccatttttctttaccgtttcagcatatggtgaatcaatatttctgttcaaaagaaaatctatttggtacccatgctttactgtgtattcatagtagttcataatgcaggctgcaattccatttcccactctaagatcacgcatttgaatcaacactcttatcgccataacatactctcttcctacttaagtctcgcaccctttatatttttcagccaaattctcccatcaactaagaatttcagcattccataatttctctttttcagaaaatatacaaaaactttctgagatttagtcaagcaagaaccatcaacctttttcaaagcatcacaatatggatatttatctagcgtatcatccaactctgtatatgttgtatttttatctttcttattatctggatgaaaatagtatagtctcatacacgagtacaatcttgtaaccacccgtgcgtaataagcattccagtattcttcagacaataagaacttatttataattctttcgtaattttcaaaagctacttcgttatagtattgcgctttttcattaaatctgttggtcaccgattcttgcaaataccgataatgatacaatgctttatggatataaaagtacttatccgtcaattgcaaacattctgcattaaaaatcacatcttgaccttttcttgcctttggaacaaaccacatatcgttatcttttagcaaggatgtacgatacattttgttccagataacattcgtctcatactcatatggttttccattaacaacaagaaagttaaatggcgcaattcttaaattatgaacccattcttcatcaagaattccgctatcacttttcaaatgcttaacaattgttttcccatcaaattcctgaatatagtcaaatagaaatatatccatatctctatttttcttctgcgcattatacagcgttgaaacgtgcgtgggttcaacccaatcatctggatcaacaaatgttatccattcagtttttgcctctttaataccattatttcttgcaacagatactcctgcatttttttggtgaattacaataattctgttatctttcttagcatattcatcacatatttcaccgctacaatctggggaaccatcgtcaacggcaataatctgaaaattatcattatcttgctttaacaaactgtcaaagcatgctcgtagatactcttctttgattttgtaaataggtattataatactcaaaaatggagtcattttcttaccttctatactttcccgcaataacattattatagaatgcgatatattttttcttcatagcttcggtgttataaatctcaaggacatcctgataggctctttctgcaagttcttttggaaattccttcatagccgcttttatatgttcagcatactcctccgccttatcacatacatacccattaatgccatcattgataacactcttatttcccattgtattgctaacgagaatcagctttttaatgtacatattctcaataaggctcatcgcaatggcttcaccaagactgcacaaaataaatgcatctgcacctttggccattgccaaagcttccttacgaggtttccatcctgtcacttcaatattgggagcagttaactcactttcaagttctccgttaccaatccagataaatcttgcatctggtaccagctcagcaattctattaaaaagctgcggctgtttctgaacgcaggcacggccaagcgtaaagaccgtgaatttatcattttttacagacttaataccatcaagggatgcagaaagatctgagagattcacacccgtttcaacatgggctgttctcttggagaatttctttgcttcttcatcttcactttcgcaacaggtaagtgtaagtgctcgatttccgagaaccttttcagcaaacttgtagactttgctcttcttccccggtcccataagaatatgtgcatatccatgaggcgtatacacaacagtattattcttttctttataagccagtctacctaagccacctgcaacagaggaatgtaaatgaatcacatctggctgaatttctttttcaatctgacgcagttccttaattgccgcaatatcactcttaaagttggtcaaacccttgactccaacatttttcatttcaatcagatgtactctctgatccagaaaatctttgtaattcttaggtgtctgcggtctgagggaatatgcaagataaatatcaaattcatccaccatatcgttgcagagctgagatacgtaagtaaatacgccacctccaaaagcttcacagaccattaaaatctttttctttgccatttttactctcccagttccttcgcacatttatccaatacagctgcaattacctgatccatatcatagtacttatactcaccaagacgaccgccgaagattactttttcttctgcgtctgccagcttcttatattcagaataaagcaagctattcttagcatcattaaccggataatacggctcatctcccggtttccactcgctactatactcacggctgatgattgtttttggcagatcgttttcattttcatccttgccaaattcaaaccatttgtgttcaataatccgagtccacggagtttcgcggtcggtatagttcactgctgcgttgccctggaaattaggcttgtccaatgtttccgtttcaaagcgaaccgaacgatattccaacgtacccaacttataatcaaaataagcatcaatcggtccagtgtacacaaccttatcggccaatgcatccaactcggccttgttctccagatagtctgtgttcaaacgaacctcaacaccatccagcagatttgcaatcatcttcgtataaccaccaacaggaataccctgataaagtgcattgaaatagttgttatcaaaagtcagacgaactggaaggcgcttaataataaaagatggcaactctttacaatcgcgcccccactgcttttcagtgtagcctttgataagtttctcatagatatcacgacccacaagtgaaatggcctgctcttcaagattctgtggctcgccagtaatctccttgcgctgctcctcaatcttggcggcagcctcttccggtgtcacaacaccccacatcttgttaaaggtatacatgttgaacggtaacgaatacaattcacccttgtaattagccacggggctgttggtaaagcggttgaattctgcaaattgtgtgatataactccaaacctttttattgttggtatggaaaatgtgagcgccgtatttgtgaacgttgatgccctcaacactttctgtataaatgttacccgcaatattcggacgcttgtccactaccaaaacagattttccatgattcttcgcctcatgggcaaaaatcgccccgtaaagaccagaacctactactaaataatcgtacatatataactttctccctatcttaatcctatataacctctatcaatctcgctggaaaatatctctcgtgtaaactttatccttcacatcatccagacacttgtcatagcggtttgcgatgatggcgtggctcatttccttgaacttatccagatcattaaccactactgatccgaagaatgtctcaccatctttcagagtcggctcataaatcacaaccgttgcacccttggccttgatacgcttcatgacaccctgaatagaactctgacggaagttatcgctgttgctcttcatggtcaggcggtacacaccgatggtcacagatttttcctgttccttatcgtactcgttatcctcgtcataaccataataaccagccagctttaggacgcggtcagcgatgaaatctttacgagttctgttactctcgacaatagcctcgatcaagttctccggcacatctgcatagttagccagcagctgcttagtatctttcggcaggcagtatccgccgtagccaaaggacggattgttgtagtgactaccaatacgagggtcaaggcataccccatcgataatctgctgagtgttcagccccttgctctctgcataggtgtccagttcattgaaataagccacgcgcagggccagatatgtattggcaaacaatttgactgcctctgcctcggtgaagcccatgaacagggtgtcgatgttctccttgatagcgccttcctgcagcaaaccagcaaactcgtgtgccgcctcaaccagacgctcatcgttcagatcagtgccaacgatgatacgagaaggataaagattatcgtacagtgctttgctttctcttaaaaattccgggctgaagatgatgttcttactgttgaatttttcacgtacgcttgcggtgtagcccacagggattgtggacttgatgaccatgatggcgttcgggttatattccatgaccagcttgatcacagcttcgaccgcagatgtgtcaaaatgctgggtgtggctatcgtagttggtaggtgcggcgattacaacaaagtccgcatcggagtatgcagcctttgcatccagcgttgcggtcaggttcaattctttccctgcaaggtatttttcaatataatcatcctgaatcggagactttcgattgttgatcagctcaactttctccggaacaatatcaactgcggttacctgatggtgctgagaaagcaatgtggcaattgacaaacccacatagcctgttccagcaactgcaattcttacatttttcattttaaaaattctctcctagttcttacgttttaacatgcctatctaatgcaactcttccctatactgctccctcatccttcatcacacttataatagtttgaaaaataattcttatatcattcttcacactccactccccaatatactgggtatccaatctcacaacttcttcaaagtccgtgatattgctcctgccactcacctgccacagcccggttaatcccggtctgaatgacattctggctctgtggtgtggttcatacttctcccactcatcaagtgttggtggtcgtgttcccaccaggctcatatctcctttgaggatattccaaaactgtggcagctcatctattgatgtcttcctgataaactgtcctatgccggttttctttgttccatccggcagtatcttattgcctatgattcttgggtcgaagtccatcttaaacatcattccgtcgctcaccttgttttgtgccatgagctccttctttcgctcctcggcatccatgtacatgcttctgaatttgtacatcttgaactttcttccgtttctgccgattcgctcctgtgcgaagaagatcggtcccggtgatgctatatagattgctggtcccacaaatatcgtcactatcaaggtgatgatgcatccgaccagccctccgagtatgtccatgcctcttttggcaagaagctgtgtggttctcgcatagttcaagctggctgtgatgactgtgtagtcacctattttttctatctgattaaaactgcctgccatgaccttgtttttggtgatgcctctgtgaacagctattcccatctccaggaatatgtctgccatttcgtagggatattcgctctccgcacacggtgggataagcacctcgtccacccattcctcacaagcgtagtccactatcccgtcatggtttgcaactattggtatttcacatattgttttgccattcaggtcggcatctgttgccgctgccactatctgtgtatatccaaagccattttcctttagtccctgaagcgtctccctaaggagcttttccggtgctatgacaaagagtgattcttttgatgaagcaaagcctctttttttaattattttctttaacaccattcttcctaagtacgacacgagaatatatattggaatcatgatgtagtaagacatacgcgaatatatctcacccatctgtgtggcaaacaggaagaaggttgttattatttccacaagtgccacatgcttacatgtaactatgaactcatcgagataaccgcgcttcaatacatttttgaaggcatcggatactatttcaacgaagaaatctatgagcaggaatgctactgccagtatcctgtagtctttatctatgtatggattgttaagtccaaagcgacatatatatgagactatgaatgctatctgcatgcacaggacatctaatagcataaaatctatatgctttgtccagcttcttcctttctttctgtacattttttgtgtctccctgtatttcttgattaccctatttccagttcatccctatgctgtcaagccttgctatgcgctctgtgtcgagcaccatgccgctggccttcgggttttttcttttacatctgatatttgatatccagcgtcccagcttcactccgtctgtggaatatgataccggcacgtccaaattgccgttttcctcgtaatatttttttgcaagctcaaactttctgttccactgtatggcagtcttactttctgacctgtagcctatgctctgcaagcgctttagctgctcgtctgtcattgagctactattggtctggttggatagccaccgtccaagcggtatgccgtctgctgtgacgtactttgcaggtacttcgaggtttccatgctccttgtagtagaccttggctgcgctgtagtactcttcccacttctgcttgttgtgatcccatatcatgccaagctcctcaagttcttttctctgctcatcggtgagtgcctgctctatgccgtacttttttaccttgaagcgcatgttgttgatccatgagccgagcctaaagcctgtaggcgatacgtatttggccttgatgtccaaattgccgtaggtattgcggtagcttttaagctcttccagtacctcctgccagcttgagtccatgacatcccatatcatgcctatgtcgtttagcttttgtatcttttcccaggtgaggtttccggatatattgcctgacttcacacgcctctgggtgtttatccatgctcccagtgtgaggcctgccccagtgacatagctctttggtatcttgagatttccattttcctcataccactgctttgctgcctcatagtatgtgtcccaggcatttcccagattttcctgcaagcgcatgaatatctccctgctgtcctttgtctcatctatgatgcggaacctgtcgtcaaagtgctctcttggcgaatgagtgtccggatacagcaaaaatgtttcctgcatttcatttttcaggcagtctatgcagtatagactgtcgaagttattgaccaggtcaaatatgaccggctggtttttgcttcccgctgacagtgctctgcctatctgctgcagatagatgattggtgacaccgtagggcgaagcagtattactccgtccacatcgtccacatgtatgccctcgttcagcatgtctatgcagtagaggagctttaagtggcttcctgtgtcctttttgaattcggcaaaggctttgctggtcgacgcatcgttgtagtacgctgtgtatatgtgtggctttttgtccaccttgctaaaccagtcacctgcctgcgccttcatctcatccatatgctctctgcccgagcagaatactatgtatttgccatcaggctttgtcatctgtctggcaaagacctctgtgaggccgtctgcctgctcgagtgcacgctttagctgttctaggagcttttcgttttccgatacaagtcccgggtttgataagccttcgattcgctttttcagttgttcaagctctttcttgtatgaatatatggctatgacatatttaggctccggaagtatttctctcacgattgcttctccgagtgtcatctctgaggctatgttgccctcaaagagctcctctgccatattgcgctggttgtccagatagcgtatgtttgtcgctgagagtcccaggcgctttgccttcggatatgcttccagaagctttctcacactcttgccccactctgcggctccacagcggtggaactcatcgagtatgatatagtcagggtgcagggtgtctatgctgtcctcatgcttcatgagcctgctgtatgacatgtattctatgtttgagaactgtgtgtctatgttttcaagctgtgtcttgtagatgtactcacttggcgatagccatagaaagtgcttgtgcggatgctgctccacgagcttgaaggctatcatcgacttgcccgtgccggtcggatggatgacagctgccatctgcttttcctccagcatggtctcgactgctctgtatgcatcttcgttgtgcttgtaaagatgtatgctcatttgctgcctccgggtgaaacaccacattaaaagagaggttggatttcgcagattattacaatctgcgaaatccaacctcccttatgtataaaataagcattctatataaatatgaccattctgctgaccatttatggaataactatagaattgattgcggagcgcttggtctccagatttggatgcacataacgattcaatgtaatatttacattggaatgtccaagaatctcacttacactcttagcatcagccccactgctgatacagtttgtggcaaaggtgtggcgcaatgcatgaaagtgagtattcccgatacctgcttctcttatatagatatgaaatctattctgataagtgcggggatccataggctgatttttctttagaaaataagagtcacctttcattgaagtgttataataatctaacagcttgtcatatataaagtccgggataggaatctcacgaagagaatttgaagtctttggtgaatctatatataaagaagtctttctcgtggctgtgtggttattttgtgatgaaccggatgtgtgtaccgtatctaccggaagtctctgcactgtgcgattgacatgcagagtgcgactaatcatgtcgatatcttcccatttcaaggcacaaatttctcctaaacgcagccccataaaaaggcacaataaaataccgagcttatagatatcaagctcggttagaagatactcggttagcttttgctggtctgttgtattgattgtatttatgttgtttgagggtgtgacggatgaacgttttgctctgtacgacagatgaatttctccggtaccatatgtggcagctccatatgcaaggattgagttgaatatacaaagtatgctctttgtaacgctctcaccggctgtctcagacaactccttgagtatttcattctgatttaactcatctatgacgctttctccccagatcggtttgatatatttattgtatatagtagaatacttttgaatggtagagcacttccggctggatgctatactttcaagccatttctcggcaacttcttttacggtgatagcggactgcttgtaggctgctgtttgattaagtgaagcagtttttgctgtaagcagcctttctgttacttccttatagctgtggccgtataccgatttgcactttttactgccggctgtgtctactatgtagtagcgcccctcccagcgtccgtcggctctctttctgatgttggttcctcttcttgacatgtctgtttcctccttaaaaaatatatatgtatatataatttataggaagaagaatattaactccatataatatcttctgttttatttctgaccacaattttgaccatctaaaacaaaaaaatatataaaatacaacctaatattttattaaaattgtaaaaagatacaaaaaagatacaatagttgacataaaacgacttaagttttataatgttcctagtgttttttaacagaggtgattttcgtagattgtaataatctgcgaattttttattacattctttctgattaggcaatagcaaaaaaacacctccattgcactgcaatagaggtgttttcttgtatctttactcttcaatcatcgaaagacgttccttagcaatcttaatgtcttcatctgacgaattaagcatttgttttgctgcagctacagtaccatcatttttgaagaaggtcaccaatgtagaaattcgctcttctcttcgtccttgttcgattccttgttcttttattccttgactgagattacacatagatttcaacaactcctttctgtcaccttccatttccatccggctcaaacgcttgatattggaagcgaccatgagggaatccatatgctggatttgtcaatttattttcatgatttttgccatttcacctgaaagcccgataatggtttcatagataagatcagtacctgtggcaagttcgtaagtgtaacagcgcttacgaaagtggctcagcgttttatcactgtacagacaggcaaaaagactttcatcaatcttaggaaatattttctctgcgaatggtttagccaatgatttttcaagcatgcgtttttcacggtctgtaggaccgaataaagcatcatttaatgtaatctgctgactatcatttaatttaaaagacaaaagtggtttccctcgctttcttctgcatatataataccacttttggctgataaaatcctcatttatgtgaagttttcaaggtacaaattcactgctgcatgtaaccgtataatctgcttcccctgaaaccgttttttgttttgttccaataccctctccgcaaatccaatatgaaccatcatttttattctttagcataatatttcccacactaaattagcataatgtacatagccataggttgatagcatgcagggcttgggtagctgtaatccataaaacttctaaaacagctccccaatccagcccaaaagctggaaaaattctgaaaaaaagtagctgaaaccgctgaaattcctaaaacagctccccaaacccagcgaaacagccggaaaaatctccaaaaaagtagctgaaaccgccgaaatccacaaaacagctcccctaaccacagcgaaacagccggaaaaatccataaaaaagtagctgaaaccgctgaaatcgatgattctatcaaacaaatggagaccataagctccacttttaaagataagtaacatgagagaaaattatcttacatataaatctgtaatttaccagatatgactgatgaattctcaggaaaggaattttactatctactaattgtttctcaatagtattgagctttccatagaatttaccggctccatccttatttttcccggatgctgtatcgtcccatagctcacttccgtcaggaaaaacttctatattcatttttgtcatctgctttttttgatatctgcaaaagcattgcttctatttttgacgcaaaaactaaatcatcatcacatatcgctatatttatcaaagtgttttcttcctttaccattttatgattaaagggtcaaaaggtatcatcgatgcatgcttgcatgcaattcgatgtataccttagtgacccgcactacaccgagaaagtagcaatttgctgcggggacgcaggaaattagcggatttcgaggtgtagtcagattacgggagtgcgtagcatgtagtaatctgattaatcataaatgaggagcaaaataccttttgaccttcatatcataataataactctatccaatgcaatagcccaaatgtcattaaaaaagagagcgggccggcgaatgggaagttcgccggcccagatttacactaggagcaaagtttatactttgcggagataaaatatatttatagaaaaccaaatatttggtgatctatcattttgttttgtggccattcctgttgtcgcgaccacatgcaaatatttatagaaatgtttaaatatctgcgaataacgagttagtcattatagtttctgcatattgtgcttataccgctgcaagcttctttccaagctcctcgcaggctgtctttgcatcatcgtccggtgcatcctgacag

SEQ ID NO: 892 - DNA, 9348 bp, unidentified
  source 1..9348: mol_type = unassigned DNA
tttccctacacgacgctcttccgatctgcccaccacaatggcgatttgggtgcccaagtcgtgcgcggccttgatgcccgcgcagatggaggcgatggtttcctcatcaaagccggttcccttggggccggagagtgcctcgccgctgactttcagaagaatacgtttatactgaattgccataaaaaacaccacctgtaagtattttggcggtctaccctgccgtgcaggcatagtaaaccattctttttgtagtacattttacaataaatccgggataaagtaaagcggtggaggaaaaaaagaggccgcccaagctggacggtctgaaactttgttgtgttgtaggggccgggcatacccagcccgggcgcatacgacaggcatttcctactgggcggctataattttcagttctcttcgcagcaccagccgccgggtctgctgctcgactcggcgctccatcggggattccagcgtcaggccgtccagcggcggcgcagtgggcagggtgaagcagagttccgtgccaggcccctcccccacggccagaccccagcccatggcccgggcataggcggcaatcagcggcaggcccagcccgcccgcgtggagcagacggtcgctccactgtccgtcggtcaacagcgcttttgcgtcgggcggcagaccggggccgttatcgcggtaacagaactgccccggcgcacagaccagcgtgatggcggcggcccggtcaacagccagtgtgttggagacaaggttcgtcagcagaccgttgagcagcgacgcatcccccagcgtgggaagcacatccagccctgcggcctgcaattctatcgtgaagggcagcgcgtattgcgcggcttcctcccgcaaaatttcgcagatttcccgcagctgacccagcaggtcgatgggccgcggttcacaggtgccatgcagcaatgccgccgttgccgcgtccgatgcctggtcgcccaggcggcgcaggcagagcagctgcgcctgcaattcttccagcagcggcgtcagctcggcgcgttccgccggggtagccgtgtgatccagacggtcctgcaggacctcaaaggcattctccatgcagtcgaacgaacggcggaaccgcccgcgcagcccgccccgcagcgccagcagtgccgcgttttcctcctgatgaaccatggtggacaccttctttatttcatttcagtttcagggtgcggtgccgagccgcacggcaccggccgcaggggcgggtcccctatccgcccgcaccttataagtacggttccgtcttatcccgcaagtctttcagcagccctttgaacagctgcccattggagagtacaccgtccgccgggcggccgctgcgcaggcataacgtccggtaaggttcttcgccccgctttgccatggctgccgacatacgattcagcgccgaagtcacggtgccgatctcgatgccttcctccgcagccacgtattgctgcaggctgccgatctgctgcggtttgtccgcgtacagggcgtacagcagcatccgctcggcatagcggtagccgctcagcgtttcgggcgcgccgtaggcatccagcacatcgtcgcagcactggcgcaggtagtacagctggtgctcatcctcgttcgtgcccatgcggtagacctcatcaaagagatttttcatgccgtaagggcgcagcatgatctggtactgggagaacagccgcagtgccttgcgggcggcggtttcctccggcacagggaccaacaccagaaccgctggttccgggtcaagctgcatcgtgccgatctcctgcaagacctcggtcacgccgggcttggtcagcagcgcgtccagcaccaatacgttggggcgcagcccgccgtgcagcagttccagcacctcctgcccggtggccgcaatggccgccgcgcggacttcatcgctgtgggtcttggcaaacaggctcatcgtatcccggtccagccgggagctgaaggcgaacagcgccaccacagcagaggttttgggcaggttcgggctcttgcgcgtttttccgccggccgtccgcggccgttcatgcaacagtaccgccatcagcccaccgccgatccacagaggtcgtacaggacagcgggcacctgcgcgggttccaccgcattttcatacagaaaacgtgtgagcatcccgacgcgttcctcccctgtatcacacaccatgcactccaccgccggggctgtgtcccgctgggcacggatgcagtaggcatcggcttcgcgcagcagcgtgtaggtcactgtcccggcatcttgcaggtctgccagcgcggacagttcccgccggtagcttgcaatcagtttggctggcataaaggctccccctcacatactttcgcagcgtaaactgcgatggttttattaccctactataattcaaccgatgtgcgggattcaatccacactgcgtatacgtttttatacggcaagtgcaagatttgtagtattatagcattttatatagagatgtgcaagatagatacgaaagtggtgctatgacaatataaaatcgtatgttacaggatatgtccgccttcgcacaacaaaatttgtgtttcacccttgacatttcccgcaaaaaggggtaaactaatttagtcaaatgacgtgggcccgtagctcagttgggagagcgttcggttcgcatccgagaggtcaagggttcgaatccctccgggtccaccataaatcctcaccgtgttgtggtggggatttttatttttaccataagattgcacaaatttttaaaggccgctttgcacaagatttacaacaccggcagtaggcaaaatgcctgctgccggttttgtgtattgacttttggggaataaatagttataattagaaccgttctaaattgaagcattgcaaaggaggtcctgcgcttggtcccgattttatcctacgcgcagcactacaaaaagtactatactgtgcagtttgagggcgcggcggccgcgtatgggctgaatcagctggaaatcgacattttgctgttcctgcacaataacccggagctttgcacggccagtgacatctgccgctaccgtgcgctggcaaagtccaatgtgtctgcggcggtggagcggctgcgcagccgcggggtgctgaccgtctcccctgcaccgggcaaccgccgccagcggctgctgggctttaccgacgaaggctgcacgatggctgcggcgctggccgagatccaacgccgcagcatcgagccgctgtttgccggcttcacgctcgaggaacagcaggccttgcaggactatctgcgccgcatggatgccaacatcctgcgctgcttacaaaaggagtaatcgtatgacataccttatcaagtttaccgtctgctttgcggcaggcatcggcgcggggctgggcaccggcttcgcgggcatgagtgctgcggcggtcatctcccccatgctcatcacgtttttgggcatggacccctacatggccgtgggcatcgcgctggcaagcgacgtgctggcaagcgcgatctcggcctacacctacggcaaaaacggaaacctggacattaaaaacggcgccgtcatgatggcggctgtgctgggctttacgctggtgggcagctataccgccagcctgatgcccggcacgacgatgggcgggttctcgaccttcatgaccttcttgctgggcgtcaagttcattgtgcggccggtcatgacgacgaaaaacgccatgaacgctgtcagtgcccaaaagcggttcgtgcagtcgctgctctgcggcgcgggcgtgggctttatctgcggattcgtcggcgcgggcggcggtatgatgatgctgctgctcctgacgtcggtgctgggctatgaactgaaaaccgccgtcggtacgagcgtttttatcatggcattcacagcgttcaccggctcggtcagccactttgccatcggtggcgcacccgatctgttctgtcttgtctgctgcgttctcagcacgctgctgtgggctcgcatcgccgcaaagttcgccaacaaggccgagcctgccaccctgaaccgcgccaccggcgtggtgctggtgattctgggcgcagtgattatggcggtgaattatctgtaagatttcctttgtcccataaagcacaaaaatccatctcaagcttctcgcttgagatggatttttctttcctgttatttttgtggcaacagtacccgcagggtgaaccactcgttctcccaatgcagggtcaaggtgccgccatggttctcggcggcggcgcgcacgctctttaaatcgtacccaccatgggcgctgcgtttgggcagaccgtcggcggccagctctaccgggctggcgcagtagttttcaaaccgcagcatcacaaaaccgttctgtgcataaattgccacgcggatgagccgtttttccgggtcaggctcggcggaaacgctctcggtggcgttatccagcgccgttccgacgatcgtgcatatttcccctgtcgagaggaaatccaacagcttgccgtcggctacgcaggtcatattgatgccgtgttgctggcagtacaggcttttcgcggtcagcagcgtgtccaaaaccgggttgccggtcttgttctcggcctcatacttgcggatgccgctctccatctcggccagggccgcgtcctgtttggcctgatcgcgctcggcacggatggccgcaatctgcattttcagttcgtggtagcgccggttgataaggcggatgttttctttgctctgtttgtactgctcgtactggcggcgcaggacattgtccatggcggtcagctcgctgtgcagggcattctcccgcagctgctcatgctggacgctcaaaatcagcacgcctgcaaagtccaccagcgtgcggatgtagaaaacgctcatcgttgcctcgccattggagacaaaactcagattgctgactgcaaagaccgtgaccgccatgaccaccgccatcagcatggctgccgtggtgatggtcagccgggccgccgtagctcggcgctgttcaaacagatacaaaaatccatatagtgccgcatagaccaccgccagcagcaccagcgagagcggcttgcccgccccctgctgcggccacaaaacgcaatgcagctgccattccacgctggcggccagttcggccaaaatgaacgctcgggcacagctgtacccggcttccagcaggttcatggcccgcgtgccccacaagtagagataaatccacccgatggccgccgccatgcagggtatccaccacaccagcggcacgtcgccggtcagctgcaaaaagacagccagcagccccgaccaaacgacggtaatgccccagcagagacgtttgtccatgcgcggtggcatggcctgggcatacaaaaccgccgccagcacctctgccaaggccgtgtacaggcgcgggatatccggcagtgtcgtcatgcgccgttccctccgatgtaatcggccagcgcttccaaaaacgccttgcgccgagggcggctgacctgcagctggtgcgggccgacctgcacggtgttcatctgcacgctggaaacatacgccaaattgaccagatagccgctgttgcagcgggcaaagccatggggttccagcttttcctcccaggctttcagtgcgccaggagcggagaaatcaccgtcctcggtgtaaaaatggatgcggtggccctcgctctcgatgtaatagaccgatgcttcatccagccgccgcataccaccgtccaccggcacggccagataccgccgcgcccgccgggccagctggcctgcggccttttgcagctgctgcgagaaggcaaaatacggcaccggcttcagcacgtaatccagtgcgccgacggcgtaccccttgatggcgtactgggccatgttcgtgatgaagatgagcagcacgtcactgtccaatgcgcggatgcggctggcggtctccatgccgtcgaggtgctgcatctccacatccaagaaaataatgtcgtagacaggccgatatccttccagaatttccacaccgtcggtgaacatcgtcacctcgatctgggcgtcgtactggcgcatatagcgctgcacatagcccatcagctggtcgcggacagcggcctcatcctctacgatggcgacgcggatcattgcagttcgttctcgcagcgatccagcacagcggcgatgacctgatccatgtcgtagtatttgtactcacccaaacggccgccgaagatgaccttcggctgagcgtcggccagcttcttgtactcggcatagagtgcgccgttcttggcgtcgttgaccggatagtacggctcgtcgccgggcttccactcactgctgtactcgcggctgatgatggtcttgggcaggtcgtttccgttctcgtccttgccgaactcgaaccacttgtgctcgatgatgcgggtccacggtgtctcgcggtcagtgtagttgacggcggcattgccctggaagctgggcttgtccagcagctcgttctcgaagcggaccgagcggtactccagcgtgccgagcttatagccaaaataggcgtcgatagggccggtgtagacgattttgtccgccagtgcatccagttccgccttgttctcgaggtaatcggtgttcaagcgaacctcaatgccatcgagcaggttggcaatcatcttggtgtagccgccgatgggaatgccctggtacagggcattgaaatagttgttgtcgaaagtcaggcgcaccggcaggcgcttgatgatgaaggccggcagatccttacagtcgcggccccattgcttctcggtgtagcccttgatgagcttttcgtagatatcgcggcccaccagggagattgcctgctcctcgaggttctgcggctcgtgggtgatctccttgcgctgctcctcgatttttgcagcggcctcctccggggtcacaacgccccacatcttattgaaggtatacatattgaagggcagcgagtacagctcacccttgtagttggccaccggcgagttcgtgaagcggttgaactcagcgaattttgtgatgtagttccatacttttttgttgttggtatggaaaatatgggcaccgtacttgtggacgttgatgccctcgatgttttcggtgtagatgttgcccgcaatgttcgggcgcttgtccacgacgagaacgctcttgccatgggctttggcttcgtgggcaaaaatggcaccgtacaggccggagccgactacgagataatcatacataactttttctcccttaatcgcggcggaaaaggtcgcgggtgtaaactttttcttttacatcgtccaggcaggcgtcatagcggttggcaatgatagcctgggactgcgccttgaaggcatccaggtcgttgacgacccgcgagccgaagaaggtctcgccgtctttcagcgtcggctcataaatgatgaccgtcgcgcccttggccttgatgcgcttcatgacgccctggatggaactctggcggaagttgtcggagttcgacttcatcgtcaggcggtacacaccgattgtgacaggcttttcctgcgcttcgtcgtactcgttgtcctcgccgtagccgtagtaacccgccagccgcagcacgcggtcggcaatgaaatccttgcgggtgcggttggattccacgatggcctcaatcaggttttccggcacatcggcgtagttcgccaacagttgcttggtgtccttgggcaggcagtagccgccgtagccgaagctgggattgttgtagtggctgccaatgcgcggatccaggcagacgccgtcgatgatctgccgggtgtccaggcccttgctctcggcgtaggtgtctagctcgttgaagtaggccacacgcagcgccagataggtgttggcaaacagcttgacggcctcggcctcggtaaagcccatgaacagcgtgtcgatgttttccttgatggcaccctcctgtaaaaggcccgcaaaggtgtgggccgcctccacaaggcgctcgtcgttcaggtcggtgcccacgatgatgcgcgaggggtacaggttgtcgtacagtgccttggactcccgcaggaattccgggctgaacaggatgttgtccgtgccgaatttttcccgcacgctggccgtgtatcccaccgggatggtggacttgatgaccatgatggcgtctgggttgtactgcatgaccagcttgatgacggcctccaccgcggaagtgtcaaagtgctgggtcttgctgtcgtagttggtgggggccgcaatgacgacgaaatccgcaccggtataggctttctcagcgtccagcgtggcggtcaggttcagcggtttctcggcgagatatttttcaatgtattcatcctggatcggcgacttgcggcggttgatgaggtcaaccttttccgggatgatatccacggcccagacctcgtggtgttgcgaaagaagggtcgcaatggacaggcccacatagccggtgcccgcgaccgcgattttcaagtttttgttcatggtatcgttcctcacgctttgcgcgtatttatggcatatcttttaaaagtataccatactttgcgcggaaagtccatcttcagcaaacaaaagtcttttctaccaatttttgcggcgatattttgttacttttacgcattgacgtcgaatgcggttggtttttatacttattttgtatggatgtatactttactaggaaagctgtgatttctatgcgtacctcccctgcccgccgccgcggtttcacgctggtggaactgattgtcgtgctgacgatccttgccgttctggccgccctgctgattccggcgctgaccgggtacatcgacaaagccaacgaggccaaggttttggccgaagcccgcaccgttctgacggcagcgcaggccactgtgtctgaggcgtatgccaaggagcagcttgtgtccagcgacggcgctatttatgataaaccggctgataaggctgctaatgatatggcaaagcaaatatgggagctttccgagcttgaccccaacaacaagaaaatcacctggcgttttacagtggcaggcctcaaaaaccctattctgacgccaggcgtgatcgatacgtttgaatactgcaacggtgcctaccgcatcacctaccatgccattggtacggatgaatacccctccggctgggacaacgcggagaaggcgacggcactgaagccgctcatccttgatgatggcggcaaacctctcttggagtccagtgactacgacccggagcattggcattag

SEQ ID NO: 893 - DNA, 25879 bp, unidentified
  source 1..25879: mol_type = unassigned DNA
gttgtagcccagcgcctttacctcgctcagctcccgttccaccgccgcatccgagggcggggtgtacagtccctccggccagtagccctgatccagcaggccgttgagcaggataggcttgtcgttcaggcagaagcgcagcacgcccttttcgtccggtgcgcagctccacttgcgcagggcaaagtagctgtgcacggtgtcgaactgttcttcctctccctgcgtggtgcccacggtcaggtcgtacaaaaagggcgtgtccgggctccacggaaagaaatactcgtccgcaatatgcagcgtcacctcaccgtcttggccggcctcatcaccgccccagtcctcggcaatggtcacgcccccggcgcgcaccaccgcccacaggttcgccgcgccgccgggtgcagaggtatgggctttcacggtcacggtgcgggcatcatagtccggcgtaacggtgagagactggatgtaattttccggcacacgctccagccagaccgtctgccagatgccgctctgcgcggggtagaacatcccgccgggctgcaaggtctgcttgccccgcgcctgtgtgccgtggccggtagggtcctgcaccgccacccacaggctgttgcggcctgtgccgttgagctgcgcggtgatatccagcgtaaagggccagtagccgccccggtggccgcccaccagatggccgttcacctgcacagcgcaggcgtagtccaccgcgccaaaatgcagcagcacccgtccgcccgtcccggcgggcggcgcaaagtaccggtggtagtgcagccactgcccgggctgcaatgtacgccccaccccggaggcgcggcactccggcgcatagggcaccaagatctcgccgtcccagcccgccgggcgctgtgccgaagcggtgatggcgtactgccacgggccgttcaggttctcgtagctgtcccggcgcatggcggggcggggatattccgtcaaaggatgcatacactcaccagccttttctactcgtttgctccattctagcacagcccggggcgtttgtataccggggagcggacgattttggatagccgctgcgtagctctggccatcttcagcggaaaattatttttatatttgcaattctggaaaatctgcagattttccagaattgcttcttcacgagagcaaaaaaaacgccgccgcacggcggcatggctgtgcggcggctttgtgagaaggttggaaattgcttagttctcggccagattaccggtataaagctggtaatacttgccctttttggcgatcagctcgtcgtggctaccgcgctcgatgatgcggccctgttccagcaccacgatgcagtctgcattgcggacggtggacaggcggtgggcgatgacaaagctggtgcggccgtacatcaggccgtccatgccgcgctgcaccagcgcctcggtgcgggtatcaatggaagaggtcgcctcgtccagaatcagcaccgggggatccgccacggctgcgcgggcaatggccagcagctggcgctgtccctgcgagaggttggcgccatcgccggtcagcatggtgttgtagccctccggcaggcgcttgataaagccatctgcgttggccagacgggcggcggcgatgcactcttcatcggtggcctccagccgtccgtagcggatattctccatcaccgtgccggtgaacaggtgggtgtcctgcagcacgatgcccagcgagcggcgcagatcggcctttttgatcttgtggatgttgatgccgtcatagcggatcttgccatcctgaatatcgtagaagcggttgatcaggttggtaatggtagtcttgcctgcaccggtggagccaacaaaggcgatcttctgtcccggacggccatacaggttgatgtcatgcagcaccgttttttctggcacatagccaaagtccacgtccgtaaaggtaatatcgcccgccagcttgtggtaggtaacggtgccgtcgtggtgggggtgcttccacgcccacaggccggtgcgctcggcagtttccaccagctggtcgttgcggtcgtacttggcgtttaccagcgtcacatagccctcgtcggtctcgctgggctcgtccatcatcttgaagatacgctcggcaccagccagtgccataatgacgctgttggcctgcatggacacctgactgatgggcatattgaagcccttgttcaggctgaggaaggccaccacggtgccaagggtcatgcctccgacgccgccaacggccatggctgcaccaaccagcgcacagatggcgtagctgatgttgcccagctgggcgttgaccggcatcatgatgttggagaaggcattggcctgcttggcgctttccttcagctggtcgttcaactcacggaagccggcaagggtctgctgttcgtgggtgaacaccttgaccaccttctggccttccatcatctcctcgatgtagccgttcaccttgcccagatcccgctgctgctggatgaagtacttggaggagctttttgcgatctgcttggaacagaacagcatcagcgccaccatgagcatggtaacgatggtcagctgccagctgagcatgcacatactgaagaacacggatacgatggtgatgacgctggacaccagctgcgggatgctctggctgagcatctggcgcagggtatccacatcgttggtgtacacggacatgatatcgccgtggggatgggtgtcaaaataccggatgggcaggctttccatgtgggtgaacagcttggtgcgcagattgcgcagcgtgccctgcgttacgttgaccatgatgcgggcgttggcccatgcggccagaatgcccacgaagtagatacagcacatccgcaccaatgcaccggccagtggtgcaaagctggggttctgctggcgggtcatggggacgatgtaatcgtccatcaaggtctgcaagaacaggctggcctgcacattggccagcgcgctgaccacgatgcagacaagcacaaggatgcagtggggcagatagttgcggaacacctcatccataatgcgcttcagcagcttgcccgggttttccaccttggggcgcggcccccgtgcgccccgcgggccggggccatgtacttcttttactgccattactgcgcacctccctgcttgtcaaaatcgccgccgccctgcgtctggctgttgtagacctcctgatagatggcattggtcgccagcagctctgcgtgggtgcccagaccgttgatctggccgttctccagcaccagaatgcggtctgcatcctgcaccgaggagatgcgctgtgcaatgatgatcttggtcgtgccggggatctcctcccggaaggccttgcggatcttggcatcggtcgcggtatccacggcgctggtggagtcgtccaaaatcagcactttgggcttgcgcagcagggcgcgggcgatggtcaggcgctgcttctggccgccggacacgttggagccgccctgctcgatccatgtattgtacttatccgggaagcgctggatgaactcatccgcgcaggccagttttgccatgcggatgcactcttcctcggtggcgttggcatcgccccagcggaggttatccagaatagtaccgctgaacagcacattcttctgcagcaccatggagacctcgcggcgcagaacatcaaggttataatcccgcacatccacgccgcctacccgcacggtgccgctctcggcatcgtacaggcgggggatcagctgtaccagactagactttgcgctgccggtgccgccgatgatgcccagcgtctcgccgggttggatggtaaagctgatatcgttcagcaccggctgaccgctgccgtgcttatacttgaaggtaacgtggtcgaactggatgctgccgtctgccacctgctgcaccggctgctttgccggaggcaggtcggtgtgctcgtccagcacctccacgatacgcttggcagaagcggcggacatggcgatcatgacaaaggccgtgctcagcatcattagtgccataaggatgttcatgatatagccgaacagggcgttcagctggccggtggtaatggcaccgtgcagcacatactttgcgccgaaccagctcagcgcgatgttgcagccgtataccgccaccagcatagcggggttattgaagctcaggcggctttccgcgttgacgaactgcttgtacaggctctcgcaggcggcggtatatttttcgttttcgaagccctcgcgcacaaagctcttgaccacgcggatggcagagacgttctcctgcaccgaggcattgaggttatcgtagttcttgaacacccggtcaaagatgcggaaggtggggatcatgatggcagccagcaccgccaccagaaaggccattgccaccacgaacaccagcgacagcgggccgccgatgaccacagccatgaacattgcaaacaccagatgcaccggggcgcgcacgcacatgcgcaggatcatctggaaagcgttctgcacgttggtcacgtcggtggtcatgcgggtgacaagacccgctgtggagaatttgtcgatgttggaaaaagaataatgctggatattttcatacatggcatcgcgcagatttccggcaaagccggtggatgcctcggcggcatacttgcccgccagcacgcccagcaccagcgcaatggctgccaccagaaaggtaagcagtccgtagcggatgatggcgttcatatcgcccttttcaatgccctgatcgatgataaaggccatgatggtgggcagcagcacatccataatggcttccagcgcagcaaagagcggtgtcttgatcgaggcggctttatactcgcccagatgcgacacaagctttttgatcatctgagttccctcctgttgaatttatttgtttggtacaaaacaattttatacataacaatttaaatgtcaatagctttcgaaaaatgttcataattgctaatttaacaagtcctttttcggcgctttgacggaaaaggtggttatttcaacgcttcccgcagcttgttcagcagccgcagcagttctgcgttctcctcctcggtcagcagtccggccacataatcgtcggtctggtggaaggacagcagggtcttttcgtgccgttggatgccctcctcggtcaaaaccagctgcttgagccgggcgtcctgcggcacgctcagccgctggatgtagcccttgcgctccatcagctgcaaaatgttcgtcaccgtggagcgggtgatggaaaactcccgctcgatgtcccgctggaacaccggctcgtcccggtggcggtagagatactcaatgatccacccgtgcatgggggtggtctgctctaccccgttggcgcgggaaaactggttcagcctgcggaagatcaagttatccacccggcgcagctgggcagggatgacctgcggcccttcccacggcgggtccagcttgcagggctcttcaatagggtgctgtgtacacataatgtttttcctctgttcaaattgttcgatgtgaaactgtttgatacgatacatatattacccatctccccgccccttgtcaagagggcggggcgcaaaaaaggccgctgcggaaaattttccgcagcggccttggtttttatggatacgggatacgcttacagctttttgccggtcagcagctcataggcctccagatacttggcaatggtcttgtcaatgacatcctgcggcaggtcgtagttgctgtcggggttggccttcagccagtcgcggacgaactgcttgtcgaaggagggctggctgtgacccggctcgtaaccctccagcggccagaagcgggaggagtccggggtcagcatctcgtcacccagcaccacgttgccgtcctcgtccagaccaaactcgaacttggtatcggcaatgatgatgccgcgggacagtgcatactcggcgcacttcttgtacagggcaatggtgtagtcgcgcagcttggtggcgtactccagaccgtggccggggaactgcttctccagcacgtcgatgctctgctcgtaggagatgttctcgtcgtggtcgccgatctctgccttggtggagggggtgtagatgggctcgggcagcttatcggactcctgcaggccctcgggcagctggatgccgcacaccttgccggtcttctggtagcttgcccagccgctgccggtaatgtagccgcgcacgatgcactcgatgggcagcatagtcagcttgcggcacatcatactgttgccagtgaactggggctggcggaagaactccggcatatcctgcacatccacgctcagcatgtggttgggcagcagatcgcgggtgtaatcgaaccagaacttgctcatctgggtgagcacggtgccctttttggtgaccttgtttttcaggatgacgtcaaacgcagaaatgcggtcggtggcaaccatgatcaggctgtcgccattgtcgtagatctcgcggactttgccttctttgatgggtttgaactcagtcataatcaaacactccattttttccatgttctcagcagcgcagcagcgcagcgcagttcttaccctattattctaccatactgccgcgcggtttaaaaggaacagaataaaagaaaaacaggcaagttttgtgtttttatcgtgaaaagtgcgcaaaaaacagtaggaaatttcggcgttttgacgataaaagtcgtactttatcctcaaatgcacgcacctttgcaaaatgcagtcatggacaagcgccgccggttgcggtatcatagtagtatgcgtatatctgcgctccgcaggggcgcaaaagtaaacaaggaggtaaagagtatgggcaaatttcccaagggctttttgtggggcggcgctaccgccgccaaccagtgcgagggtgcatggcaggcagacggcaagggtctggctacggtggatgtaacccccttcggcccggaccgttttccggtggcaacgggctatatggaaatgctgggctgtgatgacgcacatttctaccccagccacgaggccattgacctgtatcaccattataaagaggatatcgccctgtttgcagagatgggcttcaagtgcttccggctgtccattgcatggacccgcatcctgcccaacggcgacgatgctcagcccaacgaggcaggactggccttctacgacagcatttttgacgagtgccataagtacggcattgagccgctggtcaccatctgccactttgacactcccattgccctcatcaaaaaatacggcggctggaaagaccgccgcatggtggacgcctatgtccactactgcgaggtgctgttcgaccgcttcaagggcaaggtaaagtactggctcacctttaatgagatcaacatgctgctgcacctgtcctttaccggcgcagggctggtgttctaccccggcgaaaatgtggagcaggtcaagtatcaggccgcccatcacgagctggtggccagcgcaaaggcggtaaagctggcgcacgaaaaaatgccggatgccatggtgggctgtatgctggcggcagggcagttctacccccgcacctgcgccccggaggatgtgcgggcggcgcaggaggccgaccgggacaactacttctttaccgatgtacaggtgcgcggcgcttaccccgtgtgggctaaaaagcggatggagcgcgccggggtgcagctgcacacacagtccgaggacgaccgcacgctgcaggagggcacggtggattttgtgtccttcagctactattccagccgctgcatcacggtggataaggaactgatggcggcagagaatgcggaaggcaacgccgtgtctgcatcggtgaagaacccctacctgaaagccagcgagtggggctgggccatcgacccggtgggtctgcgggtgaccctgaacaccatctacgaccggtacgaaaagcccatgttcatcgtggagaacggtctgggtgcggtggataccgtagagccggacggctccatccacgacagctaccgcatcgactacctgcgggcgcacattgaggagatggaaaaggccatcaacgaggatggtctgccgctgatgggctacaccacatggggtcctatcgaccttgtgagtgcctccaccggcgagatgaaaaagcggtacggctttatctatgtggacaaggacaacgacggcaacggcacccttgcccgcagccggaaggacagtttttactggtataaaaaggtcattgcctcggacggcgaggacctgacctgagcaagcgccccggcactgtttgcggtatggcagcgccggggcgtaaaagtgtgaggaagaaccgataacggagaaaatttatgacaccacaaatcattgcacaccgcggtgcttcctatcttgcaccggaaaacaccctgacagcctttaaaaaagccatggagattggcgcagacggcgtagagatggacgtacagcagaccattgacgccgggcttgtgatccaccacgactatatgatcgatctgcacacggatatttccggcaagatctatgatatgaccatgggcgatctgaaagagctggatttcggcagctggaaggacgccatctatcaggacgaaaagattgctaccttacaggaagccatggagctgtgcaagcagatgccgggatgcaccgtgcatctggaactgaaatccaccatggacaacgacccggactttgtgccccgggtgctggaggtgctgcggcagacggagatcgtggatcaggtgatccttgtttccttcaaccacgcgctgctgcggcaggcaaagcagctgctgcccgaactgcgggtgggtgcactggtatacggcgagctggaaagcatgctgctgccgccgcccatcatctggaaggatctgggactgaccaacggcatggacgacatggaagccatggacgccgccctgccggagagcgcagcagacgaggaaaattgcagctggatgacccgctggatgagcgataaggtaagtatgctgcgggcaaactttcccggcgagagcctgaacgagatctataaaaacctgatggcgcaacgggatctgcccacctatatccgcagtctggactttgtgccggagtgggtcagctgtgagtaccacaccgcctacaaaaacgccggtttcattgacaaactgcacgagatgggcatcaaggtgtctttgtggacggtggacacggaagattccgtccgcagcctgctgcgcaccagcgccgatgcctacatcaccaaccgccccgaccgtgtgcgggagtggatggagaaggagcaggcagcgaccgccccaacagaaaccgccacggcagagtctgcccccactgctgaagcagacgccgggacagctgccgcagagtaaaccgaccggaacagacacaaaaaaagagataggctttcccgaaagggatcgcctatctctttttcattcattttattctgctgcgtcggtcagcacaaaggtcagctctgcggtgacggcgcacttgccgtccacccatgccgaggccttgcctacgcccacagcgccgtgctgctgtaccagctcgcagtggagggtgagcacgtccccgggggtgacctgcttgcggaagcgggcactcttgatgccgccgaacagcgcaagcttgcccttgttttccggcaggctcagcgctgccacagcgccggtctgtgccagtgcttccagcagcagtacgccgggcatgaccggctgtgccgggaagtggccgttgaagaattcctcgttgcgggtgacgcacttgcggccgatggcccactgccccggctcgtagtccagaacacggtccacgagggcaaaggggtagcggtggggcaggatctccgcgatctgcacgctgctcagagtgttggcgttttcacgcacggtacggggctctgccatgggtcagccctcccatctgcgcagggcgatgcaggcgttgtggccgccaaagcccagactgttgctcagcgcatactgcatttcctgctgccgcccggtgttgggcacatagtccagatcgcactccgggtcgggctgggcgtagtggatggtgggcggggcgaactggtcccgcagtgccagcgcggtaaacacggcctcgatgccgcccgcgccgcccagcagatggccggtcatgctcttggtgctgaccacggtcatctcctttgcgtgtgcgccaaacacggcgtggatggcggcagtctcgcaggcatcgttcatgtgggtgccggtgccgtgggcgttgatgtggtccacctgctccggtgcgatgtcggcatcgaccagggtcagcttcatgcagtcgatggcacctgcgccgccgggagcgggcgcggtaaagtggtaggcgtcgcagttggcaccgtagcccaccacctcggcgtagatgtgtgcgccgcgcgctcttgcgtgctccagttcttccagcaccagcacaccgctgccctcacccatgacaaagccgccgcggcgggcgtcaaagggcaggctggcagcatccgggtcggtggcggtggaaagtgccttcatgctggtaaagccgccgatgcccaaggggctgatgcagctttccgcgccgccgcagaccatcaccggctcgtagccgtcccggatgcggtggaaggcgtcgcctacggcgttggtgccgccggcgcaggccgtgaccgggcaggtgcacatgcccttcagaccgaagcggatggccacctgcgccgctgccatgttggcaatggccatgggcacaaagtaggggcttaccttctccatgcccttttcctcgccgcgggcgtgctgctcctcgatcgtgggcagaccgccgatgccgctggacaggatgacgccgatgtccttgccctcggcctcggtatcaaggccgctgtctgcaatggcttcggcggcagcgcccagtgccagcagggtgaagcgcgccattttgcggacttcctttttgtccaccacggtctcggggtcaaaatcctttacctcaccggccagcttgcacttgaagtcggtggtgtcgaactgggtgatggggccgatgccgcatttaccggcacgggctgctgcccagctgtccgccacattgttgcccagcgggttcaccgtgccaaggccggtgatcacaactctgcgtttttccataagggttctcctttacattgccatgccgccgtccacacagagcacctgcccggtgagatagctgctttgttctgcggcaaaaaacgccactgcctgtgccacatcctccggctggcctgcgcggcctgcggggatgccctgcgtcatgccggtgcgcaccgcctccggcagcacggcagtcatgtcggtgtcgataaagccgggtgctaccgcgttcacggtcacgttccgcgcggccagttcccgggcaaggctcttggtcagaccgatgagccccgccttgctggcggcgtagttggtctgcccggcgttgccccgcagcgccaccacgctggaaaggttcacgatgcggccatagcgctggcgcaccatgcggcgggcggcctccttgcagcagagaaaggcgcttttcaggttggtgtccagcactgcgtcaaaatcctgctcggtcaggcgcaaaatcaggttgtcccgggtgatgcccgcgttgttcaccagcacatccacccggccaaaggcctcggcagcggcatcgaacagtgccttacagccctcggcggtggatacatccgcctgcacagtcaccgcctgcacgccctcggcgcggcagagggctgccgtctgctccgcaggctctgcgccgtggcagtaattcaccaccacattgcagccctgctttgccagtgccacgcacactgcgcggccaatgccccggctgccgccggtaacaatggcggcgcgggtcagcttttcttcgctcattctgcttccttccatgcggtcagcaccgcatccagctgttccggggtctccactgcggtgcagaccaccccgggcagggtctttttcacaaaaccgctcagggcattgccggggccgacttccagaatgtggtccacgcccagctcgcccagacggcgcaaagtgtcctccatgtagacgctgctctgcacctgctttaccagcagctgcgggatgctgtcggtctcggccttttcatgccccagacagttgaacagcaccggcgtctccatggcgccgaagctctcgcccgcaaagcgctgtgccagcgcatcccctgcgggagccatcagctttgtgtggaaggggccgctgaccttcagcgggatgcagcggcgggcaccggcttcctttgccagcgcggcagcctgctccacggcggctttctcgccgccgatgaccagctgcccagggcagttgtagttgcagatctgcacacagcccgtctctgccgcctgttcgcagcaggcagacagcttttctctgtccagtcccagcacggcggtcatgccgcaggcaaggccctttgcagcctcggccatggccttgccccggaaggcggtcagctcgatggcctgctttgcggtgaacaccccggctgcctgcagcgcggagtattcgcccagcgaaagccccgccagataggcgggctttacgcccttttcggccagcacggcggtcacgccgcaggcaaaggccaccatgcagggctgggtgtattcggtctggttcaaaacgccgtccgggtcctcaaagcagacgcggtgcaggtcaaaatccagcgctgcgctgtcaaaggccgcccggaaggcggaagatgcttcgtaaaattccttgcccatgccggggtgctgcgcaccctgaccggcgtaaagtacggcaagcttcataaattctgcctccattcggtcacaagttcgtccatcagctcgcgcacggtgcgcatccggtccagcctgcccacgttttcaccgcagaagaagagcccttcctccacgttgcccttcaccgcctcgatgagggcgtgggtgatgcagtagggcacagcggcggggtcgcaggtcttgagacaccgagcgcagtgcttgggcgggaagcgcttgccctcagccagcgcctgcaccagcggggtgttcagcgcgcggccgggcattcccaccgggctgtggatgatgcgcacatcctccggctttgccgccagcagcacgtccttgtaggtctgggaggcgtcgcactcgtaggtggggataaagcgggtagcaagctgcacacccgcagcgccaagctttgtaaagtgtgccatatcggcaccggtgtacacgccgcccgccacaaataccgggatggcgtggccgtattgttcctcgtaaggctttacctcggccagcaccccgggcagaatctcgtccaaagtctggcagcggtctgccagcaggtcctcctcggcaaagccgagatgtccgcccgccttgcagccctcgatgaccacaaaatcggcggtgcggtcaaagccctttgcccagcggcgcaggatgagctttgccgcccgggcgctggatacgatgggcgcaatggccacctctttggtgcccacgatgcccggcagctccagcggcagacccgcaccggagaccacggcatccacccccgccgctacggcggtgcggatggcgtcggcatagtcccgggtggctaccatggcgttgatggctaccagacccatgcccccggcaatggccttggctttttgaatttctgcggtcagggcgcggtggtttgcagccgccgggtcgcgggcaaaatccggctcgcggtagcctgcatcggcggtggagatgcaccccatgccgccgcaggctgctaccgcaccggccagcccgcccagcgagacgcccacgcccatgccgccctgcaaaatgggtacttgcaggggcttgccgccaagggtcagcattcggcgttcagcgcggcgatgcgctgcctcccgccctgccacaggtcggcaaggatgtccgccacggggcgtacctcgtgcagcattccggccacctgaccggccatcaagctgccgcttaccgtgtcgccctcaaagacggcacggcgcagactgcccagcgtgtatttttccagctccatcttatcggcgcccgccttttcctgacggacatactcccggctcatgcggtttttcagcacacgcaccggtgcacccacggtgcgaccggtgacgatggtgtcactgtccccggctttgagcagcgcggccttgtagttggggtgaatggggcactcctcgcttgccagcaggcaggtgcccacctgcaccccgcaagcacccagtgccagcgcagccgccagctgacggccatcggcaatgccgcctgcggcgatgaccggcacgctgaccgcatccactacctgcggcaccagcgccatggtggtcatctcgcccacatggccgccgctctcggtgccctcggcaatgacggcgtcaatgcccagcggctccaaatgccgtgccagcacggcagcagccaccaccggaatcaccttgatgccggcagctttccacatggaaacgtattttcccgggttgcctgcgccggtggtgaccacggcgactttttcctccaccacgatctgggcaaacgcatctgcctgcgggtgcatgagcatgatgtttacaccaaagggcttgtcggtcagttcccggcagcggcggatgttctggcgcagggtatcggcattcatgccgcccgcaccgatgatgcccagtgcaccggcgttggagcaggcggcggcaaactcgccggtggcaatgtttgccatgccgccctgaatgatggggtatttcgtccccaagatctcgtttaaaagtttcatggtctttatcctttatattccacgatcatgccgccccatgtcaggccgccgccgaagccgatgcaggcaagggtctggccggggtgcagctggccgctttcagccagctcgttcagcgccaccgggatgctggcagcactggtgttgccgtggcggtccatgtttttgtagaactttgcaccgtcggcgtgcagcgccttgacgcagtggtcgatgatgcggctgttggcctgatggcagaccacccagtccagattgtccagcgtaaggccggtctcgtccagcacggtgtgcaggcatttgggcagggcatccaccgcaaagcggaacactgccctgccgtccatgctgatgggtgccgagcctgcgcggctggggccgccggcatggatggcggcatcgccccgggcacccagcgtgatggcaaagggcgcggaggtgtcggtcagttcaaacaccgccgcaccggcaccatcgccgaacagcacacaggtggagcggtcggcggggtccatcaggcgggagagtgcttccgtgccgataaccagcgcgtaccgcccgcccagcgtagccagcaggccgcgcgccaccgccgtgccgtacaaaaagccggaacaggcggcgttgacatccagcgcggggcggttttccggcagtgccagcgccgcctgcacctgacaggccacgcttggggtggcgtccggcgcggaaagggtggcgcagacgcagcaggcaatatctgccggagcaagaccgctgcgctgcagcgcctgctttgcggcagcaatggccagtgtagcggcattttcgccctcggtgcagtagtgccgtgtgcggatgccggtgcgggtggtgatccactcgtcgctggtatccacggtgcggctcaactcttcgttggtgaccgtgcggccgggcaaagccccgccggtggcgatcagacgcaaacccttcatgctttcctcatttctccgatctgacggaatttctggtagcgctgctcggccagctgacggccgttcatgcgggcaaggctgcgcagctgccgctgcagtgcctcgtccagattgccgaacagtaccccgtgggcgcgctgtgcgccgcccaccggctccgggatgatctcctccacgatgccgtccttgtacagatcctgtgcggtcagcttcatgatctcgcaggcttcgccgctgcgggaggaatccttccacaggatgctggcaaagccctcggggctcagcaccgagtagacggcgttttccagcatgaggatgcggtttgccacacccagcgccagcgcgccgccggaggagccctcgccggtgaccactgcgatcaccggcacggtcaggccgctcatctccatcaggttgcgggcaatggcctcgccctgtccgcgctcctcggcgtccttgccggggtatgcgcccggggtgtcgatgaaggtaatgatgggacggtcaaatttttccgcctgcttcatcaggcgcagggccttgcggtagccctccggcccgggcataccgaagttgcagcgcagattttcctccagcgtgctgcccttgcggtggccgatgaccgtgaccggctggccgtggaacagtgccacaccgcccagaatggcggcatcctccttgcactggcggtcgccgcactgctcaaagaagtcggtgaacagtgcatccacgatctcgtcgatgtgggggcgctccgggtggcgtgccagaaagaccctgtcctctgcggtcagcgccccgcagccggacagcaaagcgtcctcctgtgcggaaagctctgccagctcggcagcgtggttggtgatatcggtcatgttctcgtctgccgggtcgccgcgcagagcggcgatcttttcatccagcggtgcgagctgttgtaagatgtccttgatcataaggcgctccctcctcaggcgtgcagccgcagcagctgcgccagtgtttcgcgcatctcggtacggggcactaccttgtccacaaagccgtgctcgtactggaactcgctgcgctggaagcctgcgggcagcttttcgccgatggtctgttcaatgacccgggggcccgcaaaaccgatcagcgccccgggctcggccagcataatatcgccaaggctggcaaagctggcagtcacgccgccggtggtggggtgggtcagcacgctgatgtacagcccgccccgggcggagaaccgctcgatggcggcagaggtctttgccatctgcatcaggctgaagatgccctcctgcatccgggcgccgccactggccgagaagatgatcagcggcaggtgctttgcggtggcgtgctccacggcgcgggtgatcttttcgcccacggtggtgctcatgctgcccataaagaaccggctgtccagcactgcaactaccaccggggtgccctcaatgcgccccgtggcggtgatgacagcctccttcaggccggtcttgccggtctgtgcttccagcttttccgggtagccgggaaactgcagcacatcctgcggtgcaaggtcggcatccagttcccggaagctgcccttgtcaaggacgaggctcaggcggtagtacccgccgatgggcaggtgtaccccgcagttgggacagacgtactgtgccttgttccagatctggcgggtggcgcggcgtccgcactttttgcattccacgaactgcgggtcgttccacacggcacccgcatcccgccgggccttcagctggaaggtgcgctcccgcatgctgcccggcagcaggtctttgatactgttcatctcgtttcgcctcggtcagcctcagacatgggcattgatgtagttgaagatatcgcccacggtcttgaggtttgccagctcctcatcggggatggacacgccgcaggcctcttccagtgccatgttcagctccacagcgtccaggctgtcggcctccagatcctcggtcaggctggcctccatggtcaccttgtcctcatcgcagctcagggtatcgacaacgatcttcttcatttcctcgaaagtcatggtagtattctcctttatgttcactgtttgtttttaattatttacctaaaatttatgaggtatcgaacacgaccattataatcaaaccgttggataagtcaatggttttagttaaaaatttttatcttttacatttctgtcacagtttgcttcctttttatataggggcacccgcagggcgcaaaaaggccgctgcacagtactttgtgcagcggcctttccggcaataataatatttcttattccaacccgatctgctgggcgtattcctccagcagttcccgctcaaggaagggggtcttgacgccctcgcggtcgcggtaggtctcgtgaccctttccgatgacggcgatcagatcaccctcctgtgcgtgatccactgcgtagtgcagcgcgtccagacggtcggggatctccacgaactttgcgtccgggttgcccttgttcatgccctcgcggatatccgcaataatatcctctaccttttcaaagcggttgttgtcctcggtgaggatggagaaatcggccatcttggcgcagatctcgcccatgccgtagcggcgcagcttggagcggttgccgccgcagccaaacaccaccaccagacggtggggcttgtaggcgcgcagggtggtaagcaggctctcggtggatacctcgttgtgggcgtaatccagcagaatggtgaactttttgctgatgggcaccagctccacacggcccttcaccacgcacttgcccagaccatcgtggatggcggcatccggcagacccagcaccttgcccacagccagtgcggccagcgcgttgtacacgctgaactcgccgggcatattcaccttgacgtccatctcgtccttgccggtaacgtggaaggcaacgcccagaaaatcgtgggtgcgcagcagtttgtagccggtctcgcggtagtcggccttttcatcgcggccataggtgaccagcttgcaggtgtggccttccagcagggcggcggtgttctcgtcatcgatattcaccacgcccacatcgcagcgcttgaacagctgtcccttccagctgcggtactcctcaaaggtcttgtgctcgccggggccgatgtgatccggcgaaaggttggtgaacacgcccacatcgtagtgcacgcccgccacgcggtccatcatcaggccctgactggatacctccatcagcgcggtatcgcagccggcatccagaaactcccggaaggtcttttgcagctcgtagctttccggggtagtgttggcggtgtccttgtggcgtcccatatagtagatgccgttggtgccgatcatgcccaccttgcggcctgcggcctccagcacgcttttgatcatgtgggtggtggtggtcttgcccttggtgccggtgacgccgatcatggtcatctgccgggcagggttgccgaagaggttggcgctcatcaacgccatggcatagcggctgctctccaccttgaccacggtcaccccgggcagggtagaaaggtcgatgtcgtgctggatgaccagcgcgctgattcccttggcggcgcagtcagcggcaaacgtgtggctgtcccgttgggtgcccacgatacacacgaacaaaagccccggggcagccttgcggctgtcgtagatgatatctgcgatctcagtatccagactgccctgcacaagggtaaagggcacgccttccatcagttgttccagcttcatacagtctcctccaaagagcttctttacatggggttttcttcttcgttggccgtcatgcggtcagggtgggtcaggggcagctgctcggtgtccgtttcagctgccggttcggtggtgtcggcagcatccgcgctttctgcgctttccgtgctgtcggcagtgtcctctgccggggcgggttcctctgccttgggcggcaccacatagccggagggcagggtgggctcgccctgtgcaaaatagatcttgcgggtgctgctggcgctggtatggctgaaatccagccgcccggtgtcggtggggccgcagcccttgccgtcggcgttggtcagtacatagcgggcgcggtccagcttataatccagatcgttcagcgtgcccagcagcacgctgatgcggtcctgatacaaaaatgcgagctgctcggtgtctgccacttccagccgtgtcacgtcctgcgacaggccgtattcctccagcttgctgcgcagtgtgcgcagcgcttccatacgggcggtctcggtgctcaccgtgctttcactttcggcactttccgacccggaggcgcttgccgcgtccgcatcgtccacgaaccagaagccctgtcccggggtggtgtcctgcagcttgccgccgtacagggtgcaaagcccctcgggctgggtgctttcctcggacaggatcttccatttgtccgagatcacaagccacttgctgccgttttgcaccgcgtaggcgggcacggcctcggtcacctgcaccaccacggtgttggggtagtcccggatcaccttgatggagcccaacagcgggaagttctgctccagcacagcggccttttcgccgggctcaaagctgaagatgttttcctccagctgcacgcccatccgctgcaaaatgctgtctgcggagtagccagcgatttcggtcacctgcttgccgtccggggtctgtacctgaatggagttgatgcggaacagcatggtcatggtcaggtagatgcccgcgccaataacgcacagcagcatggcaaaggcggtcaggcggcgcagcatccggcggcgccgcaatgtggcgcgggtcaccttgcgctttttgcgcatttcccgccgggcagggctttgctgcggggcgctctggctgcctgccgggtgctgccggttcgggcggttttgcgcgttctggtttttccggctgctctgcccgctgcgggcattgtttgccgggcggcgctgcttgccgccggacttcgcgttttttggtctgctgcccgccgggcggttaccggcgggatactgggtggtattgctcccctgcccctgcgccgggcggcggggctgggattgggtctgggtggggaactggatgctgttatctgcccgggaggagcgcacactgccgttggcgctgcgggagggcgggcggctgagcggctcgccgttgtagccgtagcggctgctgccggtgctccggggcgtatgatcctgcgaaggcgcagaggtgcgcgccacatcccggttcagatcatagggtctcgggttccggggtctgccgttgcggtcacggttctgctgcatcattcgcaccttctttcctgtttattccggggctgcatcacggagtctttaccagcttgagcagcgccgcagtgatgcggtccagactgtcgtccacagacaggctgcgggcgtttttgcccatctcggccagcttgccgggctgtgccagcatggcagaaacagtctgcaccagcttttcaccggtcaggtctttttcttcaatgaccacagccgccccggccttctgcagctccatggcgttgtagtactggtggttctccgccacattggggctggggatcagcacagcggcgcgtcccacggcctccagctcggccagcgtcagcgcaccggcgcggctgataacgaggtctgccgcagccagtagctccggcatattgttgatgtattcctttaccacaaggctgtcgccgggggcaaaatccttctgcttttgcagctgctcaaacagctgcaccccgtactgcccggtggcgtgcaggtgcagcaccggcttgtgctcatgctgttcccaggcgcacaggtctgccaccacctcgttgacccggcgtgcgcccaagctgccgccgaaggacaggatgacggtgcggtcgcccgcacccagctgtgcacggatggcctcgcggttggcggcctgtgcaaacacctccggccgcacggggttgcccaccacaagggtcttgtccggtgcacccagcttttccacggcggcgggcacggcggcaaacacgatatccacatccggggccagcagcttattggtcacaccggggaaagcgttctgctcgtgcagggcggtgtggatgcccattttggcggcgcagcgcaccaccgggccggacacataaccgccgcagccgatgacgagatccggctttacttccttcatcatggccttggccttggggccggaaagcgccagattccacagggtaatgatattgcgcttgatgttgtgcagactgagcttgcgctgaaacccggtgatctcaatgtggtggaaggggtagcccgcctgtgtgaccaaacggtactccatgccctccttacggcctgcaaagtggatctcggcggtagggtcggcctttttcaaagcaccggcaatggccagtgcggggttgatatgtccggcagtgccgccggctgcgatgagaacacgcatggtgattcctccttataaacgcccggcctgcggccgggcgggcttgcggtttgttttactgttctgtacgggctgcgcgggcagaggccaagtcaatggtcttgcgtgcaagttctgcctcgcgctcggcgcgggcggcctcccgctgggcacgcatctgctcccgctgctgcgctgcccgctcgccgttgcggccaatgttcaccattacgcccatctctgccagcagcaggatcaggctggtaccgccggaggagaagaagggcaggctgatgccggtgttgggcagggtgttggtgaccacggcgatgttgcagaacacctgccacgcgatctgcgccataatgccgatgcctaccatggtgcagtacagattttccgccttataggcgatgagcagtccctgcacgatgaacagcacgaacagcacgatgatgagcaccgcgccgatgaagcccagttcctcgcacaccacgctgaagatgaagtcgttggtgctttccggcagccagagctgcttttccacgctgttgcccagccccagccccttcagtccgccggagccgatagcataaaggctctgcacggtctggtcggtcatctggctcagatcctgcgtccagccgtccagacgcttttgcaggtaggggatagaatccacatgggagagcagggtctccagcagggtgcccgccgtgatggcacccgcccatgtcagcacaccgccgctgccggacagcagcaggatggtgcccaccaccgccaccgtcagcacgatgccggacatgtgcggttccagcgccagcaggatgaccaccggtataaggggcagcaccggcaccaccagctgcttccatacccgcacccgcagccactcccggggggtaagcaggatgcggcgctccgggtccagccgctccacctgcggtgccttggctgcaagatgggaactgaacaggatcatctcaaactttgccacctccgaggattgcagcgtaagccctgcaaagcggatccagcggcggcagccgttcaggggtgccatggtcagggtgacggccagcatggccagcacgatgaagtaccccggcaccaccatcttgcgcagaaaacggtgatccacatagcttatcaggaacatacagcccagccccagtatcatgcacagcgcctgctgcttgatgtagtggaagctgtcgcccatgcgcaggtaaccggtggtgtagctggcgctgaacagcatcaccagcccaaagatcataataacagccagcgtggccagccagtcgatcagcagccgggaccacgggcccgggtctcgctggaacaccggcaccggcgctctgtgttttttgcggttagtcgccatctgcgctcccttccctctctgtgcccggtcagcaccagcgcagcagcgccagcgccagtacatagccgacagcgctcagcgcaaagctgcacaggaacaccgtctccgggctcattttatgcttttttacccagcagcgcaagggcttgccggtgcgctttgcacccagcagctgcgctgccaaaagaccgcctgccgcccagaagggcagcgccagcggcacggtcaggctggtcatatccagactgagcgggatgcagccgatggcacccgctgccagcaggctgccgcagcagcccacccccagccttgccggggggaacgcccacagcagcagtgccaccagtgccccggcaagcgcggcaggcagcaccgccagcccgggcacgcccaagccggcctctgccatcatcagcgccagcatagccacaaaggccgcgccgcacaccgtaccctcgtcccgctcggcgatgcgggcacactcagccagcaccaccatgagcaccgcccacaaaaagggcacggcgctgcccagcagcacataccccgccccaggcacatccagtccccggggcagacagcccgctgcctgcagcagcaaaagaacgaatgccgcggccagtgcctccagcaaaagccgcacgtcccgccgcagccccagcgccgccgggctgcgcatccgggcaaggtcctctgcaaaacccactgccccaaaggcaaggcttccggccagcgccgtgagcagccgtgtcatcaaccggccctcgctgcccagcagctccggctgacccacgcaggcggcaagccagcccacgcccaccgcagccaccgtgcccgccgccgcacacagcccaccccacagcggggcgcgcaggggtgcaggccggggctgctcagactgtgccggctgctggttttgttcgcggcgttccagcacccgccgcagcggcacaaacaggctgcacagggctgccgtaagggcaaagcccagcaccaccgccgctgccaaggcgaaacgctccataactcagacactccatttcgccaaatagttatacttccgcttctttatgctcttcgtagaagatatccagcactttttccagtgccatgccgtggctggcctttaccagaatggcatcgccgggctgcacccggctcagcagggcatcggcagcctcgcggtagctgtccgcgtgcagggtctctacccccttggcggcagccaccacggcggtgcgcttggcctgctcgccgtaggtgatcaggcagtacagcccgctctcggcggcaagacgtcccagctcctcgtgtgcttcgcggctcagctcgcccagctccagcatatcgcccagcagggcaaaacggcgcttgcaggggaagtccttaaacatcgccagcgcggccttcatgctgtccgggtttgcgttgtagcagtcctcgatgacggtcacgccctcgctgtccactaccttctggcggcgaccggtctgctcaaagttggaaagaccccggatgaccctcttggcgtcgcagcccagacgggtagcggcgcagtaggcagccaaggcgtttgccacattgtggcgtcccatggcggggatattcaccacaaaggtgccgtgctcctgatcctccagcacaaaactcatgccgtccgtctcctgccggatggacagggcgcagacgtctgcgttttcatcgctcaggctgaaccacaccgggcgcacatgggcgggcagcgctgccttgcgcaggaaggggtcgtcgtagttcagcaccagcggtgcgccctccggcagaccgttgcagatctccagctttgccttgcagatgttctcctgactgcccagattgccgatgtgagacacgccgatgcaggtaatgatgcccacatccggccgtgctgcccgcgccagacggtcaatttcaccggcgtggctcatgcccatctcgatgaccgcgtactcggtgctgctttccagccgcatcaaggtgcggggcatgcccagttcattgttctggttgccctcggtcttgatggtctcgccaaagccgctcagggcggcgtaggtcatctgcttggtggtggtc

SEQ ID NO: 894 - DNA, 21014 bp, unidentified
  source 1..21014: mol_type = unassigned DNA
atgtaaatattaaaagtgaaatattaaaatcaatctggaaaatctgttcgataaagacagcaccacctttcataaccactgcggcatacaaaggcattccgaggaaaatcactgcggcaacaaagacttgtattccccgtgaacgataatgcctgcctaacaattgaggaaatgtacttacattcaatttagcacccattcgccgcgtccggagtccgaaaaaaataaaggcaatcactacacctataaacatattcaaaaagcaaagccactgaatacccataccaaaagctgctgctaccccaccaaagccgacaatagcagaggctgatataaaagtggcaccataagagagtgccatgacaaacggattcatctgtcgacctcctaccaggtaatcactggcggaggatgttttcttataacctaaaaaaccaagataggccagtgacagcagataggctatcacaatcagtccaagtgtaaatgtattcatcgtgttttatctttttcgtcgtctttattccagtatttgaagccaaaccaagcagcaaagagcacacatactaccgaaagcaagtatggcaaaatgataagtgagtcgctaattccaaacattcttgtatcagatttcgattaatattggtgcaaatgtaaggaatttattgaaatagagaaacaaaatgcagaaattatcagaaggaaaggaataaaaataaaaaagctgcctcgttttatcagaagcagctttcagaaaagccaataaacggtttaaaacttatcgtaatgaatttttttctcatcaaatttctgtttaggctcttgggcagttgccggataaccaaacggaatcacacacaggggcactatattccccggaagctccgtatatttacgaacaaccctgatacggtcttcataaggataagcagctgtccataccgcacccagcccctgtgcttcggcagccaataatatattctgtgcagcagccgaacaatccagataccaataggaagattgagctacatctccacatacaacaatggcatagcgagcttgagtcagcatctttgcataaggtaaagcagcggccatcgaatcaagagcaacccggtcggtgaccaatacaaactcccacggacgaatatcttttccggatggtgcagccataccggcacgtagcatccaatctattttttctttttctacttccttgtctaaataagcccgcacacttttacgtgcaaaaatattatctaacgcagcattggatgtcgaaggaacttctccttgagaagcagatgaacaagctgcgaatgaaatcattcccagtatcccgatcacccatacataaaccgctttctttattaccataatctctttttatatcaaaaaagtttcaatctgttttcctgagcttctttcaatgaaacggtttcacgcttcatcatgccgctcttatcacgaagggcttcatattcaccggataattcttttgccaactcttctttcgatttcggactcatcagccgagcagcaacacccgcattctgcgaagcatccttcaagtgaacaaccggagcgtgataaaccggagcaatcttcaatgctgtatgtagtttagaggtagtcgctcctcctatcaacaatggaatatccaatccggctttttctaattccatagccacatgtaccatctcttccagtgaaggagtaatcaacccactaagtccgatcatatccactttctcctcaatggctttttggacaatcgattcagccggtaccatcactcccaaatcaataatatcgtaaccattacatgccatcacaaccgagactatatttttgccaatgtcatgcacatcccctttcacagtggccagcaaaacttttcctgccgaagcagtaccttccaccttttccgattctataataggttgtaagattgcaacggctttcttcatcgtacgggctgttttcaccacttgtggaagaaacatcttacctgcgccaaacaattcgcccacatgattcattccattcatcaacggtccttcaatcacatccaccgctttatcatatttaggcaaagcctcagcaagatcttcttccagaaaatccccgattccttttaccaaagcatattgcaagcgttcttctaccgtaccgtccctccaggcatcatgttttaccggttgcccagccgaagtattacccgcagaagcctcctttaaccggtcagccaattctatcaatcgttctgcggcatcacttctccggtttaatactacatcttcaatcctctcaagtacatccgccggaatatctgtatacaatacagaagtacccggattcacaatccccatatccatccctttctgaatggcatggtaaagaaatacggcatgcatcgcttcacgaatatagttgtttccacggaatgagaacgaaagattacttactcccccactgatatgggcgcccggaagattctttttaatccaagccgtcgcctctataaaatctaccgcatagttattatgttcctcgatccctgttgccacagccaatacattcgggtcgaaaatgatatcatgcggattgaatcctatcttatctacaagcaaatgataggcccgttcgcaaacttctattttacgggtggctgtatcagcttgccctttctcatcaaaagccatcactaccacagccgcaccatattggcgaaccgtacgagcatgttcaaggaatttctcctctccctctttcaacgagatggaattcacaattgattttccttgaagacatttcaatccggcctcgataacttcccatttcgaagaatcaatcattacaggaacacgagcaatttccggttccgaagccaccagattaaggaaagttgtcatctcctcctttgcatccagaaggccgtcgtccatatttacatcgataatcagtgctccgtcttctacctgtttacgggcaatggataatgcctcgtcatatttcttttcattaatcaaacgaagaaatttgcgcgaaccggctacattgcaacgttcccccacgttaacgaaatttatttcaggtttcacttccaacagttctaatcccgaaagccacatacaatccggtttacaaaccggaatatgcggttttgctccggcaatcaatgcaggatattctgcaatataggcatcggtagtaccacagcacccgcctatgatattgatcaatccttcatgaacatactcttttacttcatgggccatatctgccggagtctggtcatattttcctaaactattaggtagaccagcattcggataagcactaatataataaggagcccgagcggccaattgctctaagaaaggtttcagttgcctggcaccaaacgaacagtttaacccgactgagaagatatcagcgtgttgcactgaagccaggaaagcttccaacgtctgtccggaaagagtacgtcctccggtgtcggaaaccgtcacagataacataacaggcacttttactcctgtagccttcattgcacgttctgccgccaaaatagcagctttggcattcagcgtatcaaagatagtttctatcaataaagcatctaccccactttcaagcatagcttccatctgttgctgataagcatcagccatttcatcataagtcacagcacgataagccggattattcacatccggcgacatagaacatgttttattggtaggacctaccgaaccggctacgaaacggggtttatcgggatttagtgccgtatattcatcggccacttcacgtgccagctttacagccgcttgattcatttcacgcacatactcttgtacatgataatcggccatagaaatagtagtagaactaaaagtattcgtctcaatgatatctgcaccggcttctagatacttacggtgtatatcccgaatcacatcagggcgtgtgagacaaagtaaatcattattccccttcagttgaccgggaatatgcgcaaagcgctcattacgaaaatcttcttctctaagattatattgctgaatcattgtacccatagcgccatccaatataaggatacgttcgagtaccagctgttgaatagtttttttcattgctaaaggtacaaacctatcatcgtttaaacatcctgtccatatcacgacggtcgtctttttctttcaaagcctcccgtttatcatattgctttttacctttagccaaagctacaaccactttggccaaacctctttcattaataaacaaacgcacagggacaatggtgaatccggcgtctttcgtccctctttccaatttattcagctcctttttgctcaatagcaacttacggtcacgtcgggccgcatgattattatacgagccataaaaatattcggcaatgtgcatattcttcacccacaactcgcctttcgcaaaatagcaaaacgtatctaccaagcttgccttacccagacggatggacttaatctccgtcccggtcaacacaatacctgctgtataagtatcgatcaactcatagtcgaaagtagcacgtttattctttatatttataggagccagtttcattttattttcttaatttaatatagctgttagcttgttgaacacaacttgtattaccgccggacatagtattaacaaaatcgacgagaaaatggtgtaacgcaaccgattcttttcttctaccagcatcacaacccttgctccttcccataccacataaacgatataaaattggagcagccaaccgataatactgaaatcaggaagcaatccggttactatatgtaacaaaaaagtgacaactaacgcataacctgcaaactgctgtgccaaagggatatcattggtcataccaaacatttttatccccatctgattgatagcataagccgccagaaaataacctccgaacaaagctaccgccaccgcacaacactgcgtcatggccaactggaaactttgtggtcctccccaaccattagtccacaaagcaccaatgaatacggataaaccacataaaccaatcataggatagacaaaaacagtaagaactgcccgtctatcctctaaacgaatttcctcccaggccttggccggagaggaaatcaatgacattgctatttgaaataatgctttgtaattcaaattattccgcagttttatattctatttcatataccttctctatagtagaagtatcttccaacttattgttgtactcattttgctgtgctactatagttattttagcaggtttagcttgtccactcttcagagtatattctcttaagatttggctgatttcataagccttaaagctggaagtacgtgttgcacgctcagcaatagcagcaggttcatcctcaactttatagcgtaaataaagtttcaaaatggtatcaccagatttaatatcatctgtatagcagacaagagtaaaagtatgtttagcgagctcatttttaatatcttctgtagtagtcacatttttcacacgataaagtaccggtaatacaatcgtattttcactaaactgaaatggggccacagttgaatatcctgatgcaaaactcaacgaaccaacaggtgcattagtagtcacatcacctgattcacctactttcggagtggttattgctgtagcatcaattcctgtaggatctgctaaaagtgtaattttaattgacttaggatttgtcgagaggtcctgaccttcatcaacctggcaataaatgtaagccattcttgcattcaaagttacaggaatcgtgttagtagggatcagttccgtaccggcagcatctgtgaatgtaacataacccattctatcattcactttcaccacaccggcccactgctgaggaccgctttctccggaatccatacatgaagtaaacatagtacccatcaacagggttaaggtcaacaccattaatttcaattgtttcataaatctattttttagagtttgcaaagatataaattctaattcacaataagtaaatgcagagacttaaaaaatactgcatctattacttaactatttttgcaaacaactctaaatgatcgtctacatagcttgctaccagtgctgtaacctcctcctcaatatccagatattcttcttcaagatcatcaaaggcctcgtattgctcgtacatagccataaattcgtcctctgtacgctctttctccagatcgtggcgatgagcatcgtatatcttcttagctttataaaccaacttcgagaaatcctcggctccccacaggcgcattacctttgcaaaaggattatcaaagatataacctccatacccattctgaatcaattgacaaaagccaccgaacatgacttcatcccgaaaaatctgataggccagcaaagagtgctgctcccctgtcaacagtggcattgtttcggcagtaagttccccgccaatcacttctttatacttgtctgtaaacacctggataaattcatccattccctcacccgcagctttttgcaaagaggcatccgtaacttctatcatttccactatatataataaggtgaattctatatttataaatatcaggaaacaaaaatacggaaatatatggttcagaaaggctttttgataagttttttagaaacccgtttaattttcttcaataataatcctataacgaataatttgatcaccttctctgccggatcgcatgtcagttcattgtagttcggtattgcaacaagcgttatcaattaacgttgttaatgccatcttctttgcattctgtgcttgaatacaaagaacaagtgttttacatttaaaagccttcttctctatcatcaaaacatttgttttaacagtgtgttaaaacaagccttttaccgacaaacagcaagtcatagtaaccttctaatttacaaaagaataacaggttcatcaatttgttctccgagaatttcactaataccttctaaaggtagataattaaagatttgacaagtatagcatcttattcaaagcaatctacacaatacaaagaaacagacgggattcaattctcaatccttataattgataatcaatgatgcaatgacataccaagatatacgcctatgcagtaaggtatcaaccaaatgcaccacaccacaatactgaaacggttgaaatgttccttggctctttcactccctttcacatacgtccagatagcccacatagcgtgaataaacatcaacaggatagcgataatgccggtcacagtatgtatttcatcatgcaagtgtgtgagtcgcgcaatattctccattaaagccgttcccacagaatcagccagcagtcccaacaaaaaaaataccagatgccaaaatttcaacctcttctgcaatcgctctccccacactcctattgtgtaaaacaccaatgccgaagttatcacactaatggctgcaattaaataatgtatatctacctcattcaaattcataaccgatcaatttttctcagaagaaacaaagaatcagagtaatagttcaacaaaacaaagattatctaaaatgtcatctccacattacaatctaacaaaaccacaaattctatttttctcttttcataaaaaagtaataaaacccgatttgcaaaaacaaataaaacgactacctttgtgagcgatttgagaatcgtgactacgtatttttaattatatcacttaaaaaagagctaattatgacttattcacacgaagtggaacacatgtgtgttgtaaagaagggtcctaaccacggaccggctcccatacccgaagaaggaaaatgggtaaaatcaaaagaaattgttgatatttcaggtctgacacacggtgtgggttggtgtgctcctcagcagggtgcatgtaagctgactctgaacgtaaaagaaggtatcatccaggaagctctggttgaaactatcggctgttcaggtatgactcactcagctgctatggctgctgaaatcctcccgggaaaaactatcctcgaagcattgaacacagacttagtttgtgacgccatcaacactgctatgcgcgaactcttcttacagatcgtttacggacgtactcagtcagctttctcagaaggtggtctgatcatcggtgcaggtcttgaagacttaggtaaaggtctgcgtagccaggtaggtacattgtacggtactttggctaaaggtcctcgttaccttgaaatggcagaaggttacatcaagacaattgctcttgacaaaaacgatgaaatctgcggatacgaattcgttcacatgggcaaattcatggatgaaatcaagaagggtactgatgcgaatgaagcattgaagaaagttaccggtacttacggacgcttcactgcagaacagggagctgttaaacacattgatccacgtcacgaataatataaggaggaaaagaaattatgattagagaagtaaaatttgaaagtcaggaccgccgtatcaaaggtatcatcgaagccttgaacgctaacggtatcaaagacatcgaagaagctaacgctatctgcgaagctgctggagttgatccttataaaacgtgtgaagaaactcaaccgatctgttttgaaaatgctaagtgggcttacgtagtaggtgctgctatcgctatcaagaaaggttgcaaaaacgctgctgatgctgccgaagctatcggtataggtctgcaggcattctgtatcccgggttctgtagctgacgaccgtaaggttggtatcggtcatggaaatctggctgctatgttgttacgtgaagaaaccaaatgtttcgctttcttggcaggtcacgaatctttcgctgctgccgaaggtgctatcaaaatcgctgcaaaagcagacaaagtacgtaaagaacctctgcgttgtatcttgaacggtcttggaaaagatgctgctcagatcatctctcgtatcaacggctttacttatgttcaaacacagtttgactatttcacaggtgaactgaaagtagtacgtgaaattgcttactctgacggtcctcgtgcaaaagtaaaatgctatggtgcagatgatgtacgtgaaggcgtagctatcatgtggaaagaaggtgtagatgtatctatcacaggtaactctactaacccgacgcgtttccaacacccggttgcaggtacttacaagaaagaacgtgtactggcaggtaagccatacttctcagtagcttcaggtggtggtacaggtcgtactcttcacccggataacatggctgccggtcctgcttcatacggtatgactgacactatgggtcgtatgcactcagacgctcagttcgccggttcttcatccgttcctgctcacgtagaaatgatgggattcctgggaattggtaacaacccaatggtaggctgtactgtggcttgtgcggtagatgtagctcaggcattggcaaagtaaccaccgtttcttgatcaaatgatataaactcctgtaattttgacaattacaggagtttctttttataaacaaaaacgtgaaaattaaatactttcggaataacataggccatttactaagcattaacgagaaatacagaaacagactaaagtatggttacccaaagaagtaaagaagtagcaaaaacgcttgaaccaacagatacacaaatcagattaagacctcactcttactaagaaaatcagacctgattatttctttcttttcttgcaaagcaacctatcttccttcatttaatcatttccctaattctatttctgtattataacttatcctaatctcactaagaaattcaacgcatttagattacaagatattgaataaatctttcttttctgtatatttgcgcccggtattttagatgcaatccgagaagttgtaagttttcggagtcattttatacttcccccgcttaagaacttacttatttagacaaagttaatgaaacaaatcaatgcagtaattacaggagttggaggatatgtgcccgattatatcctgactaatgatgagatatccagaattgtagataccaccgatgaatggatcatgggacgtatcggaatcaaagaaagacgcatcctgaatgaagaaggactcggcacctcatacatggcacgaaaagctgtcaaacaactgatgcaacgtactcaaagtaatccggatgatattgacctggtaattgtagctaccaccactcccgattatcggcttccttcaacggcttccattttatgcgaaagagtggggttgaaaaatgcatttgccttcgacatgcaagcggtctgcagcggtttcttatatgcattagaaaccggggctaactttatccgttcgggaaaatacaaaaaagtcattattgttggtgccgataaaatgtcgtctgtaatagactataccgatcgtgccacctgtcctattttcgctgatggtgcagcagctttcttgttggaacccacaacagatcatttaggagttatcgattccgttttaagaacagacggcaaaggacttccttttttacacatgaaagccggtggttcagtttgttccccttcttattttacagttgacaaccacatgcattaccttcaccaagaaggacgtacagtatttaaatatgctgtagccaatatgtcagatgcatgtgagtcgatcatcgaaagaaaccaactgacaaaagatgaaatagactgggtcgttcctcaccaggccaatcaacgtatcatcagtgctgttgcccaacgtctggatgtaccattagaaaaggttatgatcaatatcgaacactacggcaataccagtgcaggtacgcttccattatgcatttgggatttcgaaaataaactcaaaaaaggtgataatttgattttcaccgctttcggagccggatttgcctggggagctgtttacgttaaatggggatatgatggcaagacaaataacgcatgttagtctaatcacaaacgccgatatcctttctttcagtgcttttgggtaaacacaagaaaccttatcatacacttctttgttattttccgataactaaatgcattggataatggaaaatggtgtaatgatgcagtattttgaatggaatctgccaaatgacggaaatttatggaaacaattaaaagaagatgcgtcacatttacatgagattggtgtgacagcagtatggattccccccgcttacaaagccgacgaacaacaagacgaaggttatgcaacctacgatttgtatgatctcggcgagttcgatcaaaaaggaaccgtaagaacgaaatatggtacgaaagaagaactgaaagaaatgatcgatgaattacataaaaatcatatttccgtttatctggatgtagtactgaatcataaggcaggaggtgatttcactgaaaagttcatagttgtagaagtcgatcccaatgatagaacccaagcattaggaaaaccgttcgaaatacagggctggaccggatacagcttccatggacgtaaggataaatattcagacttcaaatggcattggtatcatttttcaggaaccggttttgacgatgccaaaaagcggagtggcatcttccagatacagggtgaaggcaaagcgtggagcgaaggggttgacaatgaaaatggcaactacgatttcttattatgcaatgatatagacctggatcatcctgaagtagtcaccgaattgaatcgttggggaaaatgggtttccaaagagctgaacctcgacggaatgcgtctggatgccatcaaacacatgaaagacaagttcattgcacaattcctggatgcggtaagaagcgaaagaggagacaaattctacgctgttggcgaatattggaatggtgatttgaacacactcgatgcatacataaaatccgtgggtcacaaagtcaacctatttgatgttccattacattataatttattccaagcatcacaagaaggcaagaattatgatctgcagaatatcctaaaaaacacattagtcgagcactactgtgatctggcagtcacttttgtcgacaatcacgattcgcaatcaggcagttccttggaatcacaaatagaagactggttcaaaccattggcctatggtctgatattattaatgaaagacggttatccttgtttgttctacggagattattatggtgtcaaaggagaaaactcacctcatacccaaatcattaatattcttctggataccagaagaaaatatgcttatggcgatcagattgagtatttcgatcatccttccgccatcggctttattcgtacgggagatgaagaacatgtcggttccggtttagtctttttaatgtctaatgatgaagccggcagtaaaaagatggatttgggcgaagaacataaaggtgaaatatggcatgaaataaccggaaatattcagcaagaaatcacattagacgaaaaaggaagtggagaattttctgttaatacccgtaatattgctgtttggataaaaaagaattaaaatggaaatccattccgaaagaaagaaaagacttagtttatccctgctcttcaaaataataaaagatacagtttggggattcatagatgacagcgttatgaggttgagcgcttcattagcctatgcgactttgttttcaattattccttttctttcccttctagtcactgtcggtgtctttttccatatggatttggccaatcaactttatgtccaactacaaccgattgtgggccccgaagttaccgaggcccttcgttctattatagaaaatgcagaaaatacagactcctccaggtcggccgcctttgtcagcttaggtatctctatttttggtgccaccactatttttgcagaaatacaaagttcattaaattcaatttggggaataaaagccgtccctaaaaagagctggcttaaatttattaaaaaccggatactttctttctcaataatacttgtatttgccttcattctcctgattacattcaccattaccaatataatcggagaactcagtcaaaaattcatctttaagtatccggaagcagccgattcgttggtaaaagtggtaggaatcatcataaacatgagtgtcactaccatcatctttacactcatatttaaaatattacccgatgccaaaatcaagagcaaagacgtttgcatcggagctgttgtaaccaccatactgctactgataggtcaatggggaatttccttttatataggaatagccaatgtggggaccgtctatggggctgctgcgttcatggtggttttcgtcacctggatttattattcttccatcatcatatataccggtgcagaatttaccaaagcatgggcaaacgaaatgggaagtaaaattttccccgacgaatatgcagtagccaccaaaaccattgaaatacacgaagacaagcctatcgaataatctagaataaaaatcacttcttccgtgacgattcattctcagtatcacgacatgttttcgtatactgtttcaaatgctttctcatttgttcgaaacggacaaagcccaagaaaaacaaaaagattccggctataatacatccccacgccagcccatccaaacgtgaaatgctttcaatttgaaatatccctatccccacagtcaaaaggtaaagtgccatacggatatatgcaaacaaagttctttcattagccagcttggttctttcaagtgccagatgatcacgaagtatcaactctttatcattctcaaagttatcggtaaatgtcagcataattatattaaggtaactgtatcttaaacgtttatttaaaacaataattgagtacaatagttcaggaaacagaatctccatttatcaaatgacactgacagatcccccaatcctgaccaatttaccgtacactaaaatcatttttagttatacttttcacaactggctaattaaatttatgtaagtagaaaaatctcttcataaaaaataattcctgggatacaaataacaagttattaaaatacaaaagacttgttatttgcacacaagaatcaaattataaggaaatgacgttaacaatgttaattgaaacaaactccaataacaagtaaaatcttgcacaatgctatgccactaaccttttttcattaaaccaacgtacagggatctttctgcttaacaaaacattgcgacagtagtacggcaaacggggtatcatatactctggctttctgtgggcatcccttaacacaggcacaacatttaatgcagcgttcggcatccgtattcaactcgtcacctttggctatggcgcttacaggacacattttcgcacacgcaccgcagtgagtacacaaagattcatcttccacccaaggagtacggggaaggggaaccccacttttacgcaaggcaatcactttccgcaaaaagcgaaacaatgggaaaaaaggctgacgcggacgccggattttacggacatcgaccgcatataatttttccggttcggtagcagatgctattttatctgaaatctgctttccaaaatcggctgccacagcaaggtcacgttcgtcaggacgtccggcagctacgggatatttttctgtactataagagtgttctcctatgaaagtagcaccggcaattactttaaacccctgttgaatagcccaataatcaagttccatcaacgatttttcgtaagcacgattaccgtataccaccacgataaccgccggagtattacttccgcgcacacttgccagacgatccatggccaaaggggctacacgacctccatataccggcacgacaataatagctaatgcagattcggcaatcactaaatcctgagttgcctgttgtgttaaattcgtgtttatcacatttgttattccggttccacgaacaattgcctccccaacttgtttagaggtgtgggtaggcgagaaataaatcaaatggacttcgtttgctgtcataatagttactttttatgcaacaaaggtacacttttatgaagaaaaaaagagtaaacgaagacaaaaaccaaaattatttattatctttgcggcgttgaaacattccgaacccctccaacgggagacaaattcggatttccgattcagccaaacatccctaattcatcatttaaagattattgcgtttgttaagtttccgacccctgcgtcgcagcttcagccgtacgtatttcaacgaataaaattaaaatatttaaataactcactatactgtatgtataacatcattcaattgaacgacaagaatttgtcggaactacaagctattgcccaggaattgggtatcaaaaaaacagactcacttaagaaagaagaacttgtctacaaaatcctcgacgaacaagccatagccggagctactaaaaaggtagctgccgacaaactgaaagaggaacgcaaagaagataagaaaaaacgctctcgggtgacagtaaagaaggaaaacgccgacaaggttttctcttctaccaagaatggagaactaaccaaaacagatgccaaaacacctgcagccaaaacacagccacaacctaaaacaacagaaccgaccccagaaacagctaaagaggcaaatgccgaaacaaacgccactccggccgaatctgtcaaagtgacaccttatgccactccgaaaaagaaaccgggacgtccccgtaaaaatcaggtagaaacagaagctaaacccgcagaagaaactaccgaaaaaccggaaacagtaccatcggcacaagaagaaaagcccgctgcccaaccggaagcagaaaaacgtcccatcagcaaaccgattctcaaacccaaaccggccgttgtagacgaagaaagctcgatcctctcggatatagatgcagacgatgattttatccccatcgaagacctgccttcggaaaaagtagaattgccaaccgaactgttcggcaaatttgaatcgaccaaagccgaagcagcaacagcccccgaacctgtggcacaaccccaacgcccgcgtgtgattcgcccacgagacaacaataacaacaacaattacaacaacaataataataaccaacgcaacaataaccagcgtcagcctgtacaacagcgtcccatgccgcaacaaaatgccgccgaagccgcacccgttcaggaacgccgcgtgattgaacgtgagaaaccttatgaatttgatgatatcctcaccggaaccggtgtattggaaatcatgcaggatggttacggattcctccgttcgtcagattataactacctctcttcaccggacgatatctacgtttcgcaatcccagatcaaactattcggtctgaagaccggtgacgtagtagaaggtgtaatccgtccgcccaaagaaggcgaaaaatacttcccgctggtaaaggtttctaaaatcaacggacgtgatgccgctttcgtacgtgaccgtgtaccgttcgaccatctcactccgctgttcccggacgaaaagttcaagctttgcaagggaggctactccgactcgatgtcggcacgtgtagtcgacctcttttcaccaatcggtaaaggacagcgtgccttgatcgtggctcagcccaagaccggtaaaaccatcctgatgaaagaaatcgccaatgccatcgctgccaaccatccggaagtatatatgatcatgttgttgattgacgaacgtccggaagaagtaaccgacatggcccgcagtgtcaatgcggaagtgattgcttctacattcgacgaacctgccgaacgccatgtgaaaattgccggcatcgtactcgaaaaagctaaaagattggtagagtgcggacacgatgtagtgatcttcctcgactctatcacccgtctggcgcgcgcatacaatactgtatctccggcatcaggaaaggtactctcgggtggtgtggatgccaatgcactacacaaaccgaaacgtttcttcggagcagcccgtaacatagagaacggaggttcgctcaccattatcgctactgccctgatcgacaccggttcgaagatggacgaagtaatctttgaagagttcaagggtacaggtaacatggagttgcagctcgaccgcaacctaagtaacaaacgtatcttccctgctgtcaacattgtggcatcgagcactcgccgcgacgacttgctgctcgacaaacagacactggaccgcatgtggattctacgcaagtatctgtcggatatgaatcctatcgaagcaatggatttcgtaaaagacagattggaaaaaaccaaagacaacgacgagttcctgatgagcatgaacagctaaagagttccttttgtgaacaaaatatagtaaaaagagtgagattctgtttgattctcactctttttatttagctttgcactacatgcatcataaacaagcataaaacaaacatcgggaaaacaacatttactgtgggaaggtctttcaatatagcgcttatagtaatagcagtaaccttatactctgtcactacatatgctgccgataacaaagcaacaaggcacgtgtcagcgctgctgaacctgatcgacaacagcctcaactatagcaaagaagctcccaacgacagtattatccaatggggcaacgaattggctcctctcctgaaaaagcagaaagaatataaaactctatttcagttgaaacaactgattgtgacagcttatgcctcacgaggagacatgaacatggccatcgaccatgcccgccggatgtataaggaagccaaagaattgaactcccccatcggtatagctctttccagccgtgccattggggatgcctacttgaatgccaacatgcagcaacccgccatcgaatcttataaagaagctctggaattgcttgacaaaataccgggtagcgaaatcctcgaacaagagattcttccgaaattcatcctgaccctgattcaggcctcccacatggacgaggtacgcatctatctgcaaaagtttgaaagcctgtatgccggtaaccctaatcctacattccactttttcatatgtgcgtgcaatgcctactataacatcgagtccggtaatcccgaaaaaggaaaagccgaactggacaaagccgggaaaatccacgaacaactgaattctctctacctgcgtagtatctacaactatatattggcccagtactatcaggctgtcgggaagtatgaactggccctgcaacaatacgaacgcctgacaaaggtccctaaagcacctgcccccaacaaacacatcggtttgcagcttgagtgtgcccaactgctgactcaaatgggacgaacggaagaagcctatcgtatctatcaaaaggccaaccggcaaaaagactctttgaacgctctgagctatgcccggcaaatcaatgacctacggggaatgtaccagatagaccggatggaaatccggaaccaaattcaacgaaaccaaatcatcttgtggatcatcatagcttccatctttatattgatgcttgttttgctgttgattgtccgcatccggcaggagtccaaccgacttctccgctccaaagaagaattggaaatagcccgtaagtatgccgagaactcgatacgtaccaaaagtctgttcctgtcgaacatgagtcacgaaatacggacaccactgaatgcactttccggattctcatccatcctgaccgacgaatccatcgacaatgacacacggtatcaatgcaatgacatcatccagcaaaactccgaactgctgctaaagctgatcaatgatgtaatagacctgtcaaatctcgatcccggcaagctgactttcaattttaaagaatgtgacgccgtcaatatatgccgtaacgtaatcaacaccgtagagaaggtgaagcagacacaagccggagtcagttttgtcacttcactggatagactgactttgcgtacagacgaggcacgcctgcaacaggtattgatcaacctgctgatcaatgccaccaagttcactaccgaaggaagcatcaccctgacattagaaaaagaatcagaaaccatagctctgttcactgtgacagataccggatgtggtatcctccgtgaaaaacaggaccagatattcaatcgttttgagaaactgaacgaaggtgcacagggaacaggtctgggactctcgatctgtcaacttatcatcgagcaaatcggagggagaatatggattgacccggactacaccgaaggtgcgcgattccggtttacacaccccgtctggcccgcaaaggaaaaggaggcagaaagatgaagcgactgatacttatcatcatagtatgttgccgggccttaggatggtgtcatgcaaatacacaaacggaaacggacagcctgtatcgggtggcacagtcacttccgcatgactcgactcgtctggaaatgttcaagagactggcacaaatagagcagctgactcccaggtgtatcaccttctcgggtctgttgcgcgaggaagccaccttgcagaagaatgacagatacaacaccatagccgcctatctgcacacagtgtactactataaccaaaacaaccgggacagcgtaaaaaaatggcttgacacaatggagccttatgcccgcaaatcgcaaacctgggatctctatttcgatgcgctccgctttcagatagacctctgcacctacgaagagcagtatgaacttgccatcaacgaagcgaacctgatgtacgaaagagcccaaaaagtgaactgcgcccgcggactgatcggagcaaaacaatgcttgggcaacgtctatatcagtacagagagatgggacgaaggaatgaaagcattggaagctgcctatcaactctctttacaaacagataatgcggtagtacgaatctcgattctctgtcaactgatttccataaccaaggatcagaaaaacaaccaattactctccgaataccttgcgaagctaaaagaaacactgcatcaccatacctccacgaacccgatgctcaaagaggcattttatgatgtttacctgttctgcgaagtatattacacctattattatctatatgcaggccagccggaacaagcacataaaaatctggttaaagcgggtaaatttctcaatggcaacaccttctttctctacagggtgctctattacgatgcctatgcagcatacttccgggcttgcaaagcgtatgaccgggcacttgccaagatagactccactatcatactgctgcaagaggacttcaacagcaattacatccaccaaaaattgacaaaagccgacctcctggcagaagccggacgaagtgcggaagccattcccctgtacatcgaaacgctccatcttaaagactctatcgaaacgaccgttctcgacaaacagatgcaacagataaaagccaaatacaacatcgacaaagtggcattggaagaggaacggctgaaaagctacatccaactcggcaccttaatagtggtggtcattatcctgataattctggttgctttcatgctccgcatttcacacgtacgcaaggctttggaacgatcggaaaaagaaacacgggaaacaacccgcatggcggaagaagccaacgaaatgaaaaatcgctttttgtcgaacataagctatcacatccgcatcccgctgaacggtgtagtgggtttctcacaattgatagcctccgaacccaacatgcccgatgagctccgtaaagaatactcttccatcattcagaagaactccgaagaattgatgcgcctggttaatgatgtacttgattcatcacggctcgaagccggtatgatgaagttcaacattcaggagtacggactggcggaactctgcaatgaagctacctatatggcgcgcatgcatagtgaagggtgtaccgtcatccggttggaaaacgaaattgacacagacctg

SEQ ID NO: 895 - DNA, 21290 bp, unidentified
  source 1..21290: mol_type = unassigned DNA
atgaaaaagaaagcattgactgtagttcttacacttactatggcagcaaccatgtttgcgggatgtggtgataagaaaacaacagggacaactgaaacaacagaagctgtttcgacagaagatgaaaaggatgatcaggcaaaagcagatgaggtagcagcattgattgatgcaatttatgtgcaggaaagaactgatgagacagatgcacagtgtaaggcagcaaaagaagcatgggatgcactgacagatgctcagaaggaactggtatccggagaaaatgcagacccggattactttggaagagataccggagatgcatcaaaggatgatcctttaaatcaggatgatattggagagaatgagcttttggtagtaagctttggtacatcctttaatgacagccgcgcaacagatatcggcggcattgaaaaagcattacaggaagcaaatcctgactggtctgtaagaagagcatttacagcacagattattattaaccatatacaggcccgtgatgatgaaaaaatcgataacatggatcaggcattagagcgtgcggtagacaatggcgttaagaatcttgtggtacagccgacccacttaatgcatggtgcagaatatgatgaactggtagaagcaattgagaagtatcaggataaatttgaaacagtccgtatcgcagaacctctgttaggtgaagttggaagtgatgcaactgtaatcaacgaagacaaggctgccgttgcagaagcaattacagcagaagcagttaaacttgctggatatgacagcatggatgctgcagcagaagacggaacagcatttgtatttatgggacatggtacttcccatactgcaaatgtaacttatgaccagatgcagacccagttagaaaaactgaattataagaatgcattcgttggaaccgtagaaggtgaaccggaagataccgcatgtgaagctgttattgaaaaggtaaaagaagcaggatacaaaaaagtaattcttcgtccgttaatggttgttgccggagaccatgcaaacaacgatatggctggagatgatgaagactcatggaagagccagtttgaagcatccaaagcatttgacagtgtagatacacagattgaaggtcttggaagaatcaaagcagtccaggatatttatgtagcacatacaaaggctgctttagaggcagagccacttgcaacagcaggtggttccaattcctctgcagccttagaggatggaacttataccgtagacttcaacacagacagcacaatgtttcacgtaaatgaagcaaaagaaggcaaggcagaacttacggtaaaggatggaaaaatgacagcacatatcacacttccatctaagaacattgtaaatttatttgttggaacagcagcagatgcacagaaagatggtgcgaagcttcttgagcctactacagatacggtagaatacagtgatggaaccagcgaagaagtatacggctttgatgttccggttcctgcagtggatgaagactttgaccttgcattaattggaacaaagggaaaatggtacgaccacaaagtatctgtttctaatcctgaaaaaaaaaattagctgatggctcttatgaggcagaagtaactttagggggcggaaccggaagagcaacggtggattcaccggcgaaggttgtgataaaagatggaaaaattactgcaaccgttgtgtggagcagtccaaactatgattacatgttagtagatggaacaaagtatctgaatgagaacaagggcggaaattctacctttacgattccggtatccggctttgactgtgacattgcagtagtgggtgatactgttgcaatgagcacacctcatgaaattgaatatacattgaattttaaactggtaaaataaaatgcagaaaaaacgaattatgatagtgagcgttatctgtatacttcttctgactctttgtgcctgtggtacaaagaagcaggagaaaaaagcagataccgtagattttagttctctcagcaagactgggagtatggaattaaattatgcaacacagtatagtgtcgatgaatatgacgggtacaaaatgattacgatcgtggatgacggtcgttttttgcttattccggagggcgtggtggtgccgcagaatatcccggaggatgttacggttttacagcagccgctggataaaacatatctggtatccacttctgtcatggatttggtaagacagattgatgccatgtcagatatccggctctccggaacgaaggaagatggctggtatgtagaagaagccagggaagccatggaggaaggagacattttatatgcaggaaaatacagtgctccggactatgaaatgattctggatgaaggctgtaatctggcaattgaaaatacaatgatttatcataacccggaagtaaaagaaaagttggaagaacttggaatccctgtacttgtggagcgttccagctatgaatcacacccattgggcagactggaatggatccgtttatatggagtattatttgataaagaggaagaagcagattctttctatgaagcagaattagaaaaattagagccgattatgaagaaagaaagctgcaatgtaacagtagcatttttcagtgtgacagcaaacggaacaatcagtgtgcggaaatcaaatgattatgtagcgcagatgattgctctttccggtggaacctatgtgccggaacaactggcgggcgaagaagaaaatgcactttccacaatgaacatacagatggaggatttctatgcagatgcaaagaatgccgatatcttaatatataacagtacaattgaaggcgaaatcagtacgctggaggaattgaagcagaagaatgcactgtttgcagattttcaggcagtacaggatggaaatgtctattgtaccacaaataatttcttccagaaatccacggcaatcggagattttatggaagatctgaataaaataattcggaatacagatacagaagaagcaggatatttaaagaagctgaggtaaaagaaaatgaagcggtatgcagtctcttttataacaattattatattgctggtgggattaattttctggaatattggttctggaagtatttcgatttcctgggatgaactttggaatattttactgaaacagacagaagaaggtaccgcttatcatattatctgggatatcagactgccacggattctggctgctgtcatgctggggggagcattgtccatttccggatttttactgcagaccttttttggaaatccaattgcaggtccgtatgtgctgggaatttcttccggtgccaaacttatggtagcactggcaatgatttatcttctgggaaggggaattacaatcagttcttttggaatggtagcagcagcctttgccggctcacttctggcaatgggatttgtacttttaatttccatgaaggtacatagaatgtctcttctgattgtatgcggaattctaatcggatatatctgctcggcaattacagacatctgtgttacttttgcagatgattcgaatatcgtaaatttgcacaactggtcccagggcagcttctccggaatgaactggtcgaatattctgatgatatttatcctgaccttgctgtcctttcttgcggcaatgtttcttgcaaagccgattggtgcgtatcagatgggagagacttatgccagaaatatgggtgttaatataactgtgctccgggtaagcctgattctgttatccagcttattgtcggcttgtgtaacagcttttgcaggaccgatttcctttgtaggaattgcggtgccacatctgataaaatctgccacaggaacagcaaaaccactggtgctgataccgggctgctttctggggggagcggtagtgacactgttttgtgatggaatcgcaagaacactctttgcaccgacagaagtaagtatcagtaccgttacagcggtctttttagttccggtggtaattgtaatgatgctgcgcagacaggaggagcggggatgacaaaacagatggcaggaaaagcagagtacacagagaaagaacgcatggcaggaaaaatgaaatcttctgaaagaaaacaggggcttgtaacagacaaattcaaagttggatatggaaaaaaggtcattctttcgaatgttaatctgatggcagaaccgggaagggtattgacgttgattggcccaaatggttccggtaaatctacgattctaaagagtattgtaaagcagttgaaatcccttggtggtgtagtatacctgaacgggaaagcaacctcggaaatgaaagagacagaaatcgcaaagagcctttccatggtaatgacagagcatattcatccggaactgatgtcctgccgggatgtggttgcaaccggacgatatccctataccggaagacttggaatcttagataagcaggactggaaactggtggatgaggcaattaccatggttcatgcggaagaggtggcagagcagtcatttacaagaatcagtgacggacagagacagcgtgttatgttggcgagagccatctgccaggatacagcaatcctggtattagatgaacctacctcttatctggatatccgctataagcttgatattttaaacagcatccggaaactggcaagggaacgaaatatagcagtaattatgtcactgcatgaacttgacttggtacagaaagtatcggatatggtagcctgtgtagatgggaccaccgtcagccatattggaccaccggaggaaatctttcagggttcgctggtacagaagctttatggaattgaggaaaagaactttgattccatgcttggaatcatgcagatgccgggaaataaagctgccccgaacgtattcgtaatcggaggcggtggtgctgcaataccaacttattacagactgcagagagaacatattccatttgcagcaggaatcttatttgaaaatgacgtagaatatcctgttgcaacggcactggcatcaaaagtcattactgcaaaagcattttatccgatggaagaagcacaactggaagaagcaaagaaaatacttacgggttgtgaaacctgtatttgcacctgcgagaatttcggaccttataatatgttaaataaagaactgcgaagcctggcagaagaacagggaaaattgaaataaagaaattggaataaaagaaaagcccatggaatcaaagttgttttatgatttcatgggctttggtatattttactgttcagtgtcttccggtaagatgaattttccaacaagttcatctaaggaagttgcctgtgcagataactcctggctggtagcagaggtctcttctgcggatgcggagttggactgaactacctcagaaatctggtttacaccctgttctgcctgatccatggcatttgcctgagtcttagcaacatcactgatgtgcttggaagattctgcaatctgctggataccatttacaacgtttccgatagattcagcagcatggtctgcagcagtattaccttcagcaatctcctgaagggcaccttcgattaagtctctggtatctacagcagatttggttgtctgctctgcaagctgacgaatctggtcagcaacaacggcgaatccacgtcctgcttcgccggctcttgcagcctcgatagaagcattcagagaaagtaagttggtctgggaagcaatatcttcgatttcagaaataatatttccaatcttcttagaagtttcatcaatacgtgccatagcatcaaccatggctttcatttcagcactgctgtcttctgcttcagcagcatactgctttgcctgatcataagcaatctgagcctgatcagcggactgttcaatattacttgtaatatcagtgattgttgcctgaagctgttgtacggcaccggcctgctcagtagcaccttctgccatactctgggaagattctgcaaggttcatggaaccggcagaaacctgggaagaagcttctccaatcatctggatagtatgtaccattgcatcacgcatgccacgcattgcagtcagtaactgttcgaagtcaccgacatatttgtcggaatgctcggactgaatggtgtaatcaccatttgccatgccctccatcagaacacctacatcagtgatgactgcgttcagtgtttcagccatttcagtagaagtggctgcaatacttgcaacttcatcgttggatttcacctccgggaaagggtcatgtaaattaccctgtgcaaaagtgctaagacgattctccagtgcgactaaaggttttgaaattccctttgcaatggaaactcccatcttggaagaaacaaggatggatacaataataattacagcaatgataatgataaaaataagggtaacaacagaaagtgtatctgctaaatgatctccttctgttactttggtattcatcaagtccctcattccggaatagatttcgtcatataatggggctacttcatcaatcattatattctgggcttttgcactctgacccgggtcggttgttttgccggtatcaattgctttctgctcagtagtccagtaatcttccagcttggcatcaatggaatcatagatttcctgctctttgctggtggtagtaacttcatctacaatttcccaatactgttcaaaagtggcctttctttcgtcatgggtatcggacatctgactaatcagactgtcatcatcatatccgacaatagcacgggtggcagatctggtatcggtaaaggcaaccaatgctttgccgatgtcaccctgtgaaaaaccataattgttcagggcattcttatacagagtcatggttacaatcagcataaccacaccaaggacggctgcgatggagcaggttgtcacgataatacggaatgccttccccagacggtttctaattttaagattctcaaacataacgttcctccttcgttatatacaatggcactatggcaccaattgcgttatgcaacagtaaaagtaaaagcgaaaatctaaatatttatcataattttactactttatgggaaatatgtcaaaaaatattcagacaataagtgacttggaaactgattattcctcaaatttgtttaaacatatgaaaattgacatttttccggtgaaccgctaaaatgacgaagaacataaataaggcattaagggagaaaacagtatgggatgcgtatattttgtccggcacggacagaccatatggaatgtagaaaataagatatgtggtgcaacagatattgcactgactgagcttggacataagcaggcaattgagaccggaaagaaaatattagaagaaggcataaaggcggatgaaatattatattccccattaatccgggcaaaagatactgcattgcatatttcggaaattaccggaattccggcaagggaagagcttcgtttaaaagagcagaactttggcagatttgaatccacaccgcgggatggagcagaatttaagattgcaaagggacagtttatcacccgctatgacggcggagaatctatgctgcatctggcacagaggatttacaatcttctggatgaagtaacagcttccgataagacttatattctggtggcacacaatggcatatcaagagttgtgcagtcctatttttatgaaatgaccaatgaagaatatgctgcatttggcgtgaagaattgtgccatattaaaatatgaattctaagagacgaagggcaggaatgaaaaatgaaaccgaagtcggaaaagagtatagagctttatcatatcatgacagagcgggggtatccggaagaattctgtgatgtcattacccggaatctgaatacggattttacggcacagaggatgttatggtatttatcacactatgaatatctgccggagggtgaaattgtagatgaaatgcttgccattttaagtgaccggaatgcgattatgcagaaaaaagaattagaaaaaaccaatgctgcatggaatgaattcctacagcatggttttgaggaagaagactagcggaatcgtaaagacggagcaaagtgtcatgacaaagcaggtcttagaagcaaattccgcatcggaatggtagttttctgccatcatcggaatggcggacatggctggcatacatgccatcagggtaagaatggttgtttcggtcggagtaaggaaatgtgataccacggctgcaacaccaaccggaatcagaatcattttgacaattaccagaaagaaataatcataaataaagtcgagattctttaaggaaatataagaaagagttgcacccaggaaaatcagcgcaagactgaagcttacatttccaacagaggtaattgtatgttattccggcagcttttccaaggttgtggtacctgggcttcgtgtaggatttatgattgccaacaagaagattatagaacgtggaacactgttaaaacagtttaccgatgtacatacaaatattcttgtacagatgattgtttatgagtattataagaattatgatattaagaaacatattgcagaggtatccgctttctatgtgaaaaagagcgaatatatgtgcaaattaatcagggaaaagcttccaaaggagataaagtgtattgagccggatggcggaatgtttgtatggtgtaccgatacctctggtaagattaacatagcttgtcacatattggctatgagaaaagctttggctttctgaaaaatgaggttctttcttgtacttttattcataataaggtatactttagggaagtaatttgttgaattaaatatgtttgtatggaggattaattatggacatgaacattgtatgccttgatctggaaggagtattggtaccggagatctggattgcatttgcagaagcaagcggaatccctgaattaaagagaactacaagagacgaaccggattacaataaattgatgaaatggagacttggcatcttaaaagaacatggacttggattaaaagaaattcaggaaaccatcgcaaaaattgacccgatgccgggagcaaaagagttcttagatgaacttcgttccatgacacaggttatcatcatcagtgatacctttacccagtttgcaggacctctgatgaagaaattaggctggcctactattttctgtaattctctggaagtggcagaggacggtgagattaccggatttaagatgagaattgaaaattccaagctgactacagtaaaagcattacagtccattggttatgagacgattgccagcggagacagccacaatgaccttggaatgattgaggcaagtaaagcaggattcttattccgcagcaccgagcagattaagaaagaccatccggaactgcctgcatttgagacttatgatgagttaatggaagcaatcaagaaggctctttaattatggcagaggaaaaccagacaacccacaaacgcagggtgcgttacagtggaaaatatccgaagaaatttgaagaaaaatataaagaacttcagccggaaaaatataaagatacgattgagcatgtaataaaaaaaggaaacacacctgccggaatgcatatttccataatggtaaatgaaattctggatttcttaaaaatccagccgggagaaacaggctttgatgcgaccttgggatatggcggtcatacgaaagccatgctgcagtgcttaaaagggcagggacacatctatgcaacggatgtagacccagaggaatcagccaggacaagaaagcggttagaagaggccggttttggagaagatattctgacaatacgattacagaatttctgtacgatagatgaaattgcaaaagaagccggcggatttgattttattcttgcagatctaggcgtatcttccatgcagattgataatccgaagcgtggattttcttttaaagtggatggtccactggatttacggctgaaccaggaagccggaatcagtgcagcagaacgcctggctgccattacaaaggatgaactggcgggaatgctttatgaaaattcggatgagccatactgtgaagaactggcaaaagcgattaccgatgagattcgaaaaggcaaccggattgataccaccacaaagttaaggaatatcattgaaaagacgcttgattttctaccggaaaaagagaagaaggatacgataaaaaagacctgccagcgaaccttccaggcacttcgtattgatgtgaaccgtgaatttgaagtgctgtatgaattcatggagaaactgccggatgcattgaaaccgggcggaagagccgcaattttaactttccattccggcgaagacaagttagtaaagaaagcattaaaagaaggctatcgggcaggcatttatgccgattatgccaaagatgtaatccgcccatctgcacaggagtgtgcacagaacggacgggcacgttctactaagatgcgctgggcaattaaggcagagtagattattttgaaaatacaatgagatggagacgaaaacagtgaaaatgaaaagaaaacagattggtatgctggtatttattgcgattattgtgatacttatggtcgtaacaagccagacaccgggaacaattgctgatgctgacagctatcagtgcaaaacttatgcgacatttttagcattgcttccgccggttattgcaatcggactggcattgattaccaaagaggtttatacctcacttctggcaggaattattgtaggtggtttactgtattccaattttaaccttgaattaatgttaaataccattttattccaggaagaaggtggtatgatatacaaactgtcagatgcaggaaatgtgggaattttagtattccttgtcatgcttggcattttggtatcccttcttaaccgggcaggtggttctgccgcatttggaaagtgggcatcccggcatattaaaaccagaatcggagcacagatttctgttatgattcttggtgtattgattttcgtggatgattattttaactgtctgaccgtaggaagtgtaatgcgtccggtcacagaccgtcacaaggtgtcccgtgcaaaattatcttatattattgatgcaacggcagcaccggtatgtattatcgcaccaatcagctcctgggcagcagcagttacttcttctgttccggcagattccggaatcaatggatttgcggtatttatccagacaattccatataacttatatgcattgctgacattggtaatgttaattggaattactcttttgcgcgtggatttcggaccgatgaaaacccatgaaatgaatgcaatcaaaggtgatttgtttaccacaccgggaagaccgtatgaagataatgaagaggaagttgtaaaagaaaactcgcacgtactggatttgattcttccggtagctgttttgattgtaagctgtatcgtagccatgatttataccggtggcttcttcagcggaacttcctttgtagaggcattctctggctgtgatgcttccgtcggactggttcttggcggcgcagtaacacttgtatttacttttatctattacatgttgcgtgatgttttatcctttaaggaatttaccgaatgtattccggaaggatttaaggcgatgattgctccgattctgattctgactatggcatggaccttatccggaatgaccaatctcttaggagcaaaagtattcgtggctgatctggtagcaaattcagcaaatgcaatgcagggcttcctgccaatgattatctttctggtagcagcgttcttagcatttgcaaccggaacctcctggggaaccttcagtattctgattccgattgtccttggtgtattcccaagcggacagatgatggtaatctccattgcgtcctgtctggcaggagcagtttgtggagaccattgctcaccgatttcagataccacaattatggcatctgccggtggccactgtgagcatgtcaaccatgtagcaacccagcttccgtatgcattgacagttgcagcagtctgcttactgggctacttcctgattggtatcctgcaggcagcaggactggcaggaatttcatggctggcacttccggtttgtatcgtggtattaattggcgtattattcgtaattcgttccagaacaggacgggaagaaatttaaaagataaagaagaaaatgcgggatacggaattggtgtcccgcatttttgtacaatagaatctataataaaaataatttgaaaatttgaaacaaaagaaacataaaataacagaaaagaggaaagaaaatgttttgtacaaaatgtggaaatgcattaccggtaaatgcaaaattctgtaccaaatgcggaacgaaagtagaagcttttcagccgggagcaatccagccaaatccgacaccgcagagagcttcagtgccacagccacaacaaaaaaagaatgagaaagtaacaaaaacaaagaacagtgaaaaaatatcaaataaaaataagaatgaaactgagaagaaatccggctccggtgccatggtatatttattaatcggtgcagcagttcttattattattctgattgcaattattgtattgttatttatcaagggcaatcagccggcaaagcaggatgatattaccgataagccggtggttacaacggagcagaccacagagacggaaatgtctacagagcagacagataggaaagatgtaagcggacagcaggaagcatctgagaaaacttccgaagtaataaataaagaagatacaactggaaatgaggacatgggaacagacggagcagttggagaagaggaagcagaatatattcttccggagagtgccagccgattattaacggaagctgatttggagaatctgacccaggaggaccttcggattgccagaaatgaaatctatgcaagacatggaagaaaatttttagatgaaggactgcaggaatatttcaatggaaaatcctggtacaacggaaccattgaaccggacgatttcaaagaagatatgttatcggaaatagagagaaccaatgaggataccatcgtgaactatgagacaaagatgggctatcgttagaaataacattcaatgaaacaggaaaaggggtagaacagatatgccatgtacaactattttagtagggaaaaaagcttcttataatggagcaaccataattgcacgaaatgatgattccggtgccggacattttacacctaagaaatatgtggtaattcatccggaagaacagccgacaatctatcagtctgtattatctcatgtgaaaatagaattgccggagcatccgatgcgttacacggcaatgccgaatgcggtagacggggaaggtgtctgggctgcctgtggagtcaatgaggcaaaggttgccatgactgcaacagagaccataacttccaatccccgcgtcttaggagcagatcctctggtgacctaccatccggcagaaaatggcagggaagagattatcggcggcattggagaagaggatattgtatacattgtgcttccgtacattcacagtgcaagagagggtgtcattcgcctgggcagtttgttggaacagtatggaacctatgagatgaatggaattgcatttcaggataaggatgaaatctggtggcttgagaccattggcggacatcactggatggcaggaagagtgccggatgatgtctatgtggtaatgccaaaccagctgggacttgatacctttgatttagaggatgcccttactacacagaaggactatatgtgctcaaaggatttgcgggaatttattgaagaaaatcatctgaatctttctttggatggcagcttaaatccaagagatgcatttggttcccatgatgattccgatcatgtatacaatacaccaagagcctggtttatggagcgttatctcaacccacatacctataaatgggatggggagcaggctgattatacgccggcatccgatgatattccatggtgcttgaaaccggagaaaaaggtaacaatcgaagatgtaaaatatgtattatccgcacattttcagggaacaccgtatgacccatatggttcttatggggaaaaatccatgaaaggcgcattccgttccattggagttaaccggaatgattttctttctgtgattgaaatgcggccggagcaggcggacattaccgaaaatacaggaagcatcatacagtgggtagcatttgcatccaatgtatttaatgtgctggttccgttttacggggaagtggagacaacgccggaatatgtatccaataccaccggagaagtttctacagagaatttctactgggcaagccgtatgattgcggctatggcagatgcctcttatcacagatccctttttcacatcgaacgctatcagatgcatgtgatggcaaaagggcgggaactgctgcatacctatgatgcacttctggcagaagaaacggacacagcagatagacagaaactgatgcagcaggcaaataatgcgatagcagaaatgcttaagaaagagacacaggatactttggataaagtgctgtttgaattaagcagccagatgaaaaatgcatattcacgttcggatgcatgacagagaagggcacaatagagaaaaggagcgtaagtggaatgcagacagattttcatttattatatccaccggattatgaccggaacaaagccgttcccatgaaggattataaatttatccacgcattaaaaattgatgctatggtaatactgattaaggaaagttaccggggagtggcagacctttcactggaaaatttcttctctacagatgagcgggtattagagtatcgtctgggcgtagtagaagatctggtggaaaatccatcactttacgaggcattttgcaaggcggtatccattatttataatatcaatgatatgcgaagagtattaaacagtgattttacgacggattcagccctgcgttcggtgcgatatcttgaaatgtatcaggaaattgtaaatctgtttgcggatgtattggaaaaagcagagattcattcggaaggtatgcagaatttcaaaaaagaaattcactcaatcgtagcaagcagcgagtaccagagcctgaatgaggaacttccgaaaatggaactgaacttcgggcatatcaaaagcgtaaccgtaggtattaatcttgatggcaatttaagaccgaaagaagccggactgatttctgtcaatgaggagcagttccatccaggaactatcatggaccggcttttgaaaaaagggaaaaaagataaatggcatctgatgtcggcactctatccactgagccgggtgctgcacaatgatgaacaggatgctatagactattccatgaatgcagctttgcagactatttttgcaaagtcgctgagggagtttgaaccgctggtgcagaattattatcacattaatacaaatatgtttattgctttattggatgatatccgttttctgactgccggagtaaaatttatccgttccatgaaagaaaagggatttgccatgtgcagaccgaagattgcatccatgcaggagaaacgctgtgagttaaagcaagtatacaatcccatgctggcagtgaattccgtagaggaaacaattgtgtctaattcctttgagctggatgaaaaaggaagattctatctgataaccggcccaaatcacggagggaaatctatttttgcctattccatcggaatggcgcaggcgttattccaactggggctgtttgttccggcagaagaggcggtaatgagtccggtgtctggaatatttacacattttccatcctctgatgagaataattatggaatgggcagactggaaagtgagtgtgtaagactgagtgaaatcatgaaacaactgtcagatacggatatgctgttgatggatgaatctttttccagtaccagtggacttgaggcaggctacatagcatcagaggtgctgaccggaatcggaattatcggctgctgtggcctttatgtgacccatattcatgatttgacacaacagctggatacctataatgagcatccggagaataaaggcaaaatcgataatctggtggcaatgatggaaagtaaagaagagggtacccggagttaccgggtcatccggacgacaccggatggcttaagttatgcaagagatattgccaaacgttatggtctggatttggaagatattttaaaaagataaaagagaaaatccgtatcttactcctgttatatacgtatactatttgttggaagattgcaactaagatagcaattgactaacagggcaggtgaaaactacaataggagaaaaggaggaatttctatgcaggcattgtcaaaagcaacaccaggtgaaacctataccattcagtggatgtttggtcagccggaagtgcttgatttcttgcatagccactctgtagatgagggggaacgcatacagctcatccagaaaatgcgtgactgtgtaattattggggcaaaagacagcagatttgcaatgggaaatgaaattgcagaccgaatacaggtgtaggaaaatcgtataaacgcgggaaaatattttgtgggttatccgcataaaaaaagggaagcagttccgatggaacggcttccttttttctatcaaaggtccataagaatctattatgcttctttccagtaatccggagttacatccctgcctaaatcttctaacaatttccggtcacttcttatggtagcgcaggcaacggtagtcagcatatttccggtaatggttgcagatgcaccagcctgaaaagcagtttcaccatcgttggtaagcagtgcacggccggcagccagacggatatttgcatccggattgatataacggaagaatgcgatggtacgcagaatatcatcttcgcttaactgcggcagattttctaatggagttcccgggattggcattaaagcattgattggaatagaatcaattcccagttcagctaaacttactgccatatccagacggtcttcccaggtttcgcccattccgataataccaccggagcaggcgcacatgccttccgcttttactttctttaaagtttcaattttcatatcgtaggtatgggtggtgcagatatttggaaaattccggcgtgatgtttctatattatgatgatagctggtaacgcctgcctcatgaaggcggtgcagttgttcttcgtctaaaaatcccatggaagcacataaatcgattttgcattcccgatgcatggattcaaaggcgtgaagggctttttcaaactccggaccggtcagcgcttttcctgcagttacgatagaaaatcggtcaacaccttcgctttcgttcattttgcaggctttgataatatcctcctccggcaggaagtcatatacttcacagttggtatggttatgtgcagactgggcacaatatttacagtcttccggacagcgtccgcttcgtccgtttatgatagaacataaatctactttatctccgattcttgcagcacggattttgtcggcaccttcgcataattcctttaaatcgcaggtaagaaaaaaggataaatcatcctctcgcgtaatgcgtcgtccgtcaataatttcctgtgccagtgtcagtgcatccatggtttgtctcctttgtatctgtgtgaattttacagttctttatgataaacaaaaattaactgaatgtcaacctgaaataagatatgagttaacaatacgagaaacaggagaaactacaatggatgatagatgcatgaagaaaattgcaggaagaaagctgccaggatatgattgtagaaatagtggaaattggtataatgaaaagtaatgagataagaaaagggggattcaatttgaaagcaactgtattagtagataatataggaacggaaattgcaactggagaatgggggttgagcatttatatcgaacaggcaggaaaaaatatactgcttgatacgggtgcatcaaatcgttttctggtaaatgcaaaagcattggaaaaggatatcggggcagtggattatggggtattgtcccatgcccattatgaccatgcaaatgggatgcaggcattttttgaagaaaatgagaatgcgaaattttatcttcaaaagggaaccggtgaaaactgttattttaagaagtggtttattcataaatatattggaattccaaaacatatcttaaccagacagaaggatagaattgaatatgtgaccggaaagtacaaactttatgaaaatgtatatctgattccccatacgacaaaaggtcttgagacaatcggagccgccaataaaatgtatatcagagacggcagacgttggcgaccggacgatttcgcccatgaacaaagtcttgtaatagaggaagaggatggtcttattatttttaacagctgttcgcatggtggcgcagacaatattataaatgaggtcagcaaactgtttgaaaagccggcaaaaatgatgattggtggcttccacatttttcaaaagggggaaactgaaattcggcagttggcagaaaaaataaaggcaaccggtgtaaaaaagatttataccggtcactgtacgggaggaagagcttttcggattctacagcaggagttaggcgatatggtggagcagttaaaagttggtctcgtaatagaagcatagatatttcaaaagaaataaaggaagtaacaggaaaggaatcaacagatgaaaaaatacaaaatcacagatattattgaggatgaattcggctgtgaaggacggccggaaggggaagaaccgatggttacgattcttctggtggatgataccggaaaacagcgcagcatccgtatggcagataagctggcttatgaaaagaaactggatatcggagcggaaatggagctgccggaagaagagataatgacattaaacggaaaagaatataaagtgaaaaaactgcttggaaaggggaaaggcggctattcctatcttgtgacagatggggagaaggaatatgtcctgaaacagattcaccatgaaccatgcagttattatcagattgataataagttagaggctgaaaaaagggattataaacggcttatggaaattggaattaccatgccaaagctgcttgatatcgatgagacacaggaacgcattttaaaggaatacattccgggagacactgtctatcagcaggtggaaaaggacgcactgccggaaatctgtctgcaacaggtaaaagaaatgtgaacaaagttatatactgcacatacaaatattgattattttcctacaaattttatcctgtggcaaaatgtcctctattatgtggattatgagtgcaatgcctatatggaagaatggaattttgaaaactggggaatcaagtactggtctaagacaaaagaattcttagaatatgaacagacccattaataggacttaagagatttcctgaaaaagaatcgtgcggaggtagttgcgatgagtattttcgaatatgataaagtggaagaagaaaagcagataataaaacaaaacagcaagaccttttcttttcagaacccttgtggtattctgagagaaaaggtctttttatcagtttaagaggacaaatgaaaaatacaggagagagaaaaatgccagtttttgactttagtaatgcaccgggcgggaaaaagacagagtccatatgcacttatacaacgtttcagtccaacgagaaggagaagacagcggaggagccgattcttatactggacaataagagccgtcattggaaacatcattccggtggtgtgtttgcaaaccagagccagcagactgcttttgaatttaaggaagaaagcgagacttacagcgcagatattttaaaagtagatgcacgtttcgtcagcctgattaaatggctgggagaaaatcatatcagtgtgcgcctttccggagaaaaccgggaagaaggatatgctgtatacaagattcgggagacaacctttggtgcaggaaccaaattgtcggcagaggatggatttttacagtttatgatagagagacttcttgccagcagtgcaccgacagaggaaatggacgaggaagaagaggatgaaaatggagatgatatgaagctgaccagcttacagagcatttccgattttatgacctgtgccggcagaaccatgccggataatatccgcctctgggcgagaagaaaccttgcagtagcacgctcccatgaggtatcaccggaggaacgccgtcatgcccagagagcattgtctattatgatgaatatccagtggaagagcaattattttgaggcaattgatccggtagaagcaagaaagattctcgatgaagagttatatggcatggagaaagtaaaacagcgtatcatggaaaccatcattcagattaacagaacccataccctgccggcatatggactgcttctggtgggaccggcaggaaccggaaaatcccagatagcctatgcggtagcaagaatcttaaagctgccttggacaacactggatatgagttccatcaatgacccggagcagctgaccggaagctcccgtatctatgccaatgcaaagcctggaattattatggaagcattttccatggcaggagaatccaatctggtatttattatcaatgagttggataaagcagcatccggcaagggaaatggaaacccggcagatgtgttgttaaccttgttagataaccttggatttaccgacaactatatggaatgtatggttccgaccgtgggagtttatccgattgctactgctaacaataaagccgatatcagtgcaccgattttatcccgttttgcagtaattgatatcccggattataccgcagaagaaaagaagattatcttctcccggtttgcactcccgaaggtattaaaacgaatcggcctgcatcagggtgaatgtgttgtaacagaggatggactggatgcaatcgtagagcagtttaagcatacttccggtatccgtgatttagagcaggcagcagaacatttggcagccaatgccctttatcagatcgaagtagaccatgtgccatccgtaacctttgatgctgaaaatgtgaagaagctgtttgcgtaa

SEQ ID NO: 896 - DNA, 27904 bp, unidentified
  source 1..27904: mol_type = unassigned DNA
ggccgcagaccgtaacggtcgcattcccgaatacgaccgtaaactcggcaacagtcggcgaagacttcctcttcgttccctccaacgcgggacagtccgtcggcctctcgatcacggtgggcgacgtaaccaagggcatcgacgtgctgcagctgcagcggaactacgcgaccagcgtaacggccacgttcgaggaagccacaggaaattaagacgatataagacacgatgaacggaaaaccgatatataaacaataatacaaaccgttgagttactgcctcccttccggaaaacccgaacggggggggtaattcattaacactcaacattttatgaataaagttctactattagcgggaatgctggcagcatttaccgcgtgtcagaaggacgaggggctcgtatccgatacgacagctgcatcctcgtttacggtgaccattccgcagagcggagtgcaaacccgtgccgtgaccgatgccttcggcaccggtacctcggccaaccgctgtattctggaaatctaccacggcgaccagctttacaaccgtatcgtaaaaccggtaagcaacaagcaggttacgttcgacaatctgcggctggtatcctcgcaggagtatgacttcgtgttctgggccgactgcgctacggcaaattcaagcagtgaggaaggtttcgacgataaagtatacaacactgtaacgggcggtctgaaagccatcacggagaaaggcgagttcgtgggcaacagcgacgagcgcgacgcgttcttctaccacgagactatttccgtcaatggttccttcacgagagacgacatcaccctgaagcgtcctttcggcctgctggtggtaaagaccaacgacctgaacgaaatcaaggacgaggcgctgaagcccacgggatacgaggtcgctttcaagggccttcccacgacgttcaacgccctgacgggcgaagtgagcggatcggccgacgtgacctatacgtcggaagagctggccaaaaacgacggcacgatctcgatggacttcctctgggccacggaatccgaggccgcgctctccgatttctcgatgacgttcctcaacaacggcacggaaatctgcaccaacgacgccttcaccaacattcccatccgacgcaactaccgcaccaatgtatcgggcaacctgctgaccaagaaaggaacgatcagcgtgacgatcgatccgaatttcgatccggaaggccccattgagaaagtgattgcggaagtagaaagcgcggctgatgtcaaggcggctctcgaaagcggtgcgaccgatatcatcgtcaagaatctggcgaatacagcgggcaacgagatcgtgataccgcagatctatgctacggacaatgacgtgaaaatttcgcttacgctgcccgaaacgagcaaccccgttaccgtaaaatacgacgatcaggccagtggaacggaaggtaacacggaagctcccgccaacattactatcacggccaataccaccggaaaactgaccatcgacaccccggaatcgacggttatcctgaacggctccttcggggaaatagacgccacgacggccgacaatacgctgatcgtgcccgaaggcgttgaagtagcgaaactgaatgtcgtaaaaggcaacgtagagatctacggtacggttgcggaaattacattcgagaaaggagccggaactgttacgacttatgctgcaggcgatgtcgctacgctgaaaaaagcgatcgacctgattgcccaaagcaagtgtgcccgaatcgtgctgacggccgatatcgaccttaaaggcactgccgatagcccttggactccgatcgatacggaaggcaaaggcttcgtggaattcgacggcgccggccatacgatcaagaacctctacgttgacaacgccacaggtcaacctaatgataaaggcacttactacggcggtttcttctatgtgcttcagggcgacgtgaaagacctcacgatcgacggtgccgaagtgacctgctatcgcggcggtacattggtcggccgcatggactacggtacggtggaaaactgtcatatgaagaatacgaccattaagagcgttcagaaaatcggcggcctgatcggtttcgtcagcacaagctcgaaagatgtcacggtccgcaactgctcggtaactgcttgctctatcgacgtatttaatcccgaaacgttcacctactgttcgcaagctgccggccttatcggttatttccagactttcgagcgcaacgtgctcatcgagggctgctcggtcagcggcattactctcaacaatacttataaaggtgaggatgcggattcctatagcgacggcgatttgttctatgctatggagcaaagtttctcccacgcatttatcggcaatatggtaaatgtgtcgaaaaaagccgacacttacgacaagtacatcgtggaactccgcaacaacaaggtggataaacaggcagacgaagtagcaaccggctatttcaccgatgaatatatgggctggtgggcttccaatttcactgcaggatacataagcacggctaaattgatcgtggatggcgttgttaaggatcgctggaccgaactgaaacgcttcgttgccctcttgaaagacggtggcaacgtcaatgtatggtatcattatgatttgacgaaaattccggaaacgagcggcgagattgcgatcgagaaacctactgtcatcgactttaagaaaaaagatgttactctgactgtcggcaaacagcagatcgtcaacaagagtgagcttaccgtcaaaggcgccggaaagatgactgccaccgattatatcttcatgaatgaagccggtgcaacgttgacgatcgaaaacggaacttataccgctacgaaagctacggacgccaacggtgtcgtcatttataaccaaggtatctgcaacatcaagaacggaacgttcgacggtcccggctttacgctgatgaataccggcagcgccgatatgaccatcgagaacggtaacgtcattaaccggaactctccgacgggttatgcgctgatggcagccggcggtggtaccaagctgactgtcaagggtggtcggatcgaagccatccagtcgatcggaggggccaacgtgacgatatccggcggtacgattctgaacgactgcaaatattacgcactctacaatcaagatggcaagaccacgattacaggcgggtatttctccggttacccgggcatgaaagacgtgtatatcgccggtggtacggtagcaattcagggcggttatttcgaggataaccagactgccgcagccgatggatacgtttataaagacaatgtacagacagtagacggcatcacctacaactacgaggtggtggctcaataacactttcaatccgcaggagcctgaccgctcctgcgggtacaaaggaaaaaagaaaacaagttcttaaaaatcaattgtaaaccgttgagttactgcctcccttccagaaaatccgaaccgtggagggtaattcattaacaatcaacattttatgaagaaagttctactattggcaggaatgctggcagcatttaccgcgtgtcagaaggacgaggggctcgtttccgacggagcgacctcccaaaccattaccgttaccatcccgcaagggatgcagacccgtgccacggcggcagacttcggcaacggggcgaaagtcgaccgttgcctgcttcagatctaccgctcgggtacgactccggcgaagtatggcgaacaacagtccgccaccgtgcagaaaggcaccgatggtaagctgaccgcaacattcaacctgcgtctggtggcttcgcagacctacgattttgtcttctgggccgactgctcgaccggagatcattataatacggacgatttgaccaatatcacggtgaaaggcgactatgcgggtaacaatgacgaattcgacgcctttaccggcgcattgctcgactaccaggtaacgggagctttttcggaaaacattactttgcgtcgtcctttcggtcagttgaacgtcaaaacgctcgacatgactgctattcccgaccccgatctgaagccgacgaaggttaaagtggctttcacggccgttccgacctcgttcgatgccaggaaaagcgaggtaggtacgacgacggcagcggcagaatatacggccgatgtactcagcgccgacggcgatctgacggtcgactatatctgggcgcccgtcgaggaggctatgctggccgatttttcgatgacgttcctcaacggcacgaccgaaatttcgaccaacggcgacttcaagaatattccgatccgccgcaactaccgcaccaatgtatccggcaacctgctgaccaaacagggtacgttcaacgtgacgatcgatccggagttctacaagcccgacatcaacgactatcccgaactgcgtgccgcactggccaacggcggcagcgtcaccctgtcggaagacgtgacgatcgaagccccgctggtcgtggaaaccggcaagacggtcgagatcgacctgaacggtaaggacatcatcaacacgacctcgcttcctgatacagatccacgctatggcaacaccaccgtattcgaagtgaaaggcggttctacattgaatatcaaaggagacggcgacattaaggctatcggaaccaagcccaacgaagacggctaccgcatggccgtatatgcttacggcgatgcgaaggtgaacatctacggcggtaatttcttcaacgaccaggattataacaaccggaatgctcagctcgacctcatttatgcggatgggaatgccatcatcaacatctacggcggccggttcgaatcggcatgtgccaatgcccgcggctattgggtactgaatctgaaggacggttcaaacgccgctatcaacgtgtacggcggtacgttcgtcaatttcgacccgtcgaattcgatgacggaaaatccggttaaaaatttcgttgcagcaggttccactacagtcaaggtcagcgcaactcccgcaccgaacggcacctatgaagtcgttccggcaggagggcagacgagcgtccctgtggaagtaaccaatgcagagggtctgaccggagcattgtccaatccggtcattgccaaaatcgctgtcgcttccgacatagatcttatttccgcaccggtggaagaccttacattcaccgaacacaagaccatcgacatcaaggagggagcgacccttcaactctcgggaggatcgaatctggttgccgaaaatggtctcacgctgaccggcaaaggtacgatcgacaacagtgcggctgcctctacggccgtagctgccgccgcttccgatgtacacgaacacaaatctttgattcatgttacgggaggcgatctgctgatcgacggcgtcacgctgatcaacgatcccgaacaccattggcacggaaattcctacaacagtgctgcaatcgcctattggaacgatgcgaacataactatccggaatgcccggatcatctcgggtgagtttaccgtatgcggtatgggacgggacgttgccagcggcgagatcactcttaccgacagctacttcgaatccacttcctcgaataaggataatgggcaacactgggcttacgcgatgcgtctgtacggttcgaaagtgcggatcgacaactgcgaggtcaagggtattcagggcggtgtgtccatcgaaagctgtcaggatgccgtaatcagcggcggcaagtactatacggtaaatacgccgggagcgaaagatgccttttatccggtgtatataaccaacggtgcgaaagtcacaatcacgggcggagagttctccgcagccaacgactggtccggaggtatggcggaaggtaccagtgcggtcgtatcgggcgacaacgacgccggacggccaagcggaagcgtaatcctcaaaggcggcaaattcagcggcaaggcttacaatcatgtaaccaaggctatttacgaaccggccgagggctacaagtggcaggcaatcgaaagcggcagcgatctgaaatgggaggtcgttgccgaataagaaccgcggcggaacgaataaatcattaaccgtcaaagcgtcggaatattttccgcgcagaataagtaaagggactgtataacgagtttatacagtccctttggtcaatggcttgaagccggtccggaatccggaaactcggccgactccgtagcgacgtaccggcacggaccgacggtcttgaggaaccatagggaatccgactctctcaacggatccaaccgtcttgtaagcggttatttgaaacgatgaatccaaacgcaaaatacgggaaacggaaccgttgcctttcgttgtctcatcttattataaaaaatgtaacagcccaattccttaggctgttacatcgatctaaaggcgttcttttccccgagaatcgcccgttttacgaaccggtcgagattacagcttcggaccggcggctaccagcttcttgccggcctcgttgccctcgaacttcttgaagttcttgatgaagcgctcggccagatccttggctttctcgtcccactgcttcgcatcggcgtaagtatcgcgcggatcgagaatattcggatcgacgcccggcagcgcggtcggaacctcgaaatcgaaataagggatcttcttggtcggagccttgtcgatcgagccgtcgaggatcgcgtcgatgatacccctcgtgtccttgatcgaaatacgcttgcccgtaccgttccacccggtgttcaccagataggccttggcgcccgacttctgcatcttcttgacgagttcctcgccgtacttggtcggatgcagcgacaggaaagccgcgccgaagcaagccgagaaggtcggggtcggctcggtgatgccgcgctcggtaccggccagcttggccgtaaagcccgacaggaagtaatacttggtctgctcgggagtcagaatcgaaaccggaggcagcacgccgaacgcgtcggccgacaggaaaatcaccttctcggcggccgggcccttagaaaccggtttcacgatgttcttgatatgatagatcgggtacgacacgcgggtgttctcggtcaccgacttgtcggcgaaatcgatcgagccgtccgcgcggaccgttacgttctcgagcagcgcgtcgcgcttgatcgcattccagatatcgggctcgctgttcttatccagattgattaccttggcatagcagccgccctcgaagttgaagacgccctcgtcgtcccagccgtgctcgtcgtcgccgataagcagacgcttcggatcggtcgacagcgtcgtcttgcccgttcccgagaggccgaagaaaatagccgtgttcttgccttcgaggttggtgttggccgagcagtgcatcgacgccatgcccttgagcggcagcaggtagttcatataagagaacatgcccttcttcatctcgccgccgtaccaggtgttgatgatcacctgcatcttctcggtcaggttgaagacgacggccgtctccgagttaagtcccagctccttgtaattttcgaccttggctttcgacgcgttcagcacgacgaagtcgggctcgccgtaagccgccagctcctcggccgtcggacggatgaacatattggtcacgaaatgagcctgccatgccacttccatgatgaagcggatcttcaggcgactgttctcgttagcgccgcagaacgtgtcgacgacgaacagacgcttgttagaaagctgcttgtcggcgatttccttcagcactttccagctctgctgcgacagaggcttgttgtcgttcttgtactcgtcggacgtccaccagatcgtgtccttggtcgtatcgtccatcacgaagaacttgtctttgggcgaacggccggtgtaaacgccggtcatcacgttcaccgctcccatatcggtcagctgacctttttcgaaaccctgaagtcccggtttggtctcctcctcgaacaactgctcgtaagaaggattgtgtacgatctcggtcacgcccgtgatgccgtacttgctcaaatcgatctttgacataactttctctattttagtgaatactactcctaattcgtctttttgaattatttgtcttactcccgtaacgggccctgagacgccgcaaagttaaaaattatttgcgtattgttacatgaataacagttaaaatattaaaaaaaattattattatcccaatccaccataccggacagtgtagcaacgacttaccgcaaatacggcatcacttgcgggaagcccgcgtaccttggccgatccgcttcccgaaccaaagggccgccggaacgccggccatcgcgccgaacgcgttggcagcccaatcgagccagtccgcgctgcggccgcaaacgctttggacaagttcgatcacgccggaaaacgcgacgactcccgctacgatccaaaactttccccgcggcgaaggacggaaccacaggacgagcaagcccgtctcgatcagataaaagccgcaatggacgatcttgtcgaaatgcggtatccgggcgagccagcccgccggaggcagctcgtcgcccgggacgagcgacagaagcaaaatcaccgccgtccagaccacaaaaagtcctccgacaacgaaaccgtatctgtttttattcatatttttgcatgggtccgggaccgtcctccggcaaggactttcccgcaaaagtacgctttcccggcgatacggccaatattcaatacgaaactatggcaggcatctacgttcacataccgttctgcaaaagcaaatgctgctactgcgacttctacagctgcacaacgcttgccaaaaaagacgccgtgctggccgccgtgtcgcacgaactggtttcgcgggcgcacgagctgcaaggggagacggtgcgaacgctctacatcggaggagggacaccgacgatctgcacgccccgcgaactggaggggctgatacgcacagtccgcgacacgttcgacacgcagatcgaagagatcaccgtcgaagcgaatccggacgacctgacccccggttatctggaagcgctgcgcggaaccgggaccaaccggctgagcatcggagtacagtcactgttggaccgcgacctgagatggatgaaccgccggcacgacgcgcggcaagcgctccgagcggtgcgcgacgcgcaggcggccggtttcgccaatctgtcgctcgacctgatctacggtctgccgcaactgtccgtcgagcaatggaggcggacgctggacgactttctgtcgctcgacgtgccgcacctgtcggcctaccacctctccgtcgagccccgcacggcactcgggaaacgcttcgagcgcggcgcgttccacccggccggcgagcgcctgagcgaagcgcactacgcgctgctgcacgccgtgctgaccggcgcaggataccggcactacgaaatatcgagcttcgcccgccccggcttcgagtcgcgccacaacagcagctattggaaaggcgtccgctacctgggcgtcggtccggcggcccattcgttcgacggcgacagacggcgctggaacgtttccgacgtgcgggaatatttgcgcaaggaacccgagggaacgcagtacgaaaccgaggagatcaccccgaaggacgcatacaacgagttcgttatgaccggtttgcggaccgacgaaggaatcgattcgcgggaactgtcggcgcgattcggggcacgcaaattgcaatattttgtcgcccaagccgaaaaattcgtcgcacagggaaatatcgtgcagagaaagtccgtatattacattcctgccgaacgctacctgatttcggacagcatcatttccgatctgttcgacgtggaatgacgccggccggagtcctgtgcccgcaacgctatgcacaagatacattacgaagaaatactaaaatgccgtaagatgcaaaaaagaagtaacgaagtcaaaatgacgccggactacctgttcgaggtcagctgggaagtgtgcaacaaagtcggcggaatacacaccgtcatcgcaaccaaggcgctcacgatcaccgagcagttgggcgaccgctacatactgatcggtcccgatgtccaccgcgaggacgtcaatctggaattcgaagaagattccgagctgctgaaagactggaggcaggcgcttttcacgaacgacaatatccgcgtaaagatcggacactggaaagtcaagggaagcccgatcgcgattctggtcgatttcagccagtttttctcgagcaaggacgacgtgctgaagtttctgtgggaatcgtaccgggtcgactcgatcagcgggcaatgggactacatcgagcccgtgctgttcggctcggcggcgggcaaggtaatcgaaagctatgtcaacttcttctgtaaggcgaccgaccgggtgaccgcccacttccacgagtggatgacttcgagcggaggtctgtacctgcagaagcattcgccttatgtcgcgtcggtcttcacgacgcacgcgacggtcatgggtcgcagcatagccggcaacggcatgcccctgtacggcgacatgccccaactgaacgccgacgacctggcccgccggttcggcgtagtcgcgaagcactcgctcgaaaagacggccgcagcgaactacgactgcttcacgacggtcagcaatctgacggccaaagagtgcaagtacctgctcggcaaggaggtcgatctggtcacgccgaacggtttcgaggacgatttcgtctggccgcagcccgagctcgacgccaagcgggccgcctcgcgcaaacagatgatcgaaatagccgaaatctgtctcggcatccattacgacacggagcctctgatcgtcggcaccagcggccggtacgaattcaagaacaagggactcgacgtgttcgtcgactcgctgctgaaactctccgaatcggcctcgctgccgaggcccgtactggcctacgtgaccgttccggccggcaacctcggcccgcgcaaggatcttcaggcgcatctgaaagaccccggctcgccgatcgatccgacggtaatccgcaacctgacgcactatctgtcggctcccgagtgggacccgatcatcggccggatcaagaactcccggctgcaggacccctcctgtcccgtgcagctgatcttcgtcccgtcgtacctgaacggcaacgacggcattttcgacaagcattactacgagctgctgtgcggcatggacgtgacggtgttcgcatcgtattacgaaccttggggctatacgccgctggagagcatcgcattctccgtgccgacgatcaccacgtcgctgacgggattcggacagtgggtggccgagaaactcgacgaacacaaaggggtcgacgtcatctcgcgcaacgatacgaacgactcggaggtagtcgagaagatctcggccgtgctggcgcgtttcagcatgatgaacgcggcggaatacgacacctaccgcgcctcggcgctcgaaatatcgaaaatcgcgctgtgggaaaatctgatcgagttctactaccgggcctacgatcaggcgctcgaccggatgaacacgcggacacaccgcgccgtatacgacggaggcggcgctttcaacgaacagatcaacttcgtcaagcagcaactggttcccaacacgccgacctggcgccggctgatggtcgagcgcaagctgcccgagcggctgcatccgctcgaggagctctccaagaacctttggtggtcgtggacgatgggcgcccacgagctgttcgagtatatcgacaacgatctgtggatccggtgcgagaaaaacccgatcaacttcctcgacaaactgaaatacccccggcttctggcgctcgagaaagacgagattttcctcgggaaaatggacgccgtgcatgcgcagttcaaggattacatgaaggaaaagtctcatgcgaaaggaccccggatcgcctatttcagcatggaatacggactgcacagttcgctgaagatatactccggcgggctgggcatcctggccggcgactacctcaaggaggccagcgacaagaacgtgccgatggtcgccgtcggactgctgtaccgatacggctatttcacgcagaagctgtcggcctccggcgagcaggaggtcagctacgaggcccagaacttcgcgaaactgccgatcagtccggtccgcgacgcgcagggcaactggcagagcatacagatcgccttcccgggccgggtcgtcacggcgcgcatctggcgctgcgacgtgggacgcacggagctctacctgctcgatacggaccacgacctgaaccagaacgaggaccgctcgatcacgtaccacctctacggaggcgactgggagaaccggctcaagcaagagatgctgctcggcatcggcggcatccgggcgctcaacgcgatgggtatccggcaggacgtctaccactgcaacgaagggcatgcggcctttaccggcatcgagcggatccgcaacctgatccacaacgacaagctctcgttcagcgaagcgctcgaggtcgtgcgctcgtcgtcgctgttcacgacgcatacgcccgtgcccgcagggcacgacgccttccccgaatcgatgatccgccaatacatgtcgcactaccccgaccggctcgaaatcacatgggaccagttcatcaacctgggcaaaacgaatccgaacgacccgaacgagaagttttcgatgagctttctggcatgcaacctgtcgcaggaggtcaacggcgtcagctggctgcacggcgaggtgagcaaggaaatactcggcggcatgtggcccggctatttcaaggacgagctccatatcggctacgtgaccaacggcgtgcatttcccgacttggtgtgcggcgaatctcaagcgactgtacgctaaatacttcggcgaaggattccgcaataaggactaccggatcgcggcatggcagaaggtgcacgacatcaccgatcgcgaactgtgggacgcccggctcgtgctgaagaacaagctgatcgaccatatccgcaagcgcgtgagcgatcccaagcagttccgcttcgactcgccccggcagatgatccggattcaggagtcgctgcggcccgacgtgctgacgatcggcttcgctcgccgcttcgcgacctacaagcgggccaacctgctgttcacgaacctcgaccggctcgacagcatcgtgaacaatcccgagcggcccgtgcagttcattttcgccggcaaggctcacccgaacgacaagccgggtcaggacctcatcaagcggatcgtcgaggtggccgccatgcctcagtttacgggcaagatcatcttcctgcagaattacgacatggaactggcccgacgcatggtgcagggcgtcgacgtatggctcaacacgcccacgcgcccgctcgaagcctccggaaccagcggcgaaaaggccgtgatgaacggcgtactgcaattcagcgtgctcgacggctggtgggtcgaaggttacaagaaaggcggcggatggatgcttccgatggagcgcacgttcgagaatcaggacttccagaacgaaatggacgccgaactgatttacaatacgatcgaggaggagatcgcccccctgtactaccggcgcgacgagaacaacgttccgcacgactgggtcgaatcgatcaaggtctgcgtggccgatatcgcggccaacttcacgacgaaccggatgctcaacgactacgaggaacgcttctaccgcaagctgcacgaacgtcacgaacggatggtcgccgaggatttccggatggcgcgcgagatcgcggcatggaagcgccgcgtcagcagcgcatgggacaaggtgcacgtcgtgaacaccgagcagttcaacatggacaaggaagccatcctgatcggccacgggtacgacgtcgaggtcgtcgtcgacatcgacgggctgcggcccgaggatatcggcgtcgagatgatcctcgccgaccagatcaccgacaacaagaacgtgcgcgtcatcgccaaacgggagctgactttcgtccgtcaggacgggtcgcgcgccttctactcggtccgctcgacccccgagtcgaccggatcgttcgacatggcgatccgcgtgtttccgaaaaacgacaagctgccgcaccggatggacttcgcactcgtaaaatgggcctgacatccgggataatacggtaacagccaagcaggaaaccggccgtcggccacgtctattccttcctctcggaaattcccggtccggcggataatagacgggcgaacaaagacgttttttacttgaaaatggcacaaaattttattagatttacgggtagcaaacaagaaaggaacggaagtatggctgtcttacatttcgacaagaacgaactgggcaatctggagtattcgctccaacgcgagatgctcagtacgaaccgggccggcgggtacatgagtacgacgatcgtctgctgcaatacgcgcaagtaccacggactgatggtctgcccgaaggacgaccgggacgagaacaactacgtccttctgtcgtcggtcgacgaaaccgtcgtccaacacgagcagtcgttcaatctggcgattcaccggtttcccggagtctacgatccccgggggcacaaatacatcaccgatttcacctacacgcccgcgccggccatcacctaccgggtcggcggcgtaattctcaagaaggagctgctgtggatccactcgcggacgcaactgctgatccgctacacgctgctcgacgcccgctcgcagacccagctccggctccggccgtttctggcgttccgcgaccggcataaggtcggccgcgccaacatggaggccgacggccggagctatccgatcgagggaggagtccgcaaccggctttacgaaggctttccgtggctgcacatgcagatcgacgcgcccagcgagttcgtcgcggcgccggactggtactacaacttcgagtacggcgaggagatcgcccggggctatccgggccacgaggacctgctcacgaccggctatttcgagctcgacatcgccaaggggcagagcgtcatcttctcgtgctcgaccgagccggtcgatccgtcgacgctcgaccaggtcttcgaggaagagctctcgcgacgctccaataaaatcgactttctatcgtgcctgcgccactcggcccgccagttcatcgtccgcaacggcgaccggaccgaggtcgtggccggctacccgtggttcgggcgctggggccgcgacacgttcatcgcgctgcccggcatcacgctgacccaaggcgacgaccgctcgtgccgcgaggtgctcgacacgatggtctcgcaaatgcaggggggcctgttcccgaacatgggcaacgcgtacaactcggtcgacgcgccgctgtggtttttttggacgctgcaagcctacgagcctttcgcgggcggaccgagaaagctgtggaagaaatacggcagccccatgaaggcgattctcgaggcctaccgcgacggcgcgaacccctacgtgcgcgtcgacgacaacgcgttggtatgggccgcccattcccggtacgcgatgacgtggatggacgccgtcgtagacgggaagcccgtcaccggacgggaaggttatcaggtagaagtcaatgcgctatggtataacgccgtgcgttatgcgctcgagctggcacggaaaagcaaagacacggcgttcgtcgaacggtgggaaccgatgcccgaacgaatcaggaagtcgttcctcgaactgttctggtacgagcgcgaagagtttttggccgactatgtcgacgaacacggacaaaacacgttcatccgtcccaaccagatcatcgcctgctcgctgccctacggcatgctcggcgagggcatgaagcgcaacgtgatcgacacggtccgccgccacctgctgacccccaaggggctccgcacgctctcgccccgcaatccgctctacgaaggacgctgcgtaggcgaccagccgacccgcgaccgggcctaccatcagggaaccgtatggccgtggctgctggaacattacgtgaaagcctgcttcgacatgcacgggaaggcatttctccccgaagcaagggacatgctgaagaatttcgaggaggatatcagcgtgagcggtatcgcgtcgatcaacgagatctacgacggagatcctccgcataatcctcgaggggccgtctcccaagcgtggagtgtgggtgctattctgcgcatagcgcagatgatcgaagcttacgaaataaaaaaatgacggggacgcccctctttggaatgaagcgtgcaggcataccggttatgcgccgggatggatttccggctgccggagcccggcagcctctggctctgtctccccggagctcggccatggagccgacggacaaggagacggaccgtcgctttgcggaagcctccgaagcgaaagtccatgcgacctgaaacggtcgcgagcaaacaacgaaacgaaagaaaaaagacaataaccatgagagtactgatgttcggttgggagttcccgccccatatagcaggaggactgggaaccgcttcctacgggctgactcgcgggctcgccaagcacggcatcgaagtgattttcgtcgttccgaaagcctacggagacgaagatcagcgtttcgtgcgggtcgtgaacgccagcgagatcgagacgcctttcggcgacacgagggagcaagacgtgtgggagaaactgacctttatccatatcgattcgaacatggtgccgtacgtcgctcccgaggagttcgactcctatgccgaggagtaccgccgtaccggcagaacgatcctcgataaggagggatggaccgaacggtacagcttctcgggcaaatacggggccaatctgatggaggaagtcgcccgctacgcgatggtcgcggcccaagtagcccgcgatctggccgggcagttcgatctgatccatgcccacgactggctgacctattacgccggcatcgcggccaagcgcgtatcgggcaagccgctggtcgtacacatgcacgcgaccgaattcgaccgcagcggcgaacacgtcaaccctcaggtttacgagatcgagcgggcaggcatgaccgaagccgaccgggtgatcgcggtgagcaaccttacgcgcaacatcgtgatcgagaaatacggaatccccgcctcgaaggtcgtcacggtgcacaacgccgtccgcttttcggccaagcaagcgcaatctcaggagcgaggcgtaaacgacaagatcgtcaccttcctcggcaggatcacctaccagaagggaccggactacttcgtcgaggcggcggccaaggtactccgaaagacccgcaacgtccgcttcgtgatggccggcagcggcgacatgctcaagcacatcgtccgccgcgtggccaagctcggcatcgccgaccggttccatttcaccggttttctcaagggagacgaggtgcagcgaatgttcgcgctcagcgacgtatacgtcatgccgtcggtatccgagccgttcggcatctcgccgctcgaggcgatgcggtcgaacgtaccggtcatcatctccaagcagtcgggcgtggccgaagtgctcgactacgcgatcaaggtcgattactgggatgtcgacgcgctggccgacgccatctacggtctggtggaatatcccgctctggcggaaatggcaacggagaaaggcttgggagaggtgaccaatctcaagtgggaaaacgccgccggcgaagtcgccaacgtctaccgcagcctgctataaaacggatcggaaatacaaaaaaggaatacgccatatgaaaaccatctgcttctattttcaggtccaccagccgctgcgactgaagaaataccgcttcttcaacatgggcaaggaccatctctacctggacgactacgcgaaccggacgatcatgcagaaagtggcccgtcggtgctatctgccgatgaacgagctgctgctgaagctgatccgcgagaacggcaagaaattcaaggttgccttctcgatctcgggcatcgcgatcgaacagttccggatgtacgcgcccgaagtgctcgacagttttcaggcgctggcccgcaccggatgcgtcgagtttttggccgaaacgtacgcccactcgctggcctcgctggtcagcgaggaggaattcgtcgaccagattcgccaacactgccggacaatcgaacaggagttcggcgtcaagccgaaggcctttcgcaacaccgaactgatctattcggaccgtatcggggagatcgtcgcctcgttgggcttccgcacgatgctcaccgagggggcgaagcacattctgggttggaaaagtccgaacttcgtctacgccaacgcgatcaacccgaagctgcacttgctgctgcgcaacttcaagctcagcgacgacatcgcgttccgcttctcggaccgcaactggagcgagtggccgctgacagccgacaaatacgtcggctggctcgccagccccgacatgccgggcgagaccgtcaatctgttcatggactacgagaccttcggcgagcaccagtgggccgagacgggcattttcgacttcatggccgccctgcccgccaaggcgctggcgaccaaatcgctgaaattcgccacgccgagcgaagtgtcgaaaaaattccagcccgtcggagtgctgcactcgccttacccgatctcgtgggccgacgaagagcgcgacgtgacggcatggatcggcaacgagcttcagaacgaggcgttcgacaagctgtacaggctccgcgacaagatccgcgcgatcgaccatccggatttcacctatgtctggaatttcctgcagggttcggatcatttctattacatggccaccaaatggttttccgacggcgacgtgcacagctatttcaatccgtacgactcgccttacgaggcgttcatcaactatatgaacgttctgagcgacttcgagatcgaggtagacaagaaatacggcgaagcgatccgggccgttccggcctgagcgccggcgcgcgggcgaacgggcggggcggcttcgggccgctccgcccgttcggcgtatacgataaatggccgtcgggacgttttatatatcggaaaattgttatatttttgttgctcaaagcgaaaccggcgcggcccgccactcggcaaacagccgtccgggaaatccggcgcccgccgcacgcattcaaacacatggctcaaggaatgaaaaaaattcttttgctcctctccgcctccgcgcttctctggtcgtgcgatcagggcaagaaagcccggatcgacggcatgttctccggtttgtcccacgacacggttctgctggaaatggtgactacgcagcaacggaccgtagtcgattcgaccgtcacgtcgcgccaaggggatttcagtttccgggtcgaactgcccgtcgccgcgcccacgttcttcaacctgctgtgcaacggcagcgtgatcccgctgatcgtctcgcccggggagaaaatcgccgtcaactcgctctgcgacctgtcgcacaactatacgatcgaaggctcgcccgactcggaaatcctcatggaattcaaccggttctacgaccgaagcgtcgccacgctcgactcgctgtcgagactgtacgccgccacgccggccgatgcggcgcacgaagcgcgccgtaaggagattctcgatcggtatacgcaggattatctccggatcaagcgcgagcacatcaatttcatcgtctcgaacgcctcctcgatggcctccatctacgcgctttatcaaagattgccgaacgacccctcgctgttcaacccgcagagcgacatcgtctactaccgtatcgtcgccgactcgctcggacggcgctatcccgattccccgcacgtagcggcgctgaacaaagacatcgaacggcagcagacggcgctgaacatggtcgaggagatcaaccgcaaggccgagagcccgcagagctatcccgaaatcgagctggaagacctgttcggcaaaacgcagaaactgaccgagaagaacggccgcgtgatcctcgtcgacttctggtcgagccgggacccgcaaagcgccatacgcaacgccgagctcaaagagctttacgaacggttcggcaagcaaactctggccatctatcaggtatcgctcgacgaggtaaaggccgaatggatcgacgcggtgcagaagcagcagcttccgtggacctgcgtgttcgacccgcgcggaacggccggaatcgccgcgatgagctacaacgtgcaatcggtccccaccaacgtgctgatcgaccgctcgggacggatcgccggcaagaacctgtacggagagcggttgagctccaaaatctcggaactcgccaagtaatgtactatttcgcgtcggacacccatctcggactccgcgtcggccgcacggccgacgacagggagcggctgttcgtccgctggttagacgaagtgtcggccgacgccgagggaatttttctggtcggcgacatcttcgatttctggtacgagtacaagcgggtcgttccgcgcggattcacgcgcctgctgggcaaactgtcgggactgaccgaccggggtattcccgtccattttttcgccggcaatcacgatctgtgggcatacgactacctccgctccgaatgcggcgtcacgctgcacagaggtcctttcgagctgttcgacctgtatggacagaaggtgctcgtaggacacggcgacgtgctcggtccgcgcggacggggcgggcgcttcctgagcgcgctgttccgttgtcgaacgctgcaaaggctgttctcggcctggctgcacccgaacttcgctatgcgcttcgggcaatggtggagcggttcgaaccgtctctccaagccgatcgcccacacgttccggggcgagcaggagccgatcgtccgcttcgcagccgactattcggccgcccatccggaggtcgacctgttcgtctgcgggcacattcactgcgcggaaatatttccgctcggcgacggccgccggatcgctttcctcggcgaatggatcgattcgccgacctacggcacgctcggtcccgaaggatttgcgctgcactcttatccggataaaatctgacatccatgaaagcatacctcgacctgctccgacatatccaagcgcacggtacggtgaaaaacgaccggaccggcacgggcacgatcagcacgttcggctaccagatgcgcttcgacctgagcgagggcttccccgtgctgacgaccaagcggctgcacctgcggtcgatcatccacgagctgctgtggttcctgcgcggcgacacgaacatcgcctacctgcgcgagaacggcgtgacgatttgggacgaatgggccgacgccgacggcaatctgggccccgtatacggaagccagtggcgcagctggccggcgcccgacggcaggcatatcgaccagatcgcgcaggtcgtggaccagatcgagcgcaatccggactcgcgccggctgatcgtcagcgcatggaacgtcgccgagatcgaccgcatggcgcttccgccgtgccacgcgctgttccagttctacgtcgccgatgggcggttgtcgtgccagctctaccagcgcagcgccgacgtctttctgggcgttccgttcaacatcgcatcctatgcgctgctcacgatgatgatcgcgcaggtgacgggactcgttcccggcgagttcgtccacacgctcggcgatgcgcacatctatctgaatcaccgcgagcaggtcgccctgcaactgacccgaacgccccgcccgctgcccgtcatgcggatcaatcccgacgtgcggtcgatcttcggtttccgttacgaggatttctcgctggacggatacgatccctacccttccatcaaagcaccggtagccgtatgatctcgattatcgtcgccatagcccgcaacggcgtgatcggcaacggcaacgcgctgatctggcacatcgccgaagacctgcgccggttcaaggcgctgacgaccggccatcccgtcatcatgggccgcaagacttacgagtcgatcggatgcccgctcccgaaccggaccaacgtcgtcgtcacgcgtcgcaaggactatcgtcccgaaggctgcctcgtcgcgggatcgctcgaacaggctgtcggcctgttcgacccgtccgaggaaatcttcatcatcggaggagcgcaaatctacgcgcaggcgatgccgatggccgaccgcctctacctgaccgagatcgactccgactacgagggcgatacccgtttcccggaatggaagcgggaagaatggaccttgctgtccgaagagcgacacgaacggggagagaggtacgaccggccgttcgcattcagaaactacatccgcacgaaagaatagctcgcccggcaggataggatacggatgcagaccggccgttcggccccttcccatgtttcggagccgtcgtttctcaacgacggcagagaacgcaccgggactcggtctctctttccgtccactcccttaattattccttctgtttcccgtccgcaaagttttcctccttaccgaaacgtcccccgcgatcttgtccgccgccagccgttcgaatcgcatggcacagtttatgacgctttccacagatatcccgcccgagagtgcggaataccgccataaactttgcgactatgaataaggacgtacaacaggcgccggatttcaccgaagaccggcacctcgacccgccggtcaaagaatttttaaaaggaatcaatgccgggaagccggtcgaatcgctttccaaggaggccgcacggcaagtgctctccgatgcccaatcgtccgtacaagtagatttgtcgggtatcgtggagtcggaacagacgatcaccgaaaacggactttccgttccgctcacggtcgtgcgccctcaaggctcggccggctcgcctccgtgcttcgtcttcattcacggcggaggatggattctgggcgactacccgacccaccggagactcgtgcgcgatctggtcgtcgcatcgggattcccggccgttttcatccgctacacgccctcgcccgaggcgaaatacccgcaggcgctggacgaaatatacgcggccgtacgttggatcgcgcgcaacggcgcccgaatcggagtcgacggttcgcgcatggcgctggcaggaaacagcgtcggcggcaacatggcgatcgctacggctcttcgcgccaaacgggaacagggaccgcagatcaagctgctgcttccgatgtggcccgtcgccgactcgtcgttcgacacggcctcctacgtccggtatgccaagcagcgattcctgaccgattcgctgatgaaatggatgttcgaccaatacacgaccgacccgcagcaacggcgcgaggtctatgtctccccgttgcgcgccacggacgacgagcttcgcggcctgccgccgacttacattcaggtagccgaaaacgacatcttgcgcgacgagggcgaggcgctcggacgcagactgtccgaggcgggcgtcgatgcgacgacggtccgatacaacggagtgatccacgactggggcatgctcaacggactggccgccctgcttcaaactcgcgcgctcgtactcagctcggccgccatgatgcagtactatttgggaacggactatatcggcgcggaccgctcgtgcgaggagatcgacttcatctcggagcagatcggctgacgcgatctgctctcgctaaacatgccggacaggttgtatcaagcagaaaaacacatggatcgttccggcacgaaaaaagaaaggctttctgaatctcgattcagaaagcctttcttttcatggcctgcacaaacgtccctttggaatgggattttcctgtgccagaccgttatatcaaatcgcggaccgttagaaacgatagccgacaccgatctggatcacgccgttcttaggcgtattgtcctgggcatcccaaactttcgtcaggccgatgttgtagcggaacgtcacgtccagcggatcgaaaatgcggtacgacacgcccacgccccacgatacgtcgaagttcttcgcgccgtcgatatcggccttaaccgaagtaccgttggctttaatcttttcccgtgcgttgagaaggaaaccgaactgcggaccggtctcgaaactcagattgtcgagcacatagaacttacccatgatcggaatgttcagatagttcagacgagcacgggcgtaatcgacactgttatcatcaacagcgaatccctgacgggaatagatcacctccggctgaatgccgagccagtcgttcacgtggaattcggcgaatgcgccgacgtagatgctggctttcattttagaatcgtcgatgttggagactcccgaaacgttcagaccggccttgacaccccattcgaagctgggcatctgagccgatgcgcccgcagccatcatcagggccgcagcagccaaaatcattttcttcatttgcggtaatttttaaagtttgaaatagcgtttgtcgatatttcaacacaaagctataataaaaaattgtaactgtcaacgattttcgcgcctgggcagaataattccggcctccgtaacgcaattctcacctgcgaatcgagaggcgaaaagccctgccgccaaggaaacgggctaatgcgcctcgacccaattcgctccgacgccgcactcggcgatcagccgcacgcgcagctcggccgcgtcttccatacagcgcacgaccaactcgcgcacctgttcctcctcgctgcgcagcatgtcgatcaccaactcgtcgtgcacctgcaggatgatcttggacttcaggccccgccggccgagctcgcggtggacggcgatcatcgccagcttcatgatgtcggccgccccgccctgtatcggcgcgttcaccgcattccgctcggccagcgcgcgcacgaccgcattgcccgagcggatgtcgggcagcatccgcttgcggccgaacagagtcgccacgtaacccttctcgcgggcatcggcgatcacccggtcgatgtagcggcgtacgcccggataggttgcgaaatagccgtcgatgatctccttggcctcggcccgcggaatgttcagccgctgggcaagcccgaaagccgatataccgtagatgatgccgaaattggccgtcttggcccggcgtctctgctcgcgcgtgacctgctcgggcggtacgccgaacagcttggcggccgtcgccgtatgaatgtcctcgccgtgcgagaaagccgcgatcatgtcttcgtcgccgctcagatgggccatcaggcgcagctcgacctgagagtagtcggccgacaacagcagacggtcgccgtccgaggggacgaacgccttgcgaatctcgcggccccgctcgtcacggaccggaatgttctgcagattcggattcgtcgaactgagccgccccgtggccgtgacggcctgattgaacgaggtgtggatacgccccgtacgagggttgaccaactgcggcagcgcttcgacgtaggtcgaaagcagtttgcgcagcccccgatactcgaggatcagcccgatgacgggatgccggtcggcaagcatctgcaggtactcctcgtccgtgcgatattgcttcgttttggtcatgcgcggcttcggatcgatcttcatgcggccgaacagcgcgtcgccgagctgcttggccgaattgacgttcagcgacgggtctccggtcatttcgcggatacggtcctccagaccggccagctcggaggtcagctcgcgccccgaggcagccagcgcctcggaatcgatcttcacgccggtcatctcgatgtcggccagcacgcggatcagcggttcctcgatgcggagataaagctccgtcagacccgcttcctcgagcctcggccacaagtgccgcttcagccgcagcgtcacgtcggcgtcctcggccgcgtaccgggcgcaacgctcgaccggaacgcggtccatcgtgatctggcgcgcccccttgccgatcagctcctcgatcggcacgggcgaatagttcagacagatgcgcgccagatgatccatgccgtgacgcgattcgggatcgagcagatagtggacgatcatcgtatcgtagagcgtacctcgcacgtcgattccggcgctgcggagcatcatcagatcgaacttgacgttctggccgatcttggcgatccgctcgttctcgaacacggggcgcaggatcgacaacacctgtccgaggttcgccggatcgcacgggacgtaccacgcctcgaacggctccacggcgaacgacaggcccacgagtcggtcgccgaacacgtcgaatccggtcgtctccgtgtcgaagcagaattcggacgaagcctccagcctgccggccagctcgcgcagagccttctcgtccgtgaccgtatgatagacatgcggcacggtgtcgatcgtctgataggccggcgcatcgaaaagcgatccctccgccgacgcggccggagtctcctgtgccgagaacaggtcgcgggccggaacggcagtcttcgatttgctttgctgcggggaagccggctcggacttctctgcggtctccgcggcgcccggccgcagctcggcgaggaaagagcggaagcccagctcgcggtacgcctcggccagccgctccgtatcgggagcctccagcctcagcttctcgggctcgaactcgacgggcacgtcgagccggatcgtagccagccgcttggccagcatgatctggtctcgggcggcctcaatgttgacccgctgcttgcccgagagaagctccgtatgggccagcaggttctcaacggtgccgaactggcagacgagcttgatcgcgctcttctcgccgatgccctgcacacccggaatattgtccgacgcgtcgccccacagcgcaagcacgtcgatcacgcgacacggatcgtcgatgccgtaatgctcgcgtatctgctcgcagccgatgatctcgatgccgtcggccccgcccttgcgctgtttgtaaatccggaccgcgggccggatcagttgcccgtagtccttgtcgggcgttaccatgaacacctcgtaacctgcggcggccgctttctgcgacagcgtgccgatcacgtcgtcggcttcgtagccgggaatctcgagcaccggaatgcgcatcgcctcgagcacctgcttgatatacggaaccgacgcgacgatgtcttcgggcgtctcgctgcggttggccttgtagtcggcgtagagctcgtgacggaaattgcctcccggcggatcgaacgccacgccgaggtaatgcggccgctcgcgcaggatcaggtccttgaggaacttgacgaacccgaacacggccgacgtattcacgccggccgcattgcgcatcggccgtccgataaaagcatagtagaaacgaaaaatcaatgcgtaggcatcgaccagaaaaactttctccataaaccctccggtatgaacgcggcgagaacgtatctgccgctcgattatgcgttcgatgagcgctgttttcgcggagatttccccgccgggaggacgtccccgctccgatccgtgccgagcactcatgccgcgcggcgcccgcataagaccgctgcgcgaatgtctccgccagaactcggtcctctttcaaaaaactcagtcagaacaggcccgtcctcctaccggagagcccgtcaatattccgcacgggaaatttc

SEQ ID NO: 897 - DNA, 6794 bp, unidentified
  source 1..6794: mol_type = unassigned DNA
ttacttcagcagcgcgccggaaatgaccatcatctgcacttcgctggtgccctcgtagatctcggtgatcttggcatcacgcatcatgcgctcgatggggtagtcacgggtgtaaccgtaaccaccgaacagctgcaggcaacggcgggtcacatcgcttgcggtgcgggctgcgatcagcttagcctgtgcagcctcgacgctgtaacgaacctttgcgccatccatagcctgctgcttcttcagagcggcagcataaaccagatacttagcagcctcaacacgagccttcatctcagccagctcgaactgagtgttctggaaagcagcaatagcacgaccgaactgcttgcgctccttgacgtaagcaatggtctcctccagagcgccctcggcgatgcccagagcctgagaagcgatgccgatacggccgccatccagcgtagccattgccagctggaagcccttgccgcgcacgcccagcatacgatccttcgggatacggcaatcctcaaagatcagctcgcaggtagaagaaccgcgaatgcccatcttgtcctctgccttaccaacagagaagcccgggtcggtgcgctccacgatgaaggcggagcagagcttggtgggacggccgcgcttatccagcacgttatcggtaacggcaatgacgatgaacacatcagcaaagccggcgttggtgatgaagatcttggagccgttcagcacccagtaatcgccatcttccttggcaatggtctgctgaccctgtgcatcggtaccagcgcccggctcggtcaggccgaaagcgcccagccactcgccgctgcacagcttgggcaggtactttgctttctgctcaggggtgccattctcataaataggagcagcgcacaggctggtatgagcagagacgatgacaccggtggtgccgcagaccttgctcagctcctcaactgccatgacgtaggacaggacatcgccgcctgcgccacccacggaagtggggaaataaatgcccatcatacccagcttgcccatcttctcgacggtctctttggggaagtactcttcggcgtcaactttcttagccaggggcttgacttcgttttcagcaaactcgcggtacatcttctgtaccatctgctgctgcttggacagagtaaaatccatcgctatatcctcctaacgggtattttttcagttcctgagcagtgcttgtccgctcagtgcaaacaaattcctcccgaccgctttcccgcggccgggagaaacgtttttcagaaattacagctcatcaacaggggtcttggtgcggtctgcgttgtaaacgtagaagcccttgccggtcttgcagcccaggttgccgccgcggaccatcttacggatcagcgggcaagcacgatacttgctatcgccggtctccttgtacagaacgtccatgatggccaggcagatgtccaggccgatgaagtcgcccagctccaggggtcccatggggtggtttgcacccagcttcatagcggtgtcgatgccagcaatgttggagacgccctccatcttgatgaatgcagcctcattgatcatggggatcaggatgcggttgacgacgaagccggcagcctcgttgacctgcacggggttcttgccgatggcaacggagatctccttgatcttctcaacggtctcagcgggagtgttgcagcctgcgatgacctcgatcagcttcatgcggtctgcggggttgaagaagtgcataccgatcatggggcggctcaggcccttgccgatctcagtgatggacagggaggaagtgttggaagcaaagatgcactcgggcttgcagatcttatccagctcgccaaaggtggtctgcttgactttcatgtcctcaaatgcagcctcaacgatcaggtcgcagtccgcgcacaggtcctctttcaggcccggggtgatagcgccaacgatggcgtccactttctcctgggtcatcttgcccttagcgatcagcttctcgtagcccttcttgatctttgccagaccattctcggcccactcctgcttgatgtcacacagagcaacggtgttgccctcaacctgtgcaaatgcctttgcgatgccctggcccatagtgccagcgccaataacaccgatcttcataggatatctctcctttaaatatttgatgttaagtaatcttttcttacgctctcccctctcccggggaaagcttgaaaccggaatgttttagttgttggtgaacactgccttgggcttcggcttctcacgagagaggaagcatgccataccctcgacctgatcgtgggtctcgaagcagtcgccaaacagcttttcttccacttccacagccttttcaatggggaggctgatgccgtcattgatggccttcttgcagttgcgcactgcaatgggagcgttcttggcgatcttgccagccagcttcaggacattctccatcagctcagcctgcggatacacggcgttgaccagaccgatgcggtaagcctcgtcagccttgatgttcagagcagagtagaccagctgctttgccatgcccatgccgaccagacgagccagacgctgggtgccgccgaagcccggggtgatgcccagaccgacttccggctgaccgaacacggcgttgtcagagcagatgcggaaatcgcagctcatagccagctcgttgccgccgcccagtgcaaagccgttgacggctgcgatgacggggatgggaaaatgctcgatcatcaggaacacatcattgcccagtttgccgaaggcttcgccctctgccttggtcatggtgctcatagaaccgatatcagcaccagcaacgaagctcttgtcgccttcgccggtcagaacgatgcagcggacagtctcctgatcgactgcctcaaaagcagccttcaggtcagccagaacctcggggttcagggcgttcagtgccttgggacggtcgatggtaatgatctcaacagcgccctgcacctcggtttttacaaatgccattgtgaaaacctccatttcatacagttcagttttttcaaaacagcccccggaacgcaggagggctctccggttccctccggcgctccgggtctgtggttcagtcaggattcagagaaagagtgcttagtccatctcaacgatggtagcgcagcccatgccgccgccgatgcacagggtagccagacccttgtgagcaccacggtgcttcatagcgtacagcagggtgaccaggatacgagcgccggaagcgccgaccgggtggcccagagcaattgcgccgccgttgacgttcagcttctcctgatcaaagcccagagcctcaccgacagcgatggactgtgctgcgaatgcctcgttagcctcgatcagatccatatcagcaacggtcaggccggtctttgccatgactttcttggtagcagcgatggggcccagacccatgacttcgggctcaacgccagccagagcgcctgcaacccaggtagccagaggcttcacgcccagctccttggccttctcctcgctcatcacgaccaaagcagcagcaccgtcgttgatagcggaagagttgccggcggtcacgatgccgtccttggtgaaagcaggcttcagggtgcccagcttctcaacaggggtcagacgggggccttcatcggtatcgaacacggtgtcgcccttcttgcccttgatgacaacaggaacgatctcatccttgaacgcgccgtccttaatggccttgtcagccttgacctggctgttgtaggagaactcatccagctgctgacgggtgatggggctgtagccgtacttcttctggtaggtctcgttggtgcagacattctcagcggtcatgcccatgtgcttgttgaagccgcatgcatcccacagagcatcattgaccatggtgtccaccagctcgctcttgcccatgggagcgcccatgcggtagccgtagcggcccttcatcattgcgaacggagccatgtccatgttctccataccaccggcgaccacgatgtcagcatcgccagcctcgatcatctgagcagccatgttgacgcagttcaggccagagccgcagaccacgttgacggtgacggcgggggtctcgatgggcagaccggctttcagggcagcctgacgggcaacgttctggcccaggccagcctggatgacgcagcccatgtaaacatgatcgacctgctcgggagccacgtgagcgcggttcagagcctccttgataacgatggagcccagctccgcagcggggacgtttgccagggtgccgccgaacttgccaatggcggtacgacatgcagatgcgataacaattttcttcatgttaaaagcctcctgaatttatgttgggtgattttagagcctttgttattcaaaacgcccgtgggcgcttttgcatgggattcagagctttccggcttcccgcagggcgttcatcttccgttcgaccgccgcctccacattgggggtaacgaacttggagatgttgctgccgtagtgggcggcctccttgacgatggtcgaggagaggtagctccatttgatgctggtggcaaggaacatcgtttcaatgccaggcatcagcgcgtggttcgtctgggccagctggatctcgttttcaaaatccgtcacggcccgcaggccccgcaccatcaccgaagcgtgcttctttttggcaaaatccacagtcaggccgtcgaagctctccacggtgacattcgggatgtccttgcagcactctttcagcagctctacccgctcttcaatggtgaacagagggtctttcgcactgttgatgagcacagccacgatcagtttgtcgttgatctttgccgcgcgcttgatgatatcgagatgaccccgggtgacagggtcgaatgagccgggataaattgccgttaccatggtgtcctccttgtgcgcttgggtgaaaagcgcgttttggttctgccatgatcacactttccagtctccggggcaagcagcgcctcgttatatcgttaatttttaaacaattaacggtgcgcatccgcgcgcacacttgctacgatactagtaaaccatattgtcaaaattttatcaagaccattttctgaaaaatttgtttctgccgtaccaaactatcgtcacaaaaagctaagatttttagttaatttgccatcagctccgattttttcgcaacagggtattgattctgcaatttgttaatgttataactaagttgcatggcatcaggatatcactcccctgtgaaagtcatgtgtacagattgcatccatttggtaaatactctgtacattttatatcgttccgcagggaactgtaaggttatattgttccgcagggaattgtaagaatttacaatttctttatgttattatcggagaggatggtttataatggattttatggaactgtacgcgcagaaaaagatgactgccgagcaggctgccgctcaggtcaagagcggtgactgggtcgattacggctgggcggtcaacacgcctgtggctgtggacgcagcgctggccaagcgcctgcccgagttggagaacgtcaacttccgcggcggtatcctgatgtgggtgcccgagatcttccagatcgatgacccggctgcccacatgacctggaacagctggcatatgggcggcattgagcgcaaggccattgcacagggcttctcgttctactcccccatccgctactcggagctgccccgctactaccgcgagagcccggacccgctggatgttgccattttccaggtgactcccatggacgagcatggctatttcaactttggccccagtgcaagccatctgggtgccgtgtgtgagaaagccaagaagatcatcgtggaagtcaacaccaacatgccccggtgcctgggcggcatggagaactgcgtgcatatttctaaggtgagcggcatcgtggagggcagcaacccgcccatcggccagatggctgccgccggccccgcctccgaggtggacctcaaggtggcaaacctggtggtgcccctcatccccaacggtgcctgcctgcagctgggcatcggcggtatgcccaacgccatcggcagcctgatcgcacagagcgacctgaaagacctgggcgtccacaccgagatgtatgttgacgcgttcgtcgatatcgccaaggccggcaagatcacgggtgcccacaagcagctggacaagggccgtcaggtctacgcgttcggtgccggcaccaaaaagatgtacgactacctcgataacaaccccgagtgcatgtccgcccccgtggattacaccaacgatatccgcagcatctcggctctggacaacttcatctccatcaacaacgcggtggatatcgacctgtttggccaggtgaatgcggagagcgccggtatcaaacacatctcgggtgccggcggccagctggacttcgtgctgggtgcttacctttccaagggcggcaagagcttcatctgcctgtcctctacctttatgaataagaagaccggcaagctggagagccgcatccgccccacgctggagaacggcagcatcatcacggatacccgtgccaacctccactatctgtgcaccgagtacggctgtgtcaacctcaagggcctgaccagctgggagaaagccgaagccctcatcagcgtggcgcacccggatttccgtgagcagctgatcgccgaggccgataaaatgcatatctggcgcaggagcaacaagcgctaa

SEQ ID NO: 898 - DNA, 31266 bp, unidentified
  source 1..31266: mol_type = unassigned DNA
atggtgctttatttttcgggaaccggaaacagccggtatctggcgcggtgcattgccgaagggctgggcaagaccgagctgaccggggcagagcgcatctgatttgtgatggactgcagcagcgagatcgacaatgcagcaggacgtgtgaaggaaagcggaaaacagatgaagtttttatacttgcatgggctaggacaaaaaccagacagttggaaccgagtaataaaagaaacgaaggtctcagacagcagcgtcagcttgagtctggcagagatgctggagggcaaagcggccacctatggggagctgtatgctgcattctcaggaaggtgcgacaaggaaaataatgagatcgttttgtgcgggctttccttgggtgcggttctggcacttaattatgcgatagaccacccggacaaagtaaaggcactggtgctaattgcagcacaatatgaaatgccagaaaagttattgaagttccagaatctgctgtttcacgttatgccgaatgcaatgttcgagcaatttggcttcaaaaaagcagacgtgattcgcttgtgcggcacgatggcggaattggatctcagggattcattatataaggtgtcctgtccggcattgatcgtttgtggagaaaaggacaacgcaaacaaaaaagcctcaaaggaacttgccagttatttgagcgatgcccacttccatgagcttttgaaaacaggtcatgaagcaaacatagagtctccagaggaattggcaatggtgctgcagaggttttatgataatattatcggatagtctacgatctacaccctgaaggatcgctgtctgaaatacagtacatttagaatagtgttttctccattctgccggttgaatggcgtttgaagttaaagaggatcttgctgatcatataataacgatctgcatttggctcttctgtaacacagtcacagaagctgcagacccatggcgatgatccacatataggagcaggtcttggggatcatcagcaggcccactttgggcttggtcttactgaaaagggtcacaggcaggtagcagccaaaggagatgaggatagctgccaccatccgggtcatatggtagtcgccggtgttgccggagatggcgtacaggatgatgacgccgaggccggtaagggcaaacaccgcgttgcgcaggatggacagggtggggttgccctcatcagtacaccagttgttctggggcagcaggcagatcaggatgcgcaggatggcagacagccagatcaggacttccacagctacgggagcctgaagctgagggaaggtggccttccagacatacagcaggatgatatagaataccgtcatggtgatggaagagacctgcagcccgatgccgagctgctttttgatccggtcgctgctgcctcgcacggcccggatgatccggggcaccagatggaaggcgtcaccgccgcagagggtcagggtcaggacgccatataggataaaaaggctgcggccctgagccattgtgaaaaagaggatgcctgcgatgagatcaaagatcagataggcggcatcgaacaccgcctccatcaggtcgggcattttgggctggtaggctttatgattcatgatgtgtcattccttttattttaaggcattcttctgcgttgtcgcatatcttctggaatgcctgtttacaagctgcgatctgaggctctgagagtccctgaaacatatctctggcaaactgccgctgagcctcaagcccttcggcgatgatcggctgagccgacgcggacagatagacatcgatatgctttttgttcccgtcggcgacctttttttcgatcagtccccgctcctccagcactttcagtgaggtggagacatgagatttggtggaattgcgcacccgtacaatatctgcggcggtatggtactgaggattatggtataaaaacatcaggatatcatactccatctgccggagctgatatttctgacatacggatgacatcagcagctcatagtagcaggtaatggctttgtgatgatcccaaaagttcatagatacctcctgtgatgtattgttctatttagaacgattgcattatatgctatccccgccgctttgtcaagaggaaatttctgccgacgatgttcttgaccggaaaataggactcattgccctgcggagcctcttctgccacgtcaatacggggaacaaagaataaaaaacagcgcccccggagagcggtgggaatcactctccgggggcgctgttgtcaagacagggtctcttttgtatgcaggcgtcggaaggcgtcctcctttacaagctcaatgaccaccgcagtcagagggataaagaagatgatgccgatgatgccaaaaagctttccgccgatcatggcagccacaagggtgtaaaacggagaaagccccacggactttcccaccacgcggggatagatgaactggttctcgataaactgcacggcaaggtagacgatgaggcagcgcaccgccagcacaggatccaccagaagcacaaggaacacgctgaccacgcaggagatcagtgcccccacataggggatgatggcacagatggcggtgagcatccccaccagactgccgtaggggatccggaaaatcgaaaatgcaagggtcatgaggacaccgaggatcacggcctcactgcattgtcctgtcagaaagtttgcgaaggactgacggaacagccgacagaatttcagcagcccggcggcgtggctgggcttcagataggcgcataccagtgtgcgggcgtggtggcagagactctcggccccgagggacatatagatggagatgatcagggcaaaagatgcagtcaccacgatgttcacggtggcagataccgccccgaccgcattgaccagcacggtgtcgatgctgttggtgatcctgtgcagcagctgctcccagtcgatgccctccagccagtgcatcaaccagtccatattggtatcttgtgcgctgagataggcggtccagcgggggatattggactcgatctgtagatagaggctgtgaaacgactgcacaagctccgggatcagcagggtgagcgccagcaccagcacaagaacgacgccgagcagggtgatgaaaaagctgagaagatggatggcgctgcccgagggctgctttttggccctgcggaacaggcttctcagccgcttttccagtccggccataggcacgctgagaaaaagcgccagaatgccgccggccagaatgggcaggatcagatcgacaagttcggcggcaaaggccagaacggcagaaagccgcagcagcgcaacaaaaagcgttacccccacaacggtcacgagcagatattgtttcgtttttggttccatgacgacattcctttcccagagcctgtagctgcaaattgcaaaagctcctcagcggactcttttatcgtattgtaatgggaaggaacaggcttgtcaagacgccgggaaggggagtggtggcccgcagcgatggccctgcctgtcggccttggctgtgcgcccatctatcccagcatcatccatgcaacgccgagccactttggggcggatcggtcgcaggcgatcattggagtccagatggcaagtgcatacgtcggaaattatctgatgccgccgctgtatccgctcagcatgatggttctggatgtggctctgccctgtgggaaacggcctgcaagaggcgatgctttaataaaatacgtatctgggaagaaaaatgaggaagattgcatgaaaaatgataaaagtattatcttttcgtgaattttagcactctacacttgacactgctaataaatggtgctataactatggcgtgctcaggaggaagggcaaaaggagaaccgcgaggtgatcgagcagctccccggaaagcttttccgaatgaacaacataaagattttttacccgacccgaacgccgggattggaggaatgatttatgtttatgcctgctgttttccatgagaatctgttcgatgatctctttgatccgttctggaacgatggcgcgctggagcgtgcgatgaaccgtgaagagcgtgaaaccttcggcaagcgcggtgcaaacatgatgaagaccgatgtcaagcagaccgagaacggctacgatgtggctgttgacctgccgggctgcaagaaggaagacgttcagatggaactgaacgacggctatctgactattcaggcagtgcgcagccactcgaatgacgagaaggacaacaatggccgctacatccgccgcgagacattctccggcacctgtgcccgcagcttctatgtgggcgacgccgtgaagaaggaggacatccacgcaaagttcgaggatggcgtcctgcacgtcgagctgcctgctcctcagcagacgaaggctttgcctgagaacccgaacctgatcgagatcgagtaaaacgccggtcgtgtgcgccaaggcacaacgcacacagaaagcccccggagagctgtaacaagccctccgggggcttttttgtggggcggaaacatggtacaataggagagaacgagagagaagagggtgcgatgaaacaagaaaaagcctattatcacctgcccggtttgtttgagttttacgagctgtaccgggagttcctgcccctgtaccgggggcatcgggaatacttctatgattggtgcagcattggctccatctacggggcaccggccgactgcatctggggcgggggacgcaccggcttcggcggaaatgaccccagagaggtccttgcactgatgcaggagtatggcatctcggcccggctgaccttcagcaactccctcctccgggaggagcatctttcggaccggaaatgcaatgcgctctgcgccctctttgcacagagcggcggagtggagaatggcgtcatcctccattcggagctgctgctggactacctgaggacgcactacccgcagctttacctcgtctcctccacgaccaaggtgctgacggatttccgacagctccgggacgagacggcccgggaggaatttcgctatgtggtgccggatttccgactgaacaaggcctttgaacagctggacagcctgacgcagccccagaaggacaaggtggagtttctttgcaacgagtgctgctgggtcggatgccgggaccggaagcgctgctacgagaatgtcagccgcaaaaatctcggcgaggactgccccgaccatatctgcactgccccgggcgcgggggagggctaccgtttctcgaaggcgatggagaaccccagtttcatcggcgtggaggacatccggaggacctttcttccgatgggattttccaacttcaagatcgagggacggggcctcggcagcgccttggtgctggaatttctgctctattatatggtaaggccggagtaccagctgcacgtccgggaagccatctatctggacagtatgctcgacctgttctgagcggcccggcctccgtttcgaaagcatcttgacaaagccgggcggagttgtaataatagagagacagttatatccaacaaacttccggaaggagaaaacaattatggaagcattggaatgcatcaagacccggcgcagcgtccgccgctttaccgaagagcctgtgaccccggagcaggtggccgaagtggtggccgctgccgcttatgcccccagctggaaaaatacccagatcgcccgctatattctcgtggaagatgcgcagaagcgtgagaaaatcgccagcgattgtgtgctggatttcacctataacgccaacacgctttcccatgcccccgcactggttgcgctgacgatggtgacgggacgctctggttttgagagggacggcagctattccagcccgctcgagggccactggcagtcctttgacgccggtattgccgcacagaccttctgccttgccgcacacgcactgggcctcgggacggtcatcatgggcatctatgacccggacaaggtggcaaaggtgctctccgtgcccgaaggacagacagtggctgcgctcattgccatcggtcatcctgcacaggatcccgccgcacctgcccgcaagagcgtggaagaactgctgagcgtacagtaaatgagatggggccggtcttctggacatcggccgaaaaaaagtagatagcatcaccccggtttccccttttgaaaggcagaagccggggtgatgttattctatttctgaccaaacccaacgggcggctttgttaccggagccgcccgttgggtttggcgtatctggcaaaacagcaaaattatgataagatttctccgtcagcaaagccccgctggacgcttgatcgtctactaattctactaaaattgaatctgtggttgtttttttgaggcaaattggacaataaattacaaaaagattgacaatatcgaccaaaattttctagggggggggggtagaatagtgtcaaaaccccttgcgtacaaggtaacacaatggtaaaataaacttataaatagttttatcgcaagacaagaaatcagtgtagcatgaaaacagcatatttgcgatatgcaattcaacgctgttgctgttgcattgaaaagttgaattgctataggatgtcgaacgcacggtatctcctacgagcgaatgagagataccccttaattgcggaaggggtgataggtgtggcatttcgacgatttggacatcatccgagaacaggcaaaggtgcgctaactgggatgggacggtgcgaagaaaaggtgcttgatggaagaattgcaaacaaaatgacccttggcgaagcagtcgtcaggggcgttttgcgtgccctgacgtatggaggtgctgcggatcgatgccaaaaagtgactgcaagtgcctctgccgttgaagctgggtaagaggacgtacagttggaatcgtgtgtgagattacatagtgtgagtgaggagaaaaaatgagcgtagaggtaactggaatcaataagccggctgaaattgaccgaaaggaaaatctgagggagcatcagctctattggatcgggcgtcggacgcaggatgtgatcttgtcgtcgctggcattggtggcgctgtcaccggtcatgctggctacggccattgcaatcgtggtggatgacccttctgctggcccgattttctcgcaggagcgtattggacgaaacggtaagcccttcaagttctacaagttccgttcgatgtgcccgaatgcagaagcaaagctggacgatctgctggaacagaacgagatggacggccctgtgttcaagatcaaggacgacccccgcattacccgtgtgggcaagtttatccgcaagaccagcctcgatgagttgccccagctgtggaacatcctgaagggcgatatgagcatcgttggcccccgcccggcgctgccccgtgaggtggaacagtacggcgactacgaaaagcagcgcctgtatgtgacccccggcctgagctgctattggcagattgccccgcaccgcaacgacctctcttttgaggagtggatggatctggatgtgaaatacgtcaaggagcgcagcttctgggtggattggaagatcatttttaagacatttaaggtgtgtttgctggggcatggagagtaatgtctacctcaaactttcagtggcggcatgatggtctacggtggcgtataaaactcatgcgaaatacccctattacaagcctgttttattgcagagcaaggtagtgacatgataccttcatttttctggagaattagaggtggaggttgaaagtattgaaaagccaaaaatctatttttctggaaaagtttattgcagacgagagatggacatgataactgcatttttctggggaattagaggtagtgaggggtagatgattgttcatgttgcaacaagagtgaggtatgaacttgtacagttttaacaaagtgagttggtgtacggggttatgacaataagggtcagcactttgaaaaatggagaagtgcgacagcgagttatgacaataagacctaacactttgttggtgagttggtatgtaaggtgtctactataaagtttcagttgaagcaaattgggcgagtagaccatgacaggtctacataaaagattcagtggtagtcggaaaagtagacggccactatgaaaaaatgataactacagcgcgatagctcatccggcatggatgatgaacacactgtttgatatagatttgctcggctcaatatgagccttccatataagtaagatgaatttcaggaggatatagaattatgaaaaaggactataaaattgcggttgctggtaccggggctagagatataatagggtcaaccaagaaaacctacgataactaaagggttttgacggcttgagttgtccttcaaatgttttatttgttgaaaaactgcaagaagcggaaaatcctgggggttatatgtaggaggcttttggaagctctgttttgacccacaaaaggagcagcaaataaagattgcaggagagttcaagcctacggtggattgcctttgtgcgatccgccgtgggtttgttgctgtttatatagaaaaagtgaggagtgcagaatgtacatgaatgacggaaataaaacgaaaatcaatctgagaaacaagagtgtttttatcacgggtgtagctggttttatcggttctaaccttgcaaagagactgctctccacggtggagggtgtcaaggttgtgggtctggacaacatgaaccactattatgatgtgcgcctgaaggaagcacgtttgaacgaattggagcagtttgacaatttcagcttcgtaaaaggtaatctggcagacaaggctgtgatcgaatctatctttgagcagtataagccggaaatcgtagtgaacctcggtgcgcaggcgggtgtccgctattccattacgaaccctgatgcctatgtggaagcaaacttgattggcttctataacattctggaagcctgccgccattcttacgatgaagggcatactccggtggaacatttggtttatgcgtcgagttcttccgtatacggcagcaataaaaaagtgccgtacagtacggatgacaaggtggataacccggtatcgctgtatgcagcgaccaagaagtccaacgaactgatggcacatgcctattctaaactgtacaacattccttccacgggtctgcgcttcttcacagtatacggccctgctggtcgcccggatatggcgtacttcggctttactaacaagctgctgaaaggcgaaacgattcagattttcaactacggtaactgcaagcgtgactttacttatgtggatgatattgtcgagggcgttgtccgtgtgatgcagggtgcgccggaacgtaaaaatggtgaagatggtctgcccgttcctccgtatgcagtttataacatcggcaaccagaacccggaaaatctgctggactttgtacagattttgcaagaagaactgattcgtgctggtgttctgccggaagattatgattttgaagcacacaaaaaattggttccgatgcagcctggtgatgtacctgtgacctatgcagataccagtgcgctggagcgtgacttcggatataagccctctaccagtttgcgcgaggggttgcggaagttcgctgagtggtacgcaaagttctacaaataatgaagaataggaaaataaaccgatgaagtgtgttgaggtttacaaggaattatatcatcaggaaccgtttgatgtggcgttctgcccgtaccgcatcagtccgctgggtgcgcatatcgaccatcagtacggaaaaatcaatggtttggcaatcgacaagggaatccacatggcctaccacccgaaacagaatggtgtggtggagttgcagtcgctgaacttcccgaagcgtgcccagttctttgtaaatgcagtgccggaagaaaagcagggagactgggctgatcatctgcgtggtgcggcaaagatgctgggagaaaagtaccgcctgaaagttggtctgtctggcattatcgagggtagcctgccgattggcggtttgtcctcgtcggcttcggtcattatttgctttttgtctgcactgtgcaaagtgaatggtatccatctagagccgatggagatgattctcacggcgaaggccgcagaaaaccagtatgttggtgttgcttgcggcaagctcgaccagagctgcgaagttctttctaagaaaaaccatctactgtacctcgatacgaaagatgacagctatgaactgatccctaccagtgagaaaatgaagccttataaggtggcaatcttcttctccggcttggagcgttctttgaaaaactctaagtacaatctgcggcaggacgagtgcaaggcagcggcctatgcactaatgggctatgcagggatggactatgacacctttgcaaatacccggctgcgcgatgtgccgtatgaggtgtttgaagcctataaagaccgtctgccagaattgtggcgtagacgcgcagaacactattacagcgagtttgctcgtgccgaaaagggtgcagaactgtggcgtaaaggtgatttggaaggctacggtcagctggttttcgagagtggcaaatcttccatttataattacgagtgtggctgcgatgaattgaaaaaactgtatgaaattatggctgacactgatggtatctacggtggccgcttctccggtgcgggattcaaaggctgctgcatggcgctgattgacccagacaaggccgaagatattgaagcaaaggtcacagcagagtatctgaaagcgttcccggcattggaaggtaagtacagtttccatctgtgcgagagtgccgatggtgtggaactgtaaggagaatacatagatgaaatgtttgattttagcagcgggctacgctacacggctttatccgctgacggagaattttccgaagccgctcctgaaagtgggagaaaagtccatcctcgattggctggtggatgatttagtggataccaccgatattgacgaatttgtggtaatttccaaccacaagttcgcgcagcattttgaggattggaaaagcaataagcaaaagacgcggccttatgagattactgtaatcgacgatggcacaagcaccaatgaaactcgtctgggagcagtcaaagatattcagctggcggtggaaaagctgaatttagctgatgatttgctggttatggctggcgacaatgtgctggatttcagtctttccaagttcgtggagttcgcaaaggaaaaggatacttcctgtgtgatgtgccatgtggaaaatgaactgaaaaagcagcagaaaacggcgattatcacgttggatggcaatgacctgattaccagctatgaggaaaagccgaaagagccgaaaggaaatctggctgtgccgccgttctattgctaccgtgcctgtgatgtaaagcggattcaggaagcactggacaatggctgcggttatgacgcaccaggtagctttgccgcatggctgagcaaacagaccccaatgcacgcttacgttatgccgggcaaacggtatgacattggcgatattaacagctatgagtatgtgaagagtgtgttctcaagataagtatacaagggagaaagtaataatgaaggagtttaaagatttgaaaattgccgtggccggtacgggatatgttgggctttcgctggcagtgttgctggcacagcaccatcaggtaacggctttggatatcgttcctgagaaggtggagatgatcaataacaagaaatctccgattcgggacgaatacattgagaagtatctggcagaaaaggagctggatctgactgcaactctggatgccaaggaagcgtattctgatgctgattttgttgtcattgcagctcctaccaactatgacagcaagaaaaatttctttgatacctctgcagttgaagcggttatcaaactggtaattgagtataacccggaagcaattatggtgataaagtccacgattcctgttggcttcacagcaagtgtccgcgaaaaatatcactgcgacaatattatcttcagcccggaatttctgcgtgagagcaaggctctgtatgataacctttacccttcccgtatcatcgttggtacggatgtagaaaacgctcggctggtaaaagctgcacatacttttgctgaattgcttcaggaaggtgcaatcaaggaaaacattgacactctgttcatgggttttaccgaagcagaagcggttaagttgtttgctaatacttatctggctctgcgtgttagctacttcaatgaactggatacctatgcagagatgaaggggctgaatactcagcagattatcaacggcgtctgccttgatccgcgtatcggtactcattacaacaatcccagcttcggttacggcgggtactgcttgcccaaggacactaaacagctgctcgcaaattatgccgatgtaccggagaacttgattgaagcaatcgttgagagcaaccgcactcgtaaagattttattgcggatcgggtgcttgaaattgctggtgcttatgaagcaaatgatagctgggatgagagcaaggaaaaagaagttgtggttggcgtttaccgtctgacgatgaagagcaacagcgataacttccgccagagttccattcagggagttatgaagcgcatcaaggcaaaaggtgctacggtcattatttatgagcctacactgaaagatggggacacattctttggtagccgtgttgttaatgatttagaagagttcaaaaaacagagccaggccatcatcgcaaaccgctatgacaagtgtctggatgatgtgaagaataaggtttattcacgcgatattttccagcgtgattaatataaaatttttatttaaaaggagaataattatgtctgcatttgataacgcaacccttatgatcactggtggtactggttcttttggctctaccgttctgaagcacttcttggattccgacctgaaggagatccgtatcttctcccgtgacgaaaagaagcaggatgacatgcgccatgagcttcaggccaagcatccggagaatgccaagaaggtcaagttttacatcggtgatgtccgcaacccgcagtccatccgtgacgcaatgcccggtgttgactacatcttccacgctgccgctttgaaacaggttccttcctgcgagttcttccccatgcaggccgtccagaccaacatcatcggtactgataatgtgttgcacgccgctattgacgctggcgtcaagcgtgttgtctgcctgtccaccgacaaggctgcttaccccatcaacgctatgggtatctccaaggccatgatggagcacgtcatctacgccaatgcccgtgtagctgctgagcgtggtggcactaccatctgctgcacccgttacggcaacgttatgtgcagccgcggttccgttatccctctgttcatcgaccagatcaaggcaggcaaccccatcactatcaccgaccccaacatgacccgctttctgatgaacctggacgaggctgtggatctggtcttgttcgccttccagcacgctaaccccggcgatctgttcatccagaagtctgatgcctctactatcggcgatttggctaaggctgtccagcaactgttcggcgataccggcacgaacatcatcggcacccgtcacggcgagaagctgttcgagactctgatgacccgtgaggagcgtctgcgcagccaggatatgggccattatttccgtgttgctgcggataaccgtgacctgaactacgataagtttgtcgtcaacggcgaggtacataccatggcagacgagtcctacaccagtcataacactacccgtttggatgtggaaggcactgttaagaagatcctgaccaccgagtatgtccagaatgaactgaagggtatcccgaatgtctaagaaaaagctgcttctggttggtgccggtggcttcgggcgcatggtggcggagcaggcgatgttccaatacgattgcgcttttgtggatgatggacagtctgtgggtgctgagatctgtggtattccggtgattggcggtcttgctgatttgccggagctgaaaaaagagtacagcttgctggtggtaggtatcggcaacaatcagttccgggcgcaggtgtatgagaaagcaaaatcacttggctatgcgttcccaaacatcattgctcccagtgcctatgtcagtccgtttgctgaagtcggctgtggctgtgtggttctgcaaaacgcttgtatccaaaatggagcctctgtcggaagcggtgttttgctgaatgccggaacggaagtccactgtgatgcaacgataggggactacgccttgatctacaccagcagcgtgattcgcacaggtgcaactgtggggaaatttgcccgcatcggcagcaactgcaccatttgcaataatgcaactgtgctggatagtgcagatgtttcggactgcactgcagtacattaagaggtgaaagaatgaacattctagtcacaggtgccaagggtatggtgggaaccgccctttgtaacaacctgaaaaacattcgtgatgggaaaaacaagacccgtccggcactggatattaaagaaatctacgagtatgatctggattctacctcggaggaactggacgagtactgccgcagggcagacttcgtgttcaatctggcaggggtaaatcgtccagaaaacccggaggatttcatgaagggcaacttcggctttgcatctgacctgctgaactgcttgaaaaagcacaacaacaaggcaaccattatgctgtcctcctccattcaagctacgttggctggccgcttcggtaatagtgagtatggtcgtagcaaaaaggctggcgaggagctgttcttccagtatgctgaagaaactggggctaaggttgccgtctatcgcttcgtgaacctgatggggcatagccgccccaagtacaacagcgccgtcagtaccttctgctgggcggttgccaacgatgagcctttcactgtcaatgaccgcagcaccgagctggagctgctgtacattgacgacctagtagaaggaatgtttgatctgctggaaggcaaggaacagcactgcgaatttgacggtgtagagactattctgaaagaagatggccgttactgctgcgtccccgtgacacacaaggtaacactgggcgagatcgtagatctgctgcaggagttcaaggaacagccgactacgctcatgatgcccaagatgccagacggttcctttgctaagaagttgtattccctgtacctgacctatctgccgacggacaagttcaagtatgccctgaagatgaacgtggacaaccgtggttctttcacggaattggttcataccgctgactgtgggcaggtgagcatcaacatcagccgcccaggtatcaccaaggggcagcactggcacaactctaagtgggagctgttcatcgtggttgccggtcacggactgattcaggagcggaacatcaacaccggagaaacggtggagtttgaggtttctggcgataagatcgaggcagtccacatgattcccggctggactcacaatatcatcaatctgtcgaaaacggagaatctggtgacggtgatgacctgtaatgagatctttaacccgaaccacccggacacctttttcgagccggtgtaagaaaagatactggttgacgttaggagaatattatggaacacaattttaaatggaaaaatgacgggcgcaccaaggtcatgattggctgtggcacccgtcctgagatcattcggctggctgccgttatcaagcgttgccgtgaatactttgactgctgcgtggtctattacaatcaaaactgggacagaaacctttccaccgttttctgggaggatttcgagttgaaaaacaccttcggggagtatggcccggacattttggtgccggtggttggcgagaatcttggtgttacctgcggcaacattatgggccgcagctatgaactcctctctgaattgcagccggagggctatttggtgctgggcgataccaactcctgcctttctgccatcagtgcaaaacgactgcacatcccgctgtttcacatggaggcaggcaaccgctgcaaggacgagtgtctgcccgaggagaccaatcgccgtatcgtggatgtgatttccgacgtgaatatgtgctattccgaattcgcccggaagtatctggcggatacgggtctgcccaaggagcgtacctaccagacaggttctcctatggcagaggtgctgcacatgaatctggagaagattcagaaaagcgatgtgttggagcgtctggggctggaaaaggataagtatattctgctgtccgcccaccgtgaggagaacatcgattccgaaaagaacttcctgagcctgtttactgctatcaacgcactggcaaagaagtacgatatgcccatcctgtactcctgccatcccagaagcaagcaccgtctggaaaagagtggcttcaaactcgaccctcgtgtccgggtcaatgagccgctgggcttcaacgactacaacaagctgcaaatgaacgctttggcaatcgtctccgactctggcactctgcccgaggagagcagcttctatctgtccattggtcatcccatcgccgccgtgtgcatccgtaccagtacggaacgtcccgaggcgctggaagccggtgacttcattttggctggtattaccactcgggaacttctcaacgccaccgatatggccattaagatgaagcagaagggcgttctgggcaagccctgcccggactatgtggacgagaccgtgtccatgaaggtggttcgcatcattcagggttatgtaaacgtggtcaataagatggtgtggaggaaatactgagttataaagtgagaaagctatgcgacgagtgaatatattaggtgttgaaatttcggctgttaacaaagaaactgcgattcaatatttattagaaaacatggacaaagcaagaggaaaatatatttgtgcttgtaatgttcatactaccgtaacagcacatgagaatttggactatcaagcggttcaaaacaattcatttatgactttgccagacggaaagcccttatctagcgttggagttcgtcgcgggtattcggaaatggggcgagtgaccgggcctgattttatggagcaagtgattgcagccacagaaaaaagtgatgctcgtcactatttttatggaacaacgcaaaaaaatctgaatgcattacttgaatacttaaaggcgaattatccacaattatccattgtcggttgtgagccatcattgtttaggccgttgacgatacaagaagaaacagaactgtgcgatagaatcaacgaatcgaaagcggattttgtatgggttgcactcggtgcgccacgtcaagaaaagttctgtgcaaaactcagcaaaaatacaaaggccgtttggatagctgttggtggagcatttaatgttatttctggagtgattccacgtgcaccgcagtggatgcaggatcacagtttagaatggctgtatcggtggagtaaggaaccaaagagattatttaagcggtatgtagaaactaattcgaagtttgttttttatctgataagagaaaaggttgaaaaaaaggaatgaagaaaaaggtctgcatggtagttccgagcttcacagcaaagggtggaattacatctgtagtcaatggttaccggaactctcaattgacagaagattacgatgtgcgatttatagagacctattgcgatggaagtgtaattcaaaaaacttctaaagcattaagcgcgtatttgaaatttatttatacagctttgttttggaaaccaaatcttgttcatgtccatagctcttttggaggaagtttttatagaaaggctttaataattgagattgcctctctctctaaaattccggttgtcaatcatgttcatggtgcggattttgatgagttctatcgaaaaaaatctcagaaaaagaagaaaaccatagaaaagatttacaataaatgcattagaaccatcgcactgtcagaagaatggaagaagaatcttgcagaaattgtgccagaacagacaattagagttgtagagaattatggtattttgcaagaagatttgatcaaagagaagcttacaaaaccgaataataagctgattctttttctaggatttatatgtgaaagaaaaggatgctttgatattccagctattgtagaccaagtatgcagcaaaataccgaatgctcggtttattcttgggggaagtggtgaaatcgaaaaagtcaagcagaaactcagtgcgaaatataaagataatgtggaatttccgggatggatccgaaatgagcaaaaaagacaatatttgagagaggcagacatttttcttctcccttcgtacaatgagggaatgcctatggcaatattggacgctatggggtgtggtcttccaattgtgagtacagatgttggaggaattcctaaaattgtaagacaaggaattaacggatatttgtataaaccaggtgatagtaaaagcatggcttgtgcaattattgagtatcttacagatgatgaaaagagattaaaagctggacaggaaagtgttgatattataagagaatcatattctctacagcaaaacattgataaacttgaaagagtttatacggaagtggagagattgagagatgacaagctatgacagaagaaacctatataaaaattgggggggtattggaatcaataaaatcggaagcctcgtatacagatcagaagaatttgtgcgtaaggttttttataagattctccgagaaagtgtaattaaatcttcttttggaagctgtggtaaaaatgtacatattgctgaaaaaagcgatattaagggaattggcaacattagtataggagatgatgttgcgattggccctcatgcattgttgtggacaacacgagcaaacattatcattaaagagaaagtaattattggcccaggacttagtatcatcacaggcgatcacaagataaatgtagtaggaaagtacatggctgatgtaacagatgaagaaaaagatgacgaaaacgatcaggatgtcattattgagaaggatgtttggataggggctaatgtaacaattcttaagggagtaactgtagcagagggatgtgttattggagcggggactgtgttaactaaaagtactcatccctatggcatatatgtaggagtacccggtagacgtgtttctgaaagatttacgaacgaagaattagaaaatcatataaatatattgcaagaaaaatccaaatggtgattttaatatgagaacaaaatacacaatcaatgaacttttatttaagatatatttgatatgcgtgattttagggtctttgctaagaaatatgttgggtgaatgggagccgatatatgatacatacaggtttgttagtaaaggaagatggggaactttctttttaagtttttcaagtattattattcttgtgctgatatttagatgttttatacaatatataaaaaaagtccatgcaggaataaggattttgattataagttcgattttatattatttgatatggactgtattagctttagataaagcgcctgctcaatctgttttttttgaatcgatttctacatcagtgattttgttgccagtggcagcgctacttggttttgatgacaatatatggaatatattggaaaacaaattgccatatataaatatactcttctgctgttgtttttatattgctgttttttctttttgggctaattatggaataaaatggcctatgaatgcgtcatataaaggaatattttcatgttggtttacatctgcttgcattatgacatttttggatttcccccaaaaggataaaagaaagctgatatactgtaatttgttgcttattatcgctgctgcatttattacacagtcaagagcatgggtattacagacattaatactattatttatatttgttgctgttctgggtgataggaatagatctgttaagattttaatgggatttttgctgattattattacggtattgggagtttcttatatttttccagagattacaggaaatttattcaatagaggaatggaagataccagaagtggacaatacgtaatcttttttgcgcagcattcatgggaggatttgatctttggattgggtatcaatgcttcttatagctacttgggaaataagaactatacttatttcgataatcagtttatgtttgttatgttccattatggaatcttcccagtgattgcatggttgtgtgcatatgcatctactttaaaaggcagtaagatttataatgagcaaagtagaatagtaattcgagcagcaaaatttgtcggattttttgtattactagcgtatatgggcgtttctacatattatcagattgagttgggatatagtggcgttattgtaatgatgcttgttggaaaagcattaagagaaaaatattacgggagatcataggctgatgaaaaagatatcatttttaataggtagcttaggtggaggcggtgctgagagagttacagttgccttagccgattatttttgtgaaagcggttatgaagttttctttattgtattttcaaaggcaaataataattataggattaatccgaaaattaaaattgattatttgcctgagaatacaggaaaatgtgcaatattttttagaataaaagaattaaaaaaactattgaaaaatcaagcgccagattatgtgatttcgttgggcttgggatatcaatatctgatattggggaatttgctaaataaatatagatttattttatcggaaagaaatgctccgcagtattattacaattggtatcagaagatttatgtaaagtatagttacgaaaaagcatatagagttgttttccaaaccgaagatgcaaaacagtattatggtaagagcctagagaaaaagtcaaaagtaattgcaaatcctattacctcgtcaattccggatccatatgatggagaaagagaaaaaagaattgtagctgtaaatagattgagtcaacaaaaaaatatattcatgcttctcagggcaatgaaaagagtccttgatgtgttcccggaatatgtattagaaatatatggtaaaggcgaacaacaggaggaattggaaaaatacgctaaagaactaaatatttctgataatgttaaatttatgggacaaaaagcaaatgttcaaacatatatagtgaatgctagtgtttttgtatcatcatcagattttgagggaatgtctaattcaatgctggaagctatggcgataggacttcctgtggtatgtacagattgtccgataggtggcgctagaatggttataaaaaataatattaatggcatacttacacctgtcggtgatgatagaatatttgcggatgaaataataggattactaaaaaatccggaaaaagcaaaaagactgggaaagcaagcaagtgagttgagagaacagctaaatataaagaaaatagcaaaggaatgggagaaattatttgaagattaagttaaattaggtgcattgtaaatcttatcatgagaaacaattagaaaagagaggatggcaattcatgataatattatatattggaaatgtcggatatccagacactgctccatcaattcatgtcaggaatagagctatatttatgaaatcttgtggacatgaagttcatgtgttatgtgagttggcttctgatggcaaaagaatggaagaagtagatgaggtggcataccaatatatggatccttatccggggcggggaaaggtaagaggcgctttttggaatttagaccaagtatttgggaaattttattttaagcaaacactaaaatttcttgataaaataaaacccgatataatcattttatatgagccgaattcgatattatatgttttaaaaatgttaaatctttctaaaaaagaaggatttaagttggtaatagaaactacggaatggagaaaccctaaagattatcggggaattattccgagagttattaatacagaaaaagacttacaaaaaaaatatatcgataaaaaagttggcaatgttatagcaataagcaaatatttgtatcaacattatttagagcaaaactgtaatactattttgttaccgccaattttcccagaagctgataaaaagaaaaaattaataagagaaaattcagataatagaaaagtgctgaaaattgtttatgcaggcgcattggcttcaaaggattatattgatactctattacatgcgataattcgattaaatactgatgaagtacgtgttgtcattgatataattggccctgataagatgcaagtgcagaaattggtagggaacgataaattagaaaaatatggaatttactgtcatggaagattgtcacatgataagacgctaagtatagtggaaaaggcagatttgtcggttctattacggatgaataaaagatatgcgaaagcaggagtttcgacaaagttttgcgaggcaatgatgttaggggttcctagtatttgcacatctgtaggaggcacggatctatttgtaaaagataaatataatggattccttgttagaaataatgacctgaatacattagaaaccacattgcttagtattattgatttgtcaagagaacaaattgaagaaataaaaaataatgcattgacaacagcaaatgaactgtttacgcctgataaatatatagaacaatttaatgcatttttgaataagtgtaagtgagtctgcgtttgaatgtaaatagtgttataaagtctagtactgaatgtgaaacatctagggactgctctttgtccaaacagaaaatcaggaagaagggattgaaggaagggtctggagaggaggattcttataagaatccagaaatcatgctacagaagtactcttgatattagatgttttttgctatgctttttccttttttacgtttgagatgaacagaaatatggttctggctggaattccagatacctgcgtaaatcgaatgctgcgaattagaactctatggctgactgactccttagtgaacgtgtaagcccagataaaatggtgtcaggccacaatgttcttattctacagcttaggcaataagttggatagcaacacggcaggatgctgtggggttacccgcaaatacattgtaggagaataaaatgctaaaggaaaggctacaaaatattcctttgggtgtaaaagcagcagtggtttataccatggcatctgttttttcacgaggattatcaatgattacagttccaattttcacgagaataatgtctacaagcgaaattggaatggttaatttatataactcctggtattctttgttgagtgtaattgcaacgctatcattaacatcgggtggatttcaggcagcgatgaaagactttgagggggaaagggatcaatatcaatcggctgttttgacattaacatcaatgatggcaattgttctaggatgtatttatttcctcatacctgatatttggaatagaattatagggttgccttctgtgctgataattttgatgctagtaatgtttttctttgcaccggcgcaggatttttggctgttaagacaaagatatgaatataaatataaattagctggtgcattgacaatgggatcagctttagcatcaacaatattctccgtgatagttgttttatatttaaataaagcgggatcggatcaagttgtggtgggccgattgtatgcaactaacatagcaacaatggcgatttcggcggttatatggattaaaatatatgcaaaagggaaaacgatagtaaatataaagtattggaaatactctttgaagctgagcgctcctcttattggttatgcttttgcagcacagattttaagtgtttctgatcgaatgatgataagcaaaatggtggggaatgatgcggttggaatatatagtactttatatactgtaagctcaatttcactattagtttggagtgcaattaattcatcatttataccgtatttatatcagaatataagtaaaaaagataataaaattagagaattatcattagctttaatgggatcgtatgctattattgcagttatgcttacttttttagcgccagaaatagttagaatattagctactaaggaatattatgaagcaatttatattatgccgcctattgcagcaggagtgtttttgacttctgtatcaaatatgtactctaatttactcatataccataaaaaaactaattatataatgtattcttcgactatcgcagctattgtaaatcttatactgaatttcatatgtataaatatttttggctatatggcagctgcatatactacactggtagcatatatagtgttagcaggtgcacaagttatatttgcaagaaaggttcatctcaaagaaactggaaataaatcggtatataatgataaggcagtcttgtttatggcaatattaacgatcatagctgcgttgttcggtttggtattgtatcgttatactgtgttaaggtatgcattaatttgcattgggatgattgcgggaataaaaattgcgttagcggctttgaaaaaaatgaaaaataactagtagagtcaatttgagcctagaacacaaaaaataacaattcaagtcttgccgagaactctcgggggtcggcccccgatgtgagtatatttgtgtttaagttccaacatgcaaaccttagcgttttgtttgtccagaaggtggatgcttttaccataggcaatcttgcaaaggttattcagtagttctttgatgatatttgaacgaatatcattggcgctcgtcatggagatgatttgtttgagactttgataacacgtgatgagcgcttgcgtggtgagaatatgggtcactatttacgcgcgtctactgacaaccgcaatttatactgcgattagttcgtggtcaaggacgaagcaaatgagtctcatgcaagccataatacgaattatctggatgtacaaggaacgattaagaagataatgatgacagtgtatgggaaacaacatttagcgggtaatcaataactgaggaagggtggtgtattattgaaaaactgaatatttgtagattagtgaatacgaggcactcgttgatattagtgcatgagatactatacgtttaaattagaagaatagtattaggaggaagatttaagatgggaaagtattttggaacagatggcttccgtggtgaagccggaattacattaacagcagatcatgcctataaagtagggcgcttccttggctggtattataatgcactgcgtgaacgcaatggtgacaccgattctgctcgcattgtcatcggcaaggatacccgccgtagctcctatatgtttgagtacagcttggtcgctgggttgactgcttctggtgcagatgcctatctgttgcatgttacgaccacgccgtctgtggcttacattgctcgtgtggatgactttgactgtggcatcatgatctctgccagccacaatccctactatgataacggcatcaagctgatcgactgctacggcgagaagatgccagaggagaccctgctgctggtggaggattatatcgacggaaagctccatgtgttcgataaggactggccggaactgccctttgctcgtcgtgagcacatcggctgcacggtggactacgtggcaggccgtaaccgttatatgggctatctgatcagtcttggcatctattccttcaagggtgtcaaggttggcctagactgcgccaacggaagttcttggaacatcgctaaaagcgttttcgatgccctgggtgctgatacctatgtcataaacaacaagccgaatggcacgaacatcaacaacaacgccggttctacgcatattgagggtctgcagaagtttgttgtggagaagggtttggatgttggttttgccttcgatggtgacgccgaccgctgcctgtgcgtggacgagaagggtaatgtcatcactggcgaccatatcctgtatatctatggctgctatatgaaagagcgtggcaagctgctgaccaatactgtggttacgactgtcatgtccaactttggtctgtacaaagcgtttgatgagcaaggtatcggttacgccaagactgctgtgggcgacaagtacgtatacgagtacatggcgaagaacggctgtcgtatcggtggtgagcagagcggtcatatcatcttctccaaatatgccagcaccggcgatggtatcttaaccagtctgaagatgatggaagtcatgctggctaagaagaagccgatgagcgagttggcggcaccgctgaagatctatccgcaggtgttggagaatgttcgtgtgaccgataagaaggctgcacagaatgatcctgctgtgcaggaagctgtgtctaaggttgctgaggcactgggcgataccggccgtattctggttcgtgagtccggcactgagccggtcgttcgtgtgatggtggaagcacctgaccatgatacctgccagaagtatgttgatgaagtggtcaatgtgatctgcgaaaagggatataaggtataaagtcaatgacgactctggcagtgtccggagtcgttttgtgtaagtggaaaagtatcatagaaaaatgaataataggaggggcaaaggtgccgttgctttcacaggacgtcatttattgtgcgcttacaccgcaaacttctgcataggcgaagtaactgcagggcaggactgctacaaatagataagccttgctctgctcaccggttacagaatcgaaaatggggattgtatcgccagcccaatccacctcaatggcatctccaggcttgtgctggatacgcatggttgccttggtgacgcgggcccatttacggtatttctcgccgaactgcgtaaacatgtacggcttcttgccttcatcgtagcatttacggcggtactcctcccacaacaaggtcagggtaacgccgtgctttgccagctcacggtgaatgtacggatagtccggttcaatgtacaagcaaacactcttgtacttgtccgggaagagcatccgctccatcggcattggtaatgtcgtcatcaagaggccactggatgcctttttgactagccacctccaaaacagtacgaacagtattgtctgaacagtgtgctgaacttcgaattgtgcgttgactttgccccaatgaatgaagcctgagaatctcgcggtagtttaccatttttaacctccggtattttgatgtcacgtaaatctacgtggaaatcaagtataccgcaaagttctcaagatgtcgctttaggccaacaaagtgtcgctattttcccgatacggtgtcgctaaaactccgtgcaagcgccgctactgcaccgatttatgcataatgatataagattataaccgattaattctcgggcatatgcttattatgtacatgaacgctgggtttgtattcaccatttagcgatgactatttaggaatgtgtgtttttgaacgaaaggataaaaagagattttatatgataaatagtaaattggaattacagttttatatttgtgcagattctatgatgaatagaggctactttgaaaaatcgctgttaatgaaggtcgtttctcttattcgtccggattggattatggaatacttgacggcattacgtaaagtggagtactattctaatcgggggggggtgcagaggtactattataaatacaggtttcgcaaacttggtatgaaactaggatttactatttcggaaaatgtatttggctacggcttggttataccgcactatgggacaattgttgttggaagcgggaatcgagtaggcaattatgccgtgcttcatacaagcacttgcgttaccgcaggaaggaaaacaattggagatggattttatctgtctacaggagcaaaagttttaggtgacattgatctcggaaactatactacaataggagcaaatgccgtcgttaatcaatctgagggagaaaattgcctacttgtcggaattccggctaaaaagaagcgaaacgaagctccatggatgaaggatttatatcgagaaagatatgaagcctgtgaagaattaaggagaaagctgttcgaaaatatgtgagggaaaaatgtttatatttggtttggaatgttagcttacaatgcttaacccattcattaaattcgaaaactgcttctgcgtaaggtccatgactttttagaaattcctgataattaccaggaattctcggtaattcttgatacccttattatctcacaggcgccgttgctttcacaggacgtcatttattgtgcgcttaccgtcgttaccacggttatgtccaattttggcctgtataaggctttcgatgagaagggcatcggctacgccaagaccgctgtgggcgacaagtacgtctatgagtacatggctaagaacggctgccgcattggcggcgagcagagtggtcatatcatcttctccaaatatgccagcaccggtgacggcatcctgaccagtctgaagatgatggaggtcatgctggcgaagaagaagcctatgagtgagctggccgcaccgcttaagatctatccgcaggtgctggagaatatccgtgtaactgataagaaggctgctcagaatgatccggcagtgcaggaagcagtgtctaaagttgctgaggctctgggcgataccggccgtattctggtgcgtgagtccggcactgagccggtggttcgtgttatggtggaagcacctgaccacgatacatgccagaagtatgttgatgaagtggtcaacgtgatttgcgaaaagggatataaggcgtaaagtcaatgacgactctggcaattatccggagtcgttttgcgtaaaagggaaagtataatagattaaataacgggagggataaacctatgtgtggaatcgttggttttactggaaatcgacaggcagcaccgatcctgctggatggtctgtcaaaactggaatatagaggatatgactcagccggactggctgtccgtgacggagaaaatctggcacaagtcgtgaaagcgaagggacgcctgtccaatctgatcgagaaaacagatggcggcaaggcattaaaaggaacctgtggtattggccatactcgttgggctacccacggtgagccgagtcaaaccaatgcgcatccgcatgtttcaggtaattgcacccgttctggttcaggtacagtagagtctgaggttgttggcgtacataacggtatcatcgagaactatactgaactgaaagaaaagctgttgaagcatggctatacgttctatagtcagacggatactgaagtagtcatcaagctggtggactattattataaaaagtataacctcggcccaatcgatgccattgcaaagacgatggttcgtgttcgtggctcctacgctcttgagctgatgttccgcgactatccgggtgagatttgggtggcacgtaaggacagcccgatgatcattggtgttgcggatggcgaaacctatgtagcttcggatgtccctgcaattctgaaatacactcgcaatgtgtactacatcggcaatcttgagttcgcaaggctcgttccgggtgaggctcacttctacgatttgaacggtgatgaaatcgagaagcagacgacagagattaagtgggacgcagaggcggcggaaaagggcggctttgagcatttcatgatgaaagagatccatgaacagccgaaagctgttcaggatacccttaactctgtgatcaagaacggcgctatcgacctgtccagtgtggagatcaccgaggacgaaattaaaaactttgagcagatctatattgttgcctgtggctctgcatggcatgtgggcatggctgctcagtatgtgctggaagatatagcggatatcccagtgcgtgtggaactcgcatccgagttccgttatcggaagatgccgctcaatcagaaggcacttgtaatcgttgtcagccagtctggcgagacagcagatacattggctgcactgcgacttgcaaaagaaaaaggcataaccacaatggcaatcgtcaatgtggtaggcagcagtattgcccgtgaagcggacaaagtgttctacacccttgctggtccagaaatctctgttgcaacgaccaaggcatacagcgcacagctggcggccatgtactgtctggctgttcagtttgcaaaggtaagagaaaaaattacggaggagcagtacagctactatatttctgaactgctgactctcccagaaaagatgcagaaaactttggaagataaggagcgcatccagtggttcgcagcaaagtatgccaacgcacatgatgtgttcttcgtggggcgtggcattgattatgcagtctgcttggaaggcagtttgaaactgaaagaaatcagctacatccattccgaagcatacgctgcgggcgaactgaagcacggaaccattagtctaatcgagcggggaacactggtcatcggtgtgctgactcagagcgaactctacgaaaagacgattagcaatatgttagagtgcaagagccgtggtgcttatctgatggggctcactacttatggcaagtatgaaatcgaagatcaggtgaacttcactgtatatgttccgaaggtggatgagcacttcgttggtagtttggcagtgatcccgctgcagctgctggggtactatgtgtctgtagccaagggtctggatgtggataagccgagaaacctcgcaaagagtgtgacagtggaataagatgcaagaaccaataaaagtattagcaaaaatcctcacaaacatcctgactgctctctatgaaccgtttggattctcactccttctttccttcctagccatgtttttctatctatatgcctatgaatctatgggagccggaaaaggctggaagaatgccatagtgacatggtatcagaagttcaaggagagtgtgttctttcggaaactgttct

SEQ ID NO: 899 - DNA, 20563 bp, unidentified
  source 1..20563: mol_type = unassigned DNA
ttttattgcagcgctctcccggcggaggtgctggccgtcaagggacaaaagaaggtctccgggcgctcttcgaaccgtcacggcaccgagaatgtcatcaccgatggctccatcgtggcggtggccgagggccagtgcgccctcatcgtggagcagggcaaggtagtggatctctgcgccgaggcgggcgagtacacctacaacaccggcacccagccctctctgctgagcaagggtctggccaagaacatcgacgaggtctttgcggagatcggcaagcggttcagcttcggcggtcaggccgccaccgaccagcgcatctactacatcaacaccaaggagctgatgggcaacaagtacggcacccccagcccggtgcccttccgtgtggtggaccagcgggcaggcatcgacatcgacgtgagcatccggtgcttcggcgagtacagctaccgcatcgtcaaccccatcctgttttacaccaatgtctgcggaaatgtggaaaacgagtacacccgcgacgccctcgagggccagatgcgcaccgagatgatgacggcgctgcagcctgcgttcgcccgcatcagtgagatgggcatccgctattcgtccctgcccggccacaccgccgagctggccgaggccctgaatcaggagctttccgaaaagtggagcaagctgcgcggcatcgagatcgtctccctcggcgtgtccggcgtcaaggccagcgaggaagacgagcagatgatcaaggagctgcagcgcagcgccgccttcatggaccccacccgcgctgccgcccatatggtgggcgcacaggcctcggccatgcaggccgcggcgtcgaacacctccgccggcccggctatggcctttatggggatgaatcaggccgcagccgccgggggcatcaacacacaggccctctaccagatgggcgcacagcagcctgctcccgcccctgccgccccggcagcgggcagctggagctgctcctgcggacagaccggcaataccggcaagttctgcaccgcctgcggcaagccccgccccgaggcgggctgggtatgcagctgcggcacacacaacaccggcaaattctgctcggagtgcggcaggccccgcccggcggccaagtgcccgaactgcggctggacgcccgccgaccccacggacccgccgaagttctgccccgagtgcggcaagcccttcggcgcttgaaagggggcctgaacgatggcagaaaacaccacgaattaccagtgcccggcctgtaccggcccgctgcgcttcgacagcgccagcggcaagctctgctgtgattactgcggctcgacctacgatgtcgcacaggtagaggccctctacggcgagaagcaggcacaggcagacaaggccgccgaagcagccgaaaaggctgcggccaatggcccggtctggggagagcgggaggccggaggcctcagcagccgcacctgcacctcctgcggcgcagagctggtctgcggccccgagacagcagccaccacctgcccctactgcggcaaccccaccgtgctgggtggacagctttccggcaagctcaagccggagtacatcatccccttcaagatggacaggaagacggccatcgagaacctgaagaagtattataagggcaaggccttcctccccaaagccttcaaggacggaaaccacatcgaggagatccagggcgtctatgtgcccttctggctctacgatggccggatggaggcccggggcgcttacaaagccgagatcagcgagagccaccgcgagggcgactatgtcgtcaccaccaccaagcacttcgatgtggcccgcgtaggcgatgcggacttcgtccgggtgccggtggacggctccagcaagatgccggacacccacatggatgccatcgaacccttcgactacagcgccctcaagcccttctctacggcctacctgcccggctttctggccgaccggtatgacgaggacgacaagaagtgtgccgcccgcgctctgggccggatgaagcacagcgccgaagcggccctccacgggacgctgggcggctacaccagcatccagaccctctcggagcagatcgacccgcggaccctcgaaccgcactacgctctgctgccggtctggatgctccacacccgctggaaggagcaggacttcctctttgccatgaacggccagaccggcaagctcatcggcgacctgcccgtggataagggcagggtggccgcgtggtttgccggcatcagcatcccgctgatgatcctgacggccctgttcatgctgctgtgagagggggagacgggaatatgaaacattgcaaaaaactgtttgcccttctggcagcggccctgctctgcatggccctgaccctgccggccggggcagccgccccgctggtgcgggacgaatgcggcatcttcgacgccgacacgctggccgacctcgaagaggaagctgagagcgcctccgacggccatggcgtggatgtctatttcctcgtggtggacagcatcggcgacgcagaccagcgggaatacgccaagaattattacatctccaacggcctcggctatggcgatgagcagagcggcatccttttcctgctggccgtcggctcccgcaagtatgtcaccattacctacggcgggggcgtcaccgcctttaccgactaccgcatcgagcagcaggaggacgagatcgtcccgctgctctccgatgaggagtgggaggacgcggcagatacctacatcgagatgtgcgatgaggcgctggactactacgccgaccacggtgaacccatcgacatagacaatgacgtcgggctgggagacctgatggttgccatgctcgttcccctcggcatctcggccattatctgctttgtcctgtacagccagatgaagacggccaagcggaagacccgggccgatgagtatatgcccggcttcgccctgcgggtcaagcgcgaccgctacacccacaccacccgggagcgggtctatgacccgcccaagaaggagtcaagctcctccggcggctcgtccacagactccgacggcttcggcggctcgtcgggagggtcgttctgaaataacctctcagtctcgcattcgctcgacagctcccctaccgaggggagcctctggcgaagagatgaagctttccgccatgccaaggcctcccctcgatagggaaggtggcacgccgtcaggcgtgacggagaggttgaaaaaagcaccatgctgcgtcatgcggcatggtgctttttcgatctcggatttacagcatcttggaaaggaatgccttcaggcggggatgcttggggttggtgaacagctcctgcggcggctcatcctcctgaatgcggccctcgtcgatgaagatgacgcggttggagacttcgcgggcgaagcccatctcgtgggtgaccaccagcatggtgatgccggtatgggccagctctttcatcagctcgaggacctcgccgaccatctcggggtcgagggcgctggtcggctcgtcgaagaggatgacgtccgggtccatcgccagcgcacgggcgatggcgatgcgctgctgctggccgccggacaggctcttggggtaggcgttggccttgtcggccagacccacgcgggccagaagctcgtcggcgcgggcagagatggcctctttgtccttgagcttgaggaggctgggggccagctcgaggttcttcttgacggtcaggtgggggaagaggttgaagtgctggaacaccatgcccatcttctggcggacggcgtcgatgtggtcatcgtccacctccacgccctcaaacttgatgctgccgccggtggggatctccagccggttcagacagcgcaggaaggtggacttgccgcagcccgaggggccgatgaggcagaccacgtcgccgcggtagatgtcgatgtcgatgcccttcagcacgtcgagggtgggggtgggctgctttgcgcccttccgcttttcgccgccgtaggtcttggtcagaccgcggacttcaaggatcttatcggtcactttgtgccagcctcctctcaaactttgcgagcagccatgtgaacagcatcaccagcaccagatagatgagggcgacgccgcacagggggaacatggcctcgtaggtgcggttcatgatgccctgtgccgcatacagcagctccttgccgccgatgacggtgatgagggacgtatccttcagcagcatgatgaactcgttgccgagggcgggaagcacggcgcggatggcctgcgggatgatgatgaccaccatcgtggttatgtagttgaggccgaggctgcggccggcctccatctggccggggtcaacggccatcaggccgccgcggatgatctcggagacataggcgcccgagttgatgcccagcgccaacgcgccgaccatcgtgaagttgcggctgttggcaaagatgaccatgctcatgatgagcagctgcaccatcataggcgtgccgcggatgatggtggtgtacacctgacacaccgcgttgaagaagcccagcaccgggttcatgcggccggtgcgctgctggtcgtgggccacacgcaccagcgccaccacgctgcccagcgcgacgcccatcgccagcgcgatggctgtgaccagcagggtggtgcccacgccgttgatgtactggagccagcggtccttcaggatgaatgcctgataaaacttaaagaaaatgttctgcccgaagctgagcggcgtcccgctgttgagaagctctttcagcagctcgtattgtgcggccattcgcatcctcacctttctttttgtaaaaattttgtaaccggtggatttcaaaaaaggggaggagccttttcaggccgcctccccctgacgcggaaagaaacgcgctgattattcagcggtgatgtacttgtccacgatggactgcagggtgccgtctgccttcagctcttccagagcagcgttgacagcgtcttccagagcagtgttgcccttggccatgccgatggcgtagtcctcctcggcgtagctggtgtccagaaggaccagaccggggttggcagcgacgaactccttggcgggggcattgtcgataacgacagcgtccacctgaccgttgttcagagcctgcacagcggtcagaccatcgtcgtaagccacgactgcatcgtcgccgaagtcatcggagcagtagatgtagccagtggtgccgcgctgggtgccgatcatcttgccggccagatcgtcgggagaagcgatgtcagaaccctcgggcacgatgatggactggatgccggtagcgtagctgtcggagaagtccatgacgttcttgcgctcgtcggtgacggtgacgccagccatggcgatgtcggccttgccctgctggacgctcagaagagcagcgtcaaagtccatgtcgtcgatctgcagctcgaggcccaacttgtcggcgatggcctgagcggtatcgatatcaatgccctcaaatgcgcctgcatcggtggtcatctcgtacggagggaaggcggcgttggtggccatggtcagcttgccagcctcaacggtggtcagctcagcagcggcagcgctggtggaagcagcctcggaagaagcagccacagagcttgcagcggaagaagcggtggaggcagagccgccgcaggcggtcagagccagagcagcaatggtcaggccggaagcagcgagaaagctgcggcgagagatctttttcatattcaaacactcctctttatgtgcatatcatttgcagttctctgctgcgatgcgattcatcgaaaaatcagagagcgtgtttagtataggttgtacaatttgaaaagtcaagtgttgtgcaaaaattccatcaaattgaaaccgaattgcaaacaattatgcagaataaagccaaggagtgatgtatatatgcagaaagcaagccgcccgggaggaagagccatcacacgctccgcgccagctcctccctgctccgcttgggcacacagtagttgcggtcctcatccagataatatttgatgcccgtctcttcggtcatgggcacgaccttggcggtgtgggcggggtagccaagcgccaccatgaaggccagcttgtccggctcggcgatgcccaacagctcgctcagggcaggcttgttgatggcacccatgatgcagctgcccacgcccttgtcccacgcggcaagggtgatgttggccagcgcgatgccggtgtcggtgttgaggtcgccggggatggcgctgtcctgcacgacggccagatacatcaccggctgttcgtcggctttgggcgtgccctgctccggcgacagataaccggcccacttgaccagcgggtggactttcgccaccatctcagggctttgcaccaccaccagcttcacggcctgacggttcgcgccgcaggacgaaaggcgcaaagcctcgaccatatcctccaccacatcctgcggcactggcttctgggcgaagcggcggtaggtgcggcgggaggcaagcgtttccataatagacatcagcggacactcctttactatataagtacagcctgattatagcataggcgcaggcgcagtgcaaggaatttggatgcggcggcaaacacggataagacacgtctgcgaaatgaagaaatgagagaaaaatccataaaccggagataaaaaaacgatgatataatgttaatgaacactaacatactggaaaaatattgacaaaaagcaggagatggcctatcattagttatggcaaactaaccgccctctgtggagatgcgcagaggaaaacaagaagaagcaaaacaacttatgaggtgtaagaaaatgactaacatgactcgtcgtaatttcctgaagagcgctggtgtgatggctctggccgtggcagcagcgggtgttctctccggctgcgatagcagcagcaaaaaccctgtaatggcagatgtcaaggtggaatactggcgtgaggagagcgactggcttcaggacctgcacattggcaatggtgcgtatgatgagaccgtcagcgttgtgaagggcggcaaggtcaagaaggcgcagctgacgaagctgggagatgcttgcagcaagagcggtactacttactatgctgataaggttcctgatgaaattgaggtcgaatgggaaactgagaccccgacggttaagatttatctccatatgtaatagcttgattcgatgagaaaagcacccgcagcacgtttccatatcatggggaaacagcactgcgggtgctttttgttgttaccgcttatttgctcttccacctatgccccttcggcatgggcaggcccagcaccagtgcgatgcccacggccagcgcaacggcgaccttgaaggtagagatgccgttggccagcgagagggcgttttcgccttggatgaagtagtaggccgtgtagtagatgcctgcgccgggcacgagggggaagatgccggtgagcagaaagaccgttaccggcgttttgagcaggatggcgaagagccgggacaccagcgtcagcgggatgaccgcgatgagggaagccgccgcggcatcggctccgtacaagaccgccagctcatagacgaaccagcccgctgcgcccaccagtgcgcagcaggggagggtgcgccgggggcaggcgaagaggatggcgaagctcagcgtccccgccccggccagaaagaactgggccaccagctggccgatctgggcatttgtcagcatcatcataccaccgtcacccccgtcaggatcgaagtaaggctcagcacgagaccggtgccgatggcgatgctggctgcgatcagcagggcgtcgatcatccggatggtccccgagaggtagtcgccctgcacgaagtcccggatgcccatggtgaaagcgatgccgggggtcaggatcatcagggtgccgatgatggcatggctggactcgatgcccagcagggagcacccgacgatgcagaccagcgtgataagggccgccgccgagatcttgcggaagccgctggataacccctttttctcgcagagcagcagatagccgctgacgaggaagccggccacagccgccgccagcgccgagtgcaccgtgccgccgaagatgagggcgaagcaggctgcgccgctcatcccggccagaagctgggtccggcccttgggaaaggggatgcgccgggcctcggccagacggcactcggcctcgtccagcgtgacgcccccggcggcgatctgacgggaaagggcgttcaccgccaccacccggcccaagtgggtcgtccgcaccggtacgttccgcacctcggcgatctccgccgtgcctgcgctggcgaagatgccgttggtcagcacatagacgtggaactcccgcagatggaagctgcgggccatgatctccatcgtctgctccacccgaaagacctccgctccgttttccagcagcgtctcgcctgccgccatgatgaaatccatgatgcggcggcgctgctcgtcggtggggtataactctctgctgtccattccggccctccttgtcctgcctgtcagaggcggacctgttctctcctgctatactttatcacaattcccggagcttgcaaaggcgtcttttcacattttcgcacaacttccgtccttgccgtcgggggcgcagtgtgttacactgatactgactatgaaaatgtcgaaaacgacaggaggaaaatgactgtgaagcagagtctgagtttcgcgcgccgtctggcggcgctggtgctggcagcggtgatgctgtgtgtggctgtcccggcggcgtttgccgaggatgccgcgcccggggccaccaccatcggcggcgcaaacaccaccctcgtcccgggggaagaagaaaattgtctgagctggctcttcggctccaaagataagatcaccatgccctatctgaacatcaagggcaagggcctgcgcaggaacgtgaccctcgaccttgtggactgcctcgtgggcatcacctacaccgagcttggctccatcggcagctatgtcagcgccagcgcggcgcaggaggcgtggaaagcgcaggccgtggccatccactcctacctcgagtaccacaagcagtacggctcttcggccaacgccctcatctacaccccggtggaggacatccccgcctcggcccgctcggccatccgtaaggcggtggagtcggtgaaggatgaggtgctgacctacaacggcagcgtcatcgatgccgtctggtcggccagcgcgggctataacacccagaccggcgtttacggcacctgctccagcctcgatgcgtggggttcggatgtgccctacctcaagagcgtcgaaagcccctacgagcgccagtaccacgaaaagctccgccgcgtcatcggcaaggactatgactacaccgagtacaaggacagccgcaccggtgagccttaccagagcgccgataccacccacaaggacctcggcggcttcgtccagtacaacacgctggtgtccaacggccgcagctaccgctacatcaaccagttcgtgtcctcccgctactgcttcgatttcagcgcagatgctgcgggcgtgccctgcatgaactactatggcttcggccacggcgtgggcatgagccagtgcggcgcggtgggctatgccgccgaggaggggatgggctaccgcgacatcctcaagcactactactccggcgtttccatccggacggtgggcagcggcagctcttccggcggcggactgttcagctggctgcgccgcctgctcgggatgtaaaaaacgaaaggaattgcgcaaaatacttctcaaatgaggcgcgatttggtatactgtacacgtttgtacccgagaaacggctcttttgcgcttcacgtcccgaaatcgctgggacgatacgataaatgatattaggtggagagaacggaatgcagttggagaaggaaaagaaagaaaagcaggagcgggagcgctgccgtgcactggcgcagcgcatcgcagaggaggcggctgccgcctcggcggccctgctgggagagcagagccttctgctgaccaaggcgctgcgccgggcaggcgtagcggcagaggcgtgggcggaaggctcggaggcagagcttctggtcgtggtggacccggcctatgagacgctgccggagaagctgcccgcccgggtgctgctggtgagcagtgagagcaccgtcatggcgggctgggccgagcagctggcgcagagaggatatttccgcgacttcggctggcgcagcaagggccgcgcccagcagtccgccctcttctgcgcctcccagcccaccgggtataagatggcgcggggctatgagctggaaatggacatcctgcgcgaccggatggtgcgcgctgagcgcacctgcggcgaggaagccgagctgatcgcccggctgcgcagcgacctttccctcagccgcagccacgagcagcagctggaaaagacgctggccgaagtgaccggctcgaccttctggaagatgacatggcccatgcgctacgccgtcagcaagagccgccagctctggcacaccctgcccctcttcgtcctgctgcgggagctgcgccggggcgggatcgagggcgtgcgggagcaggcccgtgcccgccgcgagtatgccgccctcttcccgggcagggtcatgcgcgcggaccgcttcgcctcggcagagctgctggtgcatcaggcggaagatcagcccgcaggccccaagatcagcatcgtggtgcccctgtacaacaccccgctggacttccttgaggagctgctggactcggtcgtgaaccagacctaccggaactgggagctttgctgtgtggacgccggcaccgccccgggcgtgggggagatggtccggcagcgtgccgccgcagacccccgcatccgctaccagaagctggaaaagaacgagctgatccccggcaacaccaataagggcatcgagatggccaccggcgacttcatcgccctgctggaccacgacgacatcctccacccctgcgccctctggtatgccgccaaggtcatcgccgagcagggggccgacttcgtctacaccgacgaggcgaccttcgagggcaaggtggagaatgtggtgctctaccacttcaagcccgatttcatgctggacaacctccgctccaacaactatatctgccacctgaccctcttcagccgtcggctgatggacgccgcaggcggccccgagcggatggagtacaacggcagtcaggactacgagctgttcctccgcctgacggaaaaggcgaggaagatcgtccacatcccccatgccctctattactggcgctccagccccggcagcacggccagcgacatctccgccaagacctactgcatcgacgcgggcatcgcggccctcaaggcccattatgcccgctgcggcgtggccgtggacgatgtctccctcatcccgggtacgccgggctattacaagaccgactacaccatcgcccatccgggccgggtgagcatcctcatccccacctgcgatcatatccacgatctggagacctgtgtggagtccatttatgcccgcacgacctatccggatcttgagatcatcctcatcgaaaacaacagcaaggcccccgagaccttccgggcctacgagcggatgcagaaagaacaccccgacaccctcaaggtcgtcacgtgggagggcaagggcttcaattacagcgccctgaacaacttcggcgagaagttcgccaccggcgaatatctgctgcttctcaacaacgacactgaggtcatcacggccgcatggctggaagagatggtcatgtacgcccagcagaagcgggtgggctgcgtgggcgcaaagctgctctacccggacgataccatccagcacgccggtgtcggcttcggcatcggcggcgtggcgggccatctgcacaagtattatcccgccagctccgacggctatatgggacgactgaactatgtacaggacgtctacgccgacactgccgcctgcctgctcatccgcaaggagatctacgacgaggtgggtggtctggatgagagctatgccgtggccttcaacgatgtggacttctgcgtccgtgttcgtcaggcaggctacaccaacgtcttcactcccttcgcccagctctaccactacgagagcaagagccgcggcgtggaggacaaccccgaaaagcagaagcgctttcagggtgaggtgctgcgttttcaggcccgctggggcgacctgctggctgcaggcgacccctgcaccaaccccaacttcgacatccagcgcgaggatttcagcctgaagatcctgccgctggaataaacaaaagaggaacaacctctcagtctcgcttcgctcgccaaggccgggttgcggctcccagcatccgcggcgcttcgctcgcgtcttgctggccgctgccccaacaatgactccctgtttccgccactggcggcggtcgtcattgttgccccatcaaggggagcctttggcatggcggaaaggtctgagccataaaacaaggagcataaaacttggaactctctgcttgcatcgttgtttataacggctgcgacgaagccctccgggcggcgcagacggtgctgcaatacacccgccgccacccgctgaccctctatctggtggacaacgccagccccgacggcagcggtgcacggctggaagccgccgtccggagcggcgctctgagcaccctgccgggccagcgggtggaggtgcgctgccggaaggagaacggcggcttcggcaccggccacaacaccatcctgcccgagctgacgagcgattatcacttcatcctgaaccccgacatccagctcaccgccgacaccctcagcgatctggccgactggatggccgcccacccggatgctgtgatggcccggccggggctgtgcttcccggacggccgcacccagcatctgcccctgcggcgctgcgcccttcggccgatggtctaccgccagctgccgttcctgaaattctgggagaaatataaccgcgcctatctcatggaaggggaggacctgtcagcccccgtggagatcgagttctgcaccggcagcttctcagcggtgcggacggcagagttcaaggctgtgggcggctttgatgagcattacttcatgtatgtggaggatgcggacctgacccagaagatgcgcaccaagggaaaggcttatctcgtgccccagtacaccgccatccatgcatggcatcgtgcggcccaccgcagcctcaggccctttctgtggcagaccgggagcctgctgcggtacttctgcaaatgggggttcaagttctgagtccttgacaggcggcactgaaacgtctataataaaaacagcaaaggcgctggccatacaaacggctggttccttacctgttacatttcaaaaagaaaagtaaccgcttgggttggggaactgtgggcggttactttttctttttgtcatttctgccatcatcatgagagagtctccatacaatgtcgaacgtgacatggacgacatcgaccagcagcgccaacaagctgacgatgaaagccaaaagcgtgaacagctctacaagattcatgtggcattccctcccttcgccgaaagcgtcgggagtaaacttcaaaaagcgccctcccgatgcctgcttcgttccagagaactaagtatgctttgtcggtaagggatagccgcctgcgtttgattggacagcgccttaggaggacaaaatgcctcctgcaaagagaataacataaaacagcatggatagcaagagagcgcccgccacaaaatttttgaggcgggcgctctttccttgcttttttttcgatttgatagtagaataaggtgtaatactatcgcaagcctgcacggtgagcagagtgtattgcgcaacattgtttacagcggacgcagctccgctttgaatccatacagggcagggcggatacgccgccgtgccttgtacaagctgcacaacttttttatttcataatataaggagtgcacaaaatgaaaggtatcattctggccggcggtgccggcacccggctttatccgcttacgatggtcaccagcaagcagctgctgcccgtctacgacaagccgatgatctactatcctctgtccaccctcatgctggcgggcattcaggacatcctcatcatctctacccccaccgacacgccccgcttcgaggcgctgctgggcgatggcagccagtacggcatccatctgcaatataaggtccagccgtctccggacggtctggcgcaggcctttatcctcggcgaggagttcatcggcgacgactgctgcgccatgatcctcggcgacaacatcttctacggcaacggcttctccaagatcctgaagaccgccgtggccaacgcggagaacaagggccgctgcaccgtcttcggctactatgtgccggaccccgagcgtttcggcatcgtggagttcgacggaaacggcaaggtgctcagcgtcgaagaaaagccccagcaccccaagagcaactacgctatcaccggcctgtacttctacaacaaggaagtcgtccggatggcaaagcaggtcaagccctccgcccgcggcgagctggagatcacgaccctgaacgatatgtacctcaagcaggatgagctggacgtccagctgctgggccgtggctttgcatggctggacaccggtacgatggacagcctcgtggaggcagcggactttgtgcggatgatcgagaagcgtcagggcatcaagatcagcgcccccgaggagatcgcattcaagtacggctggatcgaccgcgacaccctgctggaaagcgccgagcgctacggcaagagtccctacggccagcacctcaagaatgtggctgacggcaaactgaagtattaagagaggcggtatccgcatgaaaatcattgttaccggctgcaaaggccagcttggcaccgagatcatcaagcagctccgggagggccgcagtgagcttggccctctccccgagaagctgatgaacgccacggtcattccggtggacctgctggagctggacatcaccaactataagatggtggacgacttcatccgccgccagcgcccggatgtcatcatcaactgcgccgccttcaccaacgtggacggctgcgaggtgaaccatgacaccgctttcaaggccaacgccatcggcccccgcaatctggcgcaggctgccaccaagaccggcgcacggctggtgcacgtctccaccgactatgtcttctccggccgtgagaacggcggcgtcccgcaggatgaggccaccatccccggccccatcagcgcctacggctccaccaagctcatgggtgagaagtacgtcgagcagttctgccaccgccacttcatcgtccgcaccgcatggctctacagctactatggcaagaacttcgtcaagaccatcgtgaacgcgggccgaaagttcggcaagctggaggtcgtcaacgaccagtgcggcaaccccaccaacgccgtcgatctggcccacgagatcttacagctctgcgtcacccacgagtacggcctgtaccactgcaccggcgagggcatctgctcctggtatgatttcgcgtctgagatcatccgtctgtccggcgtggacgccaccgtggccccctgcaccagcgaggagtacaagtcgaagcacccggacagcgccgaccgccccaagtggagcgctctggacaaccggatgctccgctgcaccgtcggcaacgatgtccgcgactggaaggacgcgctggcctgcttcttcgagcactgggacggcgacaacgggatgaaataatagccctctcaggccgcttcgcgtccagctctcccagagggagagccactggcgtgccgggcaggcaaagctggacgccggaggtctgattgggcagaagctgccgggccttgcgacagaggccaactgctgtaaatccagacagcggagcactgaggcttccgatagaaaaaactttgttcagtcagaaagggctttgccgacacgccagtggctccccctttgggggagctgtcaccgaaggtgactgagagggcaaggccgctgaaaaagaagagaacactgaggaatatatcattatgaaaaaatatcttatcaccggatgtgccggttttatcggttccaacttcgtgcattatatgctcaagaagtaccctgaaattttgctggtcaacctcgacaagctgacctatgccggcaaccttgagaacctgaaggacgttgagggcgacccccgccacgtctttgtgcagggcgacatctgcgacaaggagctggtcgagagcctgtttgcaaagtacgatttcgactatgtcatcaacttcgccgccgagagccatgttgaccgctccatcaagaaccccgaaattttcgtccagagtaacgtgatgggcaccgtcaacctgttgcagcgtgccaaggaggcttggtacgacgccgacgccaagacttggaaagagggcaagaagtatctgcaggtgtccaccgatgaggtctacggcgctctgggtgccgaaggcttcttcatggagaccaccccgctctgcccccacagcccctactcctcctccaaggccagcgccgatatgttcgttatggcattccacgacacctatggtatgcccatcaacatcacccgctgctccaacaactacggcccctaccagttccccgagaagctgatccccctgatgatcaacaacgtcaagcaccacaagcagctgcccgtctacggcgacggtatgcagatccgcgactggctgtatgtggaggatcactgcaaggccattgatatggtggcaaacggcggcaaggtcggcgaggtgtacaacgtgggcggccacaacgagcgccccaacatcttcatcgtcaagaccatcatcaaccagctgcatgaccgcctgaaagacgacggtatcagcgaggacctcatcaagcatgtcgccgaccgtctgggccacgaccgccgctacggcatcgaccccaccaagatcaagaacgatctgggctggtaccccgagactcccttcgagaagggcatcgtcctgaccatcgactggtacctcgaccacgaggagtggatggagcacatcaccagcggcaactaccagaaatactacgaggaaatgtacaagaataaataatctcttgtaaagttccaaaagcaaatgaaacgcccctgtccggaaaatctcccggacaggggcgtttttgagtatcagataaaagtgtcagagcaggtcggcggcgaggagcagaagcgctgcggcggctacaccgtccgagccatccttgtattcgccgatgggagtcgaactccaaccgaccccgcggtagatggtgccatccttatactcgccaatttcgcgggaatgcaggccgagaccggtgtagatcgtgccgttcttatactcgccgatagcgtccgagtgcaggccgcagccacgataaatcgtgccgtccttgtactcgccgacttcgctcgaactccagcctgtgccacggtaaaccgtgccatttttcgtctcgccaacacagtcggaactccaaccagttccgcgataaatcgttgccataagataacctcctcaagttttatttaattcatctaagagaatcttagcataaaaatttcgttcgtcttgaattgtagcggagcttttcatttcaccattacgatattcgttccgaagccccgtgtccaggaacagcctatacgaaaaaggaatgtcttcataatcatcttcagaaggcacatatctttttggaacaccaaaaccatcgcgaataaaatcggaagttctagttccgtaacgctttttataactttcaaagagtgagaaggtggagtcggttctgaaaaggctatgggaaatcgcattaaggttggcgcgctgcatttcatcttctttaatgtcagcatcgttcatacaacgaagatattcatcttgggtcatatttctgtgacgagaagggtcgaaatgaaatttataaattttcttgacataaaaatcttcatagtaatgatttagcaaaacacgaagatcgggattgtgaatatttgcggtgattgtaaaactaagaactgaaacgatattctttacctcgttatcatcaaactggacgagccttttcaaaagagcgggggaagtaaagctttgggacatttgtagaacgagattacgcaagtctctaacctgagtgaggttgttttggaattgttcggagttgagaatcgcgcgtctttttgagccgaaaaggtctaacatagaaagtcctcctgctgaatctcggatatattctgccactaactaaattgtatcataataaaactaacatcacaagcaagatgttagaaaaaatccaacaaaaatcgcggctctgttaggtacaatatgctaaaaggatggtgacggagcgtgtataaagatatagagtatgagaagtggtttccgcagcgattgacacagcttcgagcacagaagggcgtgtcggcccgcgacatgagcctgtccatcgggcagaatacaggctatatcaacagcattgaaaatgggaagaatttcccgacgatgaaaaacttcttctatatctgtgaatacctccacattacgccgcaggaattttttgaggacggcaacgctgacccggagacgatacgggggctggtggagaacctgaaaaagctggacggggagcaggtggatgccctgtcgaaaatcgtggatgggctggtacggtgatggatgcaaaaaggccgctgcgcgaaaaacgcagcggcctttgccgtagaagcttatgcggattttggcttatccagtgcttttatttcctcaatgggaagattcgtataccgggcgatcgtctcatacggaagtccatccgcaagcatcgactttgcgctttcaacagactgtgcgtggcgtgccttgcgtgccgcctcttcggcggcctccgctctcatctcttccattgctctgcacattgttgccactcccttcgtatcttctttaaaatagcgcaccctctgtgccagaatgggataactcatatcatccgggtctgtacaagagaaatcgtgcatcagcctgcccaacgccgtctcatctttgatttgagagttcacatagataatatgtgcttcatcgccaaaagactcgccggtttcctcaatgatgcggttgatgtgataaataggcaggctccgcttcaatacatcccgttccgtaataaaaatcacataggtttcattcagtgcgtcgtaggcgtcgcccgcttctgtcaggttcgcgtcgagcaagctgctgttgtaccgtgcacgcttggctcctgcacctcggtcgctgcgctgtacttcgatattgtagacctgattgctcttatcaatggccagaatgtccagccggacagaacggccctgtagattttttaggtcatgctgcccgtgaacctcttgtacgatcaagtcgtcccggttcaggatgatctggagcagaaattcagcgcaggtcttgtcctcaaaaaccttactcatgaagtcatcgtccatgaggcggaaattgcggatgtattgcagatccttctcgtgtttacgctcgaaatcgagctgcttttctttttcggcttctgccactggttcacctgctttctgcttcgggtctaaggtaagaataccataaaatcgttgtttttacaatagcggataaaaataacgggctgtccgtatagaacagtccgttatcataaaagattcgattcagtgcaagtttagccgaggctcacacccatccggcgggcgacggtgagcagctcgcagccttcggggacgttgcgggtcttgccggcgatgtcctcgaggcggttggcgatgacgcggttgttgaccatggcgacggtgacgccgtagcgctccatctccaccagtttggcggcgtagctgccgaactgggtggccagcacgcggtcgtaggcgctggggctgccgccgcgctgcatatggcccgggatgcagacgcgggtctccatgccggtcttcttctggacggcggcggcgatgcggttggtggcggtggcaccgtaaccggcctccgtgcgcttggccatccactccttccgcttcataccggcctcttcggtgttgatggcgccctcggccacggcgataatggagaagttggaacccttgcgggcgcggcgctcgacggcgctgcagacgcggtcgatgtcatagggcatctcgggcagcaggatgatgtccgcgccgccggcgatgccggagtagagggtcagccagccggccttgttgcccatgatctcgatgcacatgacgcggctgtggctgccggcggtggtgtggatgcggtcgatgacctcggtggcaatgtccacggc

SEQ ID NO: 900 - DNA, 21899 bp, unidentified
  source 1..21899: mol_type = unassigned DNA
tcagaacaacccggtaatgcggccttctgcgtccacatcaatatccatggcggcggggtgcttgggaaggccgggcatcgtcataatgctgccgcagatgacgaccacaaacccagcaccggcggaaaggcgcacttcgcgtacattcattttaaagccggtgggggcgccggtcagcttggcgttatcgctgaaagaatactgcgttttggcaatgcagacaggcagctcgccgtagcccatggcggccaggtcgtccagcatcttcttggcggcgggagtgtaggtcacgccgtcagcacggtagatttttttggcaactgcttcgatcttctccggcagagaagcgcccagatcgtaggtgtactggatgggctggggggcttccggcatgatggaaagaacggtctcggccagggctttgccgccctcgccgcccttggcgaacacttcggacagggcgcacttgacgcccgccttggcgcatacttcctcgattacggccatctcttccggcgtgtcggtggggaaagcgttgatggcaacgcagacgggcaggccaaagccgttcttgatgttgtcaatgtggcgctccaggttggccgcgcccttgcggacggcctccacgttaggcttgttcaaatccggcttggtaacgccgccgtgggatttcagcgcacggacggtggcaactagaaccaccgcagaggggtgcaggtccgccatgcggcacttgatatccaggaacttttcagcgcccaggtcggcaccaaagcctgcttcagtcacaacgtaatcggccagcttcaggctcagtttggtggcagtcacgctgttgcagccgtgggcaatgttggcaaagggaccgccgtggatgatggcggggttgttttccagcgtctggaccaggttggggtcaatggcatctttcagcaaagccgccattgcgcctgctgcgccgatctgccccgcagtgaccggctggccatcgtaagtataagcacacacaatgcggctcaggcggtctttcaggtcggccaggtcggtggccaggcagaagatcgccatgacctcgctggcaacggtgatgtcaaagccgtcctcacgcggggtgccgttcaccttgccgcccaggccgtccacaataaagcgcagctggcggtcattcatgtccatgcagcgcttccaggcgatgcggcgggggtcaatgttcagcgggttgccctgctggatggagttgtcgatcatggcagccaacaggttgtttgcggtgccaatggcgtgaatatcgccggtaaagtgcaggttgatatcttccatgggcacaacctgggcgtaaccgccgcccgcagcgccgccctttacaccgaacacgggcccaagggagggctcacgcaggcagagcatcgtctttttgcccatggcgttcagggcgtccgccaggccaacactggtggtggttttgccctcgccagcaggggtggggctgatggcggtcatcaggatcagcttgccgtctgggcggtcactgtggatcagcttgtggttgatcttggctttgtaacggccataaggaatcaggtcctcgtccgtaaggcccagtttttcagctactttggcaatgggcagcattttggctgcctgtgcaattacaatgtcgctcagcatgtggcattcctccgtttacaaaaaataaagggctgcgtacaccatacatcagtgtatgcagcccagacggtcggcttaatgcagggaatagcccgcttccccggtggtcatacccaccagattccgtcagtcagcggccctgcgttattgttactgtatcacaccggcacacagtttgtcaagccaatttttggcggatacaaacagaataaaaaacaacggatcagcgtttgctgctcttgcgccacaggcccatcttttcggcgtcggcaatcagctgctcacggaaatctgggtgggcaatgttgatcagggcttcggcacgctcccaggcggtcaggcccttcaggcgggcaacgccgtactcggtcaccagataatcggtgttggcgcgggtatcggtcacaacactgccggggtgcagcgtgggacggatgcggctttcgttttggccggtctttttgttaaagaaggtggaggacaggcagatgaagctcttgccacccttggaaagataggcgcccagcacaaagtccagctggccgcctgcaccggaaatggcacgggtgccgctgctttcggcgttcacctggccatacaggtcaacgtcaatggcgttgttgatggagataaagttatccaggctgctgatcacccgcacatcgttggtgtaatcaacgggtacagacatacactccggattgttatccaggtagtcgtacatcttttgggtgccggcaccgaacgcatagacctggcggccgttgtcaatgttcttgcagcggccggtaatgcggccggcctttgccatatctacaaaagagtccacatacatctcggtatgtacgcccaaatctttcaggtcgctctcggcaatcatggcgccgatggcgttgggcatgccgccgatgccaagctgcaggcaggcgccgttggggatgcggtccaccaccaggcgggcaacagcctggtcaacttcggtgggggcaccgccgccgcccagctggtcgatcggcgggttgtcaccctcgataatgccgtcaacctgggaaatgtgcaggcagttgtcgtagccgcccaggcagaccggcatgttcttgttcacttccacaaacaccttgtcggccttgcgggcagcatcggccagatggctggcgcaggggccgaggttgaagtagccgtggctatccatgggggcaaccacaaacaccgcaatgttcagcgggtcggggctttcgcggtagtagcgcggcagctcggagtagcgcaggggagaatagtaagcgtaaccggcggcaacggccttgcgctcaatgccgcccatatgccagctgttccagcagaagtgctctgcctgattttcaatcttgaagatttccggcacatggcacaggatgccgccgcggaatttaatcccgtgcagctccggcaggcgcttggccaaagcagcgtcaaagctgacaggggtgccgatggcccagccgtaatcgacccaatcgtcatccttgaccaaagcggcaacgcggtcggccgttgtcagtttctgtgcataaacagtgttaaaatccatttctacaaacagctcctttgttcattccgcaaaaactgcttatgcaatctttgcggatttgcttacctatttatataatgtttatggggcggtacgctgctctggcggtacgcacagtgcggatgcctgaaaatcagccgcccggtggcgtggcgcgctgcccgcagcgggggagccccgccggaagaatggcggcacagcaccacaaccattgatattattttaacattatattgacgcttgtcaaccaataaagttcattttttgcccccaaaacgtgcaaatcgggtggattttgtacattccactgaaacagtccagaaacttttgtcggatttttaacagataagccattgacaaaagcttaacaaaagtgtaaaactataagtgtgagccaagcggacccctgaaataggagccggagttcacttgcggcaccaggcaggcggtacggtctgcggcgggggttaaggcccgcccattaaacgcgcggcgcgcatggtgcttttatttccgcccaggactgttagatttttaacagctttggcactgcagaggaactaaagattatgcccattgcaatgtatcccggcagttttgaccccgttacacgcggccacctggatattatcaaacgcagttcccgcatgtttgataccctgatcgttgccgtgctaaacaacagcgccaaaaccccgttgtttaccgtgaaggaaagggaagagatgctgcgggaatgctgcaaggatatccccaatgtcaaggtgatgagctttgacggcctgacagtcaactttgcccaacagcagcacgccaccgtaatggtgcgggggctgcgcgccgtaacggattttgaaaacgagatccagctggcgcacaccaatcacgcgctctacccggggatcgaaaccgtgtttctgtcaacgtccctgaaatggagctacctttcctccaccattgtgcgggaggctgcccattacaaccacgatgtttccaagtttgttacccccaatgtggaagctgccctgaagaaaaaaatccgtgagggtaaagtttgaccccccaaaaaacgtgctttgtcgggtcgctaaggcctgtaaagatacaaaggattcccaaccgtctaaataagattcatatttttaggaggctgtttcttatgaagaaaatcgttatcgcatccgcatgccgtactgctatcggcaagttcggcggcaccctggccaatgttcctgctgtagagctgggctccatcgtcatcaaggaagccctgaaccgcgccaatgtcaagccggagcaggttgaccacgtttacatgggctgtgttatccaggctggtctgggccagaacgttgcacgccaggcttctctgaaagccggcctgcccatcgagacccccgctgtcaccgtcaacgttgtctgcggctctggcctgaactgtgtgaacatggctgcccagatgatcgaagcaggcgatgctgacatcgttgttgcaggtggtatggaaaacatggatatggctccgttcgctatgatgaagggccgttacggctaccgcatgggctaccccatgggcaagagcgagctggtggacaccatggtcaacgatgctctgtgggatgcaaccggctgcaacatgcacatgggcatgaccgccgagaatgtctgcaccaacgaaacctaccagaagaagtacggctacagccccatcacccgtgagatgctggatgagttctcttaccattctcaggagaaggcagccaaggctatcgctgacggcgctttcaaggatgagatcgttcccgttgtcatcaagggcaagaagggtgacaccgtgtttgataccgatgaaggcccccgcatgagctccatggaagttctgggcaagctgaagccctgcttcaagaaggatggtatcgttaccgctgcaaactcctccgccatcaacgatggcgcagctgctctggttatcatgagcgaagaaaaggccaaggagctgggtgttaagcctctggctacctgggttgccggtgcactggctggtgttgagccggaagtcatgggtctgggccccatcgccgcaaccaagaaggttatggcaaagaccggcctgacggttgatgatatggacctcatcgaagccaacgaagcattcgctgcacagtctgttgcagtcggccaggctctgcactttgaccaggcaaagctgaacgtcaacggcggcgccattgctctgggccatcccgttggcgcttccggcgctcgtatccttgtcaccctgctgtacgccatgaagcatcgcggcgcacacaagggcctggctaccctgtgcatcggcggcggcatgggctgcgccaccatcgtggaaatgtaatttacggaggaattgacaatgtcctttgttacgactgaaattcagggcgctgttgcgatcgtcaccattgaccgtcccaaagccctgaatgcactgaaccccgaagttctggctgacctgaaggccgcttttgaagccatcgaccagaacaccgtgcgctgcgttgttctgaccggtgcaggcgacaagagctttgttgccggtgctgatatcggctccatgtccaccatgaccaaggcagaaggcgaggccttcggtaagctgggcaatgatgtgttcctggagatcgaaagcttcccgctgcccgttatcgcagctgtcaacggctttgcccttggcggcggcaatgagctggccatgagctgcgatatccgcatctgctccgataacgccgtcttcggccagcccgaagttggcctgggcatcacccctggcttcggcggcacccagcgtctggcccgcctggttggcatgggcatggcaaagcagctggtttactctgctctgaacatcaaggcagacgaagccctgcgtatcggcctggtcaacgctgtttacccgcaggctgaattgatggagaacgtgatgaagctggcaaataagattgccaagaatgctcccatcgcagtccgccactgcaagaaggccatcaacgagggcatctccaagcccatcaacgaggctgttgcggttgaagaaaaactgtttggcgattgcttcgaaacccacgaccaggtggaaggcatgcagtgcttcctgagccgtgaaaagccgaaacccaaggcagtgtttaccaacaactgattttgaaagaaaaatgaataaggaataatgaataatggtggtggatcacagcgctgcgcgctgttcaaaaaggccgggcgctgtggctgcaccaaagttccttattaaaatcgtgccgcttgcggcacaccttcattcttcctttttctctattcattattatttttaacaggaggcacaactatgaaagttggcgttattggcgctggcactatgggccagggtattgctaaggcatttgcacagactgagggctttactgttgccctgtgtgatatcaagcaggaatgggccgataaaggcaaggataagatcgcagctggctatgcaaagctggttgccaagggcaagctggatcaggctgaagttgaccgccgtatggctgccatcaccgctggcctgaaagaagatctgtgcgctgactgcgacctgatcgttgaggctgcttttgaggatatgaaggtcaagcagaccacctttggcgagctggacaagatctgcaagccggagtgcgtctttgcttccaacacctcttctctgtccatcactgagatcggcaagggcctgacccgtcccctggttggtatgcacttcttcaaccccgctgaccgtatgaagctcatcgaggtcattgcaggcgtgaacacccccgccgagactgttgagaccatcaaaaagatcagcgttgagatcggcaagacccccgttcaggtcaacgaggctgctggctttgttgtcaaccgcatcctgatccccatgatcaacgaagctgctttcatcaagatggaaggcgtttctgacatcgccggcatcgacaccgctatgaagttgggtgccaaccatccgatgggccccctggagttgggtgacttcattggcctggatatctgcctggccatcatggacgttctgtacaaggagaccggcgacagcaagtaccgcgcctgcccgctgatccgcaagatggtccgcggcggcaacctgggctgcaagaccggcaagggcttctacgtttacaacgcagaccgcaccaagaccgctgttgatgccctgtaaaatttgaaacaatctctcctgacggagtgcaaaatctccgtcaggattgatttgttcagtcgcctgtaaacctgcccttgcggctttggctgcggggctgcgggcgcactgttagataaggaggataccgttatggattttactctgtccaagcagcaggctatggtacagaaaatgtacaaagaatttgctgagaacgaagtcaaaccccttgccaaaaaggttgacgcggaggaatatttccccaaagagaccgttgaaaagatggcaaagctgggcatgatgggcatttacttccccaaagaggtcggcggcgcaggcggcgatgtgctctcctacgtgatggctgttgaggaaatgagcaaggtttgcggcaccacaggtgttatcctgtccgcccatacctccctgtgtgctgctcctatctatgagaacggcactgcagaacagaaggcaaagtacctgcccaagctgtgcagcggcgaatggctgggtgctttcggcctgactgagcccggcgccggcaccgatgcacagggccagcagacctttgctgtggatgagggcgaccattggaagctgaacggctccaagatcttcatcaccaacgctggctatgctgatgtcttcattatcattgctgttaccggttttgtgaccgataagcgcggccgcaagcagaaggaaatctccgcgttcatcgtggagcgcaccgaccccggcttcaaggtcggcaagcccgaagataagatgggcattcgtggttcttccacctgcgagctgatcatggaagactgcatcatccccaaggatcgtctgctcggcgttaagggcaagggcttccagctggctatggctaccctggatggcggtcgtatcggcattgccgcacaggctctgggcatcgcagagggcgcaatcgacgagactgttgcctatgtcaaggagcgcaagcagtttggccgttctatcgctcagttccagaacacccagttcgagctggctgagatgaaagcccgcgttgacgctgccaagtacctggtttacaaggctggcctgaaaaagcagcaggccatgaacggcgctaaggtccgttacagcgttgaggctgccgaggctaagctgattgcagcccgcaccgccagcgatgttacccgccgctgcctgcagctgttcggcggttacggctacacccgtgactaccccatcgagcgcatgatgcgcgatgccaagatcaccgagatctacgaaggcaccagcgaagtgcagatgatggtcatctccggcgcgctgctgaagtaaggaggcaagacgtacaatgaaagctattgtttgtgtcaaacaggttcccgatacacagggcaaggttgctgtcaaggctgacggcaccatggaccgtgctgcgatggcaaccatcaccaaccccgacgacctgaacgccgttgaggctgccctgcagctgaaagatgagaccggctgcgaagttgttgttgttaccatgggcccgccgccggcagaaggcatgcttcgtgagctgattgcccgcggtgctgaccgcggcgtgctggtatctgcccgtgagttcggcggttccgatacctttgcaacttcccagatcctggcagctgccgttaacaagatcggcgttggcccggaggatatcgttttctgcggccgtcaggctatcgacggcgacactgcacaggttggcccgcagattgctgaaaagctgcacctgccccaggtcacctatgttaccgacatcaagaaggacggcaactccctgatcgtcaagcgccagcttgaagatggctatatggagctgaaggtgaacaccccctgcctgctgacctgcatcaaggagctgaacaccccgcgttacatgagcgtttccggcatttttgagtgctatgacaagcccgttgaagtgttcgactacaatgctctgaaggatgatcccctcattgagaccgacaccatcggcctgaagggctctccgacgaacgtttacaagtcttttgctcccccggtcaagggcgccggcatgatggttgaggatgctgcccagctggttggcatcctgaacgacaagcacctgatttgagagaggagagaagtacaatggctgaattcaatgcaatggacaccgccgccttcaagggcgtgtgggtattctgcgaacagcgcgaaggccaggtacaggccatcagctatcagctgctgagtgaaggccgcaagctggccaatgaccttggcgttgagctgtgcggcgttgtgatgggcagcgaggtcaacgaggactacctcaaggctctcggcggctacggcgcagaccgcgtttactatatcgacagccccctgctgaaggactacaccaccgatggctatgccaaggttctgtgtgacctcatcatggagaaaaagccggaaattatgctgattggcgctaccaacctgggccgtgaccttggcccccgctgcgcagcccgcctgcacaccggcctgactgctgactgcacccacttggatgtggatgtcgccaagtataaggacttcctgcgcaccacctccaccattgatgtggacaacaccaagtttgaagagaacaccaacctgaagatgacccgtcccgcattcggcggccacctgatggccaccatcatctgcccgcgcttccgcccgcagatgtccaccgtgcgccccggcgttatgcagacccagccgttcgacgaagctggtgctgccaaggttgttgttgagaaggttacccccgctctgactgctgacgatatccatgttgagatcctggacatcaagaagagcgctaagaagctggttgacctgatcggtgctgatgtggttgtttccgttggccgtggtatcagctctgaccccgaaaaaggcattgctctggctgaagagctggctggtgccctgggcggcgttgtcggtgcttcccgtgccgttaccgatgaaggctggctgtctgctgaccatcaggtcggccagaccggcaagaccgtgcatccccgcatctatgttgctctgggcatctccggtgccatccagcacgttgccggcatgcaggattccgagaccatcatcgccatcaacaagaatgagaatgcccccatcttcggcattgcttcctatggcatcgttggcgacctgtacaaggtcgttcccgaactgatcaaggagatcaaagccgccaaggcataatttctgctgctcatttaagggccgtacccgcaggggtgcggccctttttgctgcccggcggcagggcggggaagagcggcagataaatgttttgacgcagaattgcaattattttcacaaataccgtttacaaatgcaaaggaataggcaagaataaaaatgttgcgtcgtttgcggaaacctgcggcgcggcgggcatgcctgctaaaaaatcccgctgtgcgggcgcttttggtgtgccccggaaataacgttttgaaaacggaggtacatcatggaaaaactcttccacctgaaagagaaccacacggatgcaaaaaccgaagtcatggccggtatcacgaccttcatgacgatggcttacattcttgcggtcaaccccaacattctgtctgcagccggtatggatgcaaaggcagttctgattgccacttctctggcagcatttgtcggcaccatgctcatggcgctcctggcaaactacccctttgcactggcacccggcatgggcctgaacgcctactttgcctacaccgttgtgctctccatgggctacagctggcagatggctctgctggccgtctttgttgaaggcatcgtcttcatcgtgctgtccctgaccaatgtgcgcgaggccatcttcaacgccatccccctgacgctgaaatccgctgtcagcgtgggcattggcctgtttgttgcctttgtcggcctgcagaacgccaagctcatcgtcaacagcgattccaccctgctgacctaccagcacttcaagggcgaaaccttccacagcgttggcatcggtgctctgctgactctggtcggcgtgttgctgatcgccgttatgctcatcaagaacgtcaagggtgctatcctgtacggcattatcctgacctgggtgctgggcatcatctgcgaactgaccggcatctatgtgccggatgcagaagctggcatgtactctgtcatccccaccgcattcgtcagctttgacttcagctccctgggcaataccttcggccaggtgttcaacctggattttaccaactttaatattggcaacttcatcgttgttatgttcgctttcctctttgtcgacctgttcgataccctgggcaccctgattggtgttgcttccaaggccgatatgctggacgaagagggcaagttgccccgcatcaagggcgccctgctggctgatgctatcgcaaccagcgccggtgctgtgctgggtacttccaccaccactacctatgttgaaagtgcttccggcgttaccgagggcggccgcaccggtctgaccgcagctaccaccgctgtgctgttcctgctggccagcattttcagccccctgttcctgaccatcccttcctttgcaactgctccggccctgatcgttgttggtttctacatgatgggcgctgttgccaagatcaacttcgacgatatgactgatgccatcccggctttcctgaccatcctggtcatgccgctggcttacagcatctctgaaggcattgcaatcggcgttgtttcctggacgctgattaacctgctgtccggtaaggctaaggaaaagaagatcaccccgctgatgtatgttctgaccgtgctgttcatcctaaagtacatcttcctgtaattataagttacaacattgccaataaaatgcgcctgtgcttgctttgagcacaggcgcattttttatgcaaatttttgaaagagcggtaaaaaatcagccaacaaccgcgggggtagccagcagttcatccggaagttcgccgtaatcttcagcggattccttgctcatattgtaaccaaaagtcacaccaagggcgttggcggcatccgtcatcagggcgtctacatccaccagttcgctgtcagccataacgaacagaaccttgtcgtcaaaagtggcaacgctggccttgtcggccgccacgcagacccacttgtgcatgtcaatgccgtccagcatggcttcggcaatctcatcaccattggctttgtctttcaggcgcaccagtaccatgcagtaagcctggctgccgacacctggctcgctggttacagcggcatccaccttggtgatctgctcttcgttcaggccggtctggtaggggtaccactcggcgttggtcaggtccacggcggtcgtttccaccatcatcaggtcaaccgggtgtgcggcatagatctggtccacaatgccgctcagctcggcatccggttccggctggagcgcagcactgctgtcctccgggtcaacaccgaaaccgggatcgatctccatgtccgggtccggcttggtagccggggcgttcaggatgtcatccgggatggccgttggctccggcgctgtggaggaagacgcgccggaatttccgcacgcagcaaagctggcagccagcagggcagcagccagaaataatgtcagctttttcataaaaaatctcctttatcttgcgcggccctgtatgatgcagggctgcgtaggttgtgttgttggaatgcgcagcgggagcaagcagggggggcagggtgcggcaaatgccccactgtttttattttaccccattttccgtcaatatttcaccgggggtaaagggaacatcccattcgtccgtgggcagagcgggaaagaccagtgcctccgggcagagcaaaagcttggggccagtctgcccaaagcgggtaaggaaccggtcataatacccggctccgcggccaaggcgcaccccctgcttgtccacagcaaggcagggaatcaaggccagtgtgcccggctccaatgcggcgatagtgcggccgccgcagggctccagaatcccgtaccgccccggctgcaggtcgttcaggctggtgatttccacaagctccatccgcccgtcattgcccggcaggcagcgcggcacgcacaggcgcttgccgctgaccagggcctgctgcaaaatagcggtggtgtccggttcgtcccgcatggaaacaaagcagaacaccgtgcccgcctgccgccatgccggcagggcaaacagttgctgggtcatggcagcgccgatggcgtgcaggtccagatttttgcgcagtgccttggcctgcacgcgtgcctcagtttttgtcatcacgttcacctcgcatccattgtagcataaatttgcgggataggggagggccggccgcaatgtcattttctgttttacggtgccctcttacccaaataaacggatttttccgcccgtttgttacagcaagacggccatttattcaggaagtcttgcgcaaaaaccggaaacagaatataatgtatctgtattattatgttattctgagggcaaagcccgaacgataaaaggagaatatgaaaaaatgggtaagtttaattttattgaaaccgaaatccccggcgttgttgtgatcgaaccgaccgtgtttggcgatgaccgcggttattttatggagacgtatcagatcgacgatttcgccgccgccgggattgacaagccctttgtacaggataaccagagccgctccaccaagggcgtgctgcgcggcctgcatttccagaagaaccatacccagggcaagctggtgcgtgtgaccatgggcgaagtgtacgacgttgccgtggactgccgccccaacagcgaaacctttggcaagtgggtgggtgtgaccctttccgccgagaacaaaaagatgttctatatcccggaaggctttgcccatggctttctggtgctgtctgatgtggcggaattctgctataagtgtaccgacgtatatgatccgaccgcagagggcggcatcccctatgatgacccgaccgtcaacgttcagtggccggactgcggctgcgagcataagaccagcgccaaggacaaagagcacacgccctttgccgagcagaagtttgaatactttgaaaaatactgattcaggggaaccgatgtgcagaatttaaaaaactcgtttgcaagtttctggaaataccgctacctgctgcaaaacctcatcacgcgggattttaagctcaagtaccgccgcagcgtgctgggcgttgcctggagcgtgctcaacccgctgctgacctgccttgtcatgtgggctgtgttcggcgcgctgttcaaccagcgcggggatggcattgaggatttcccgctgtttttgatcattggccagttgatgttcaacttcttccgcgaatccaccagcatggcgatggaaagcgtgctgaaaaacggcccgctgctgcgcaaggtctatatccccaagtacatttttccactggaaaaatgctgctttgcgctggtcaacttctttttcagcctggtggcgctcttctttgtagcgctggttacctggtcccatatttcgctgcgcacggtgctgttggcggtgtatcccattgttatgctgttcgttttcagcctgggcgttgggctgatcctgtccacgatgtatgtctttgtgcgcgatatcatgcacatctgggaggtcttctgcaccctgctggtatacggcagtgccattttctatgaccccagtcagatggcatcctggatgcaggctgtcatcaacctgaaccccatctactggtacatcacggcggtgcgttcctgcgtgatgtggggcaccggcctgaccctgaatatggtgctgattcctttcctgtgttctgcgctcagtctggggatcggtgtgtatgtattcaaaaagaaccaggacaaatttgtcctgtatatgtaagggggctgcaagatgagcgaacaaaagcaacagcccattatttccatcgaccatgtttcgatgcgttttaacctggcaaaagaaaagcacgaaagcctgaaagaatattttgtggcccttttgcacggtggtgtgcgatttgatgaattcttcgccctttcggatgttagctttgacattatgccgggggatttttacggcttgatcggcctgaacggctccggcaaaagtacgctgctgaaagtgatttccggcgtctacaagcccagcgccggtaaagtgacggtgaacggcaccattgcgccgctgatcgaactgggtgccggttttgacatggatttgaccgcgcgggaaaacatctacctgaacggcacggtcctgggctatacccccaagtatattgattccaagtttgacgatattgtggagttcagcgagctgcaggaatttttggatgtgccgctgaaaaactattcctccggcatggtggcgcgcctggcctttgccgtggcaaccatgaccaagccggatatcctgattgcggatgagatcctttcggtcggtgatttcctgttccaggaaaagtgtgagaagcgcatggcggagctgctttccggcggcacgaccgtgattctggttagccattctattgagcagattgagcgcatgtgcaataaggtggcctggctggaccacggtcacctgcgccgccttggccccaccaaagaggtgacggcggaataccgcaagtttgaaaagaaggacgccatgaaggcggacaaagtggagggataaggcgcatggcacaggacacgaaccagaaccgcccggcggatgtggcccaggcggacagtgtgggcggcatggccaaacgcctgctgaaccccgcccatttgtcagaccttgcccgccgcggcgccgccaccctgaaagagcagggtgccgagcagctgtggcgcgatgtgaccttccgcgtggggctggcgttccaccatgattcctggcagcaccgggcagacctgcccctgcgccgggagctgaaagcccagcgcgccgagtacgcagacggcaagccgggaccggtggtaagcgttgtagtgccactgtacaacacgccggaaaagttctttggccagatgctggccagcgtgcaaaagcagacctacccccactggcagctggtgctggtggatgcttcggacgcagcccatgccgcgttcagcacccatgccagcaaggccgcagcaagggatccgcgcatcctgtataagaaagtggaaaacggcggcattgcggccaacaccacggcaggctttgcgctggcaacggggacgtatatcgccctgctggaccatgacgatgtgctgtaccccaacgcgctgtatgagagcgtgaaaaccctgcaaagccagggagccgagctggtgtacagcgatgagatcgtgctttcggcggatttgaaacagctgggcggctaccactttaagccggactttgcgccggactatctgcgcggggtcaacttcatcacccatctggcggtgttctcccgcgcattgctggaccgtgctggtgcatatgaatccagtgagtacgatggtgcacaggaccatgacctgatgctgcgcctgaccgaacagaccacgcgggataaaattgcccatatcaaaaaggtgctctatatctggcgcggccatgcgggttccaccgcggcaggcatggaggcgaagccctatgctctggcggccggtgtgcgcgcgattgatgcccagctcaagcggctgaacctgcccggcaaagccatgcaggtggagaacgcgcccggtgcgttccaggtgcggtacgaactgaccggccacccgctggtcagcgttatgatccccaacaaggaccatattgacgatttggaccgctgcctgaaaagcctgtacgccaacgcaggctatgataactttgaagtcctggtcattgaaaataactctgaacagcaggaaacattcgcctactacaaaaccatgccggagcgttaccccaacagccggatggtgacctatgtggggccgtttaacttttctgccgtcaacaaccttggtgcgcgctttgccaagggcgagcatctgctgctgctgaacaacgatatcgaggtactcagccatgattttctgcgggagctgctgagctattcccagcggccggatgtgggtgctgtgggcgcaaagctctattacccggatgataccatccagcatgcgggcgtgattatgggcatcaacggcagtgcaggccacagccacaagagctacccgcgcaaggctgtgggcgatttgtaccgccttgtcaccacgcaggactatatggccgtgacgggtgcctgcctgatgaccaaaacggagctgtaccgcgcggcgggcggcctggacgaagccaagttcgccgtggcctataacgatgtggattactgcctgaagctgtggcagaagggcctgctgaatgtgtacaccccccgtgccgaagcctaccattacgagagcaagagccgcggtctggacaccaccccggaaaacgccgcccgctatgcccgcgaaaaggcaaacttttacacgaagtatcacgaatatattgatcattatgacccgtactataacccgcatttcaacaacctgtttgaaaactttgggctgaaataaggcagggcagaggttaaaactatggtaaataagtttgatacccagtttttgatcgaaggcagcaacctggacgaggatgacatccgcgccgggatcatggccagcgccgagggcgactgcctgatcgtggtaggggatgaggaagtggtgaaagtgcattaccacaccgatactccctggaaggtgctggaatacgccgccagccagggcgatttgcacaagatcattgtagaaaacatggagcgccaggcaaacgggctggatgggtaaagtatatcaggatttttatgtttggtgaacggcatgcagtatcatacaagagtgccaaaccgtttgcagggatatgattacagcccaaatggtgcatctggaaaaatacgcggtcatgcccaaccatgtgcatttgctgcttttgttccagggcgacgggcgcgtaatgcgcgcccctacggtttccaacatcgtccaacaattaaagagctgcgtaaccaaacacctccatcaccccatctggcaaaaatccttccatgaccacgtcatccgtacccagacagattatgaaaccatctggctgtacatcgattccaacccccaaacagggcagacggactgcctgaacccgaaccggaacaaaccccaacaatctgacacccgaaaggacgtaacgttatgaaccagcaggccaagcgcatcaaagaactatttggctatgcccgtaccttgacgaaggaacagggcattggcaccatgtgcgtgcgcgcggtgggctttttcaaacggcgctttttcggcaagcgggcgcggtactggccgtccaacatggcgctggaagcccagcgcagcgaccccgcggcggaaaccttccccatcatttctattttaacgccgctgtacaatacgccgcaaaactttttaacagaatttctcgatagtgtggaaaaccagaccgcccacaactggcagctctgcctggcggatgcttcggacgatgcccacacctatgtgggggagctggtgcaaaagcacgtggcggccaacccgcgcattcgctatgtgaaaattgaaaacaagggcattgcggccaacaccaacgcggcggcccggctggcacagggggaatatctggctctggcagaccatgatgacatcctggccccgcacgctatctactgcatgggcaaagaactgcaaaaaacgggggccgatttcgcctacagcgatgaagcccttttccgcaaaagccccaaaaccgcccatgtggcccactttaagccggactatgcgccggaatacctgatggcctgcaactacatctgccacctggccgtgttccgcaaaagtctgtttgatgccatcggcggggagcgcccggagtgtgacggcgcacaggatcatgatctgttcctgcggctgatcgatgccatgcaggcgaaagacgccaacgccgcaccgctgcatatcccgcaggtgctgtattactggcgggttcatgcggcgtccacctccggcggcaccgaggccaagccctatgtggtaaaagccgcgcagaaagccgtggcggaccacctggcggcaaccggccgcagcggcagggtagaggagggcatcttccccggtacctgccatgtgcagtgggaactgccggagccggaaccgctggtgtccatcctgatccccaacaaggaccatgtagacgacctggaaaaatgtctgttcagcctgtactccaaaacgctgtacgaagcgtttgaagtgattgtcatcgaaaataactccaccgaccccgccacaaaggcttattatgaaaagctgccggaccgctatgccaactgccgcgtggtggcttacagcggcgggttcaatttcagccgcatcaataactttggccgcaagtttgccaacggcaagttcttactgctgctcaacaacgatattgaaattatcagcggaaactggctgacccagatggtggccgaagccagccagcccggcgtggcggcctgcggcgccatgctgtattacccggacgataccatccagcacgcgggcattatcaccggtttgggtgggtatgcgggccacagccacaagtaccacaagcgcggcggtagcgggtacatgttccgcctggccaccgtgcaggattattccgcctgcactgcggcctgcctgctggtacgcacatcggcttatgatgccgttggcgggttggatgaagcctttactgttgcattcaacgatgtggatttctgcctgcgcctgcgggaaaaaggctggcgtattgtgtggaccccctatgcggagctgtaccaccacgaaagcaaatcccgtggttcggacgaggaagaccccgccaaaaaggcccgctttgccaaggagcaggcccgcctgtatgaggtacacggtaagcagaatatcctgcatgacccctattacaacccgaacctgagcctggattatgaggatttccgtgaaagcggggatctgcgcaatctgaaaaacgtgaccctgtgacccatgccggaaaagcagggcaaaatctgtgcagtttttttgctgttacggcttgccacgctatgccggatatgctataatctaaatgttaccgcggcccggctttgggtgtatgccctgcatcagggagccttgattgccttttgctgcgccgtaggcaaatattataaagcgaggtattactactatgagccagaagtctgctatcgaaaaacagcccatcattgcaaaagccgccatccatgagggtgacaccggttctccggaagttcaggttgcgctgctgaccgcacgcatcaaccacctgactgagcacctgaagaccaacaagaacgacaaccacagccgtcgtggtctgttcaagatggtcggccgccgccgtaacctgctggcctatctgcagaagaaggacatcaaccgttaccgtgctctgatcgctgaactgggtctgcgcaagtaattcgcaaaacgggcagggcgctgtatgtgcgccctgcccattttctatatttcagcaggtgttccggcattcatttttattatgctctgccgctggcctgtaatcatattgaataaagttaggaccccgagggaggagaacggtactttggcactctagccaccgttgccagtccattatatcccactgccttttacaatgtaatgtgcggtacctttggtcagtgctgtaactcctaactccgccctcctacctcctaacttaatgtttttggccgcccgcatggtttgtgcagtaaatcgaacgccggagcaaaacaaccgttccgccgctggatttattgctcaaagcatggggctgcctgaaccgcatattcccaccaggtatcaaaaattatatcagaaggagaattactatggcactggaatttgcatcccgtaaggcaaccttccccaactaccgcaagtttgaaacaacttttgccggccgcccgtttgtggtggaaaccggcaagctctgcggccttgccaatggcagcgcaatgatccgctatggcgaaacctgcgtgctgtgcaatgttaccatgagcgaaaagccgcgtgaaggggtggatttcttccccctgagcgtggaatttgaagaaaagctgtacgccgccggccgcattcccggctcctttatgcgccgcgaaggccgccccggtgaacacgccatcctgtcctcccgcgtggttgaccgccccatccgcccgctgttccccaaggatatgcgcaacgatgtctgcgtgaccatgac

SEQ ID NO: 901 - DNA, 13463 bp, unidentified
  source 1..13463: mol_type = unassigned DNA
cgattacttctcatcctcatcccacgtgcggtcactgatgatgtagcgggggcggcgcttggtttccatgtagatcttgccgatgtactcgccgatcacgcccaggcagatcagctgtacgccggaaacaaagcagatgatgctggtcatgctggcccagccggatacggtggcacccagcagcgcttccacaatggcccagatcacgccgataaagctgatgagcgccacaataacgccaaacccggtaatgaaccggatgggcttgacggaaaggctggtgatgccgtcaaacgcaagggacagcattttggacaggggatagtggctttcacccgcaatgcgctcgtggcgctcgtaagcaacgctggtggatttaaagcccaccagcggcaccatgccgcgcaggaacaggttgacctccttgaaattggcaaactcatgcagcacgcgggcgctcatcaggcggtagtccgcgtggttgtaaacaacctcggcccccatggcgttcagcagcttgtagaagctttctgccgtaaagcgcttgaagaaggtatccgtatcgcgcttggagcgcacgccgtacacaacttcgcagccatcgttcacataggcatctaccatggcgttcatggcgttgatatcgtcctgaccgtcgcagtcaatggagatggtgatatcgcacttgtccttggcttccatcaaaccggccagcactgcgttctggtgaccgcggttgcggctctggctgatgccgatgtagtgcttgtcgctcttggccaggtcgcagatgatggaccaggttttgtccttggagccatcgttgacaaacagcacgcggctgtcatcgctgattttaccggcggcaactaggtcggtgatctttttcaaaaacagcttgctggtaatgggcagaacctcctgctcgttatagcaggggatcacgatgtacagaatcggattttcgcgggtagccttcatggtttacagcacctcttttttgctttttctgctgcgccgcccggccagcaggtaaattgccgtcagcagaatgctaatggcgctgaccccgatcccgcaccagagcggggtgggggaatagtggaaacgaatacagtttttaccggcattcaccttgacggccatcaggccgttgatgttcaggatctctgcagattcgccgttgaccgtggcgctccacgccttgtcatagggaacactgaaaaatgcgtactgctcgctgccggatgtgatttcggaataaaaatagtctgtgccataatcaaacacatcggtgcaggcttcgcggcgcttgtccatgtcggcatacttgttttcctggctgatcttaccatccagcgcggcatcatagtggcgcagtatggtggaaaccgtggcttcatcctcgtttgccaccacaagggtctttaacatggagtgggcgcgctcggcggggtcaatctcgtcaaactcactgcgggtcatgtaggtatcatagcagaagccgataggcagggcgtgggaatcctgatagacgttgatctgctcgtgaccgttggaaaaactggtgtagatttcatccggccagtcggagttgttgcggatataatacccaacggaaagcagctcgttggtgccctccggcccggcaggggtaatggcgtggcgctcgtcccccagggcatcatacagtgtaaagatggagggggaaagcgtgctcaaaaaggaggtacggtccggcaggtaagccgccatgccgcggttggaatacggctcccagaaataatagcggtagggcagggcatcaggcaggccgtcgccgctgtggataacgtcaccataaatttctgtggtggtcaggccgatcgtctgggtgtaggcacgctgataggtgcccacggtaaaaccggtggtcagtgcagcaaccagagcagtgcaggccgtcagggcagccatggggcggcgcaggcgcagccgccgcaccccgcccagggcagcaaacagcagaaccacgccgccgatggcaatcaatgtcaacacaaccagccagtatttgcggtacactatggtatcgcgcttgacgtacagatacagcgtgatagcggcgatgactgcagccgaaataccgcagcccgcacgccaagggtagtcctgcagatggtccagcaccttgatggtggccagcaccagcaggaacaccagcatgtaataccagcggcggtacggctcgctggtgaacatgacgaacagactgttgctgaccgggctggctgctacaaggaacagccccaccagcagcacatgcagccagtcccacttccagcgcagcagataagccagaaccaggcagacgcctgccaagggcaggtacgccgcgatggaataccagttatcatgcaccacagcggaaaaattgaacatattctccgccgggaagaagagcgcccgcagcatttgcaggtaattgggccagtcaaaggtcagttggctcaagttgatgtgatccgatacgcggggattattgagcaccgccgcaatggaggggatgaacagtacccccgccatgccgacgcccagacagccttccaggatgcaggccggaattttgcgggcatttttgcgcagatccgccccggggcgtgcgtcctcgccgccaaaaagataccgcgtaatatagtaaaacaccaggaagaaaacttccccgataaagaagtaatagttgaccagcgcgttgatggtaacggcaaacaggaacggagcttttttgccctcctgcatgcgtttgtccagccccagcatcaaaagcgggaacagggcaatcacatcatggaagtgatagaacaccacgttgatgcaggaaaaaccggaaaatgcatacaacacactgccaagcagggcgcttttctcgctggcactgcggcggaagtaggcaaacgaggtcagcccggcaacagcatatttgagcatatagatccagccgaccagatagggaaacgcgctggcagggaagaggaagctcagccagaaaaatgggctgccaagggtgtaaaagctgaacgaggatacaaagtccgaaccaatatcaatgcaccagttccacagcacctcgccgcttttgatggcgttgttgcacagcatgttgtaggagagctgttctgcgtcaaaatccgccgcaaccaacagcaggccgccgtcccgtatcatgtagggcagcagtgcagccgcggcaatggcaaagttcagcacaaaagccagcagcagccaccggcgcgggaaacggttttgcagtgtttgtttcatgtagcagcctcgcggcatcagccctgaccgttagaaagttcgatcccgcgggtgggcatgtttgccatattgttcagggtagagttgtatttttcacccagggattccatagcccagtcagtgcagtccataaaggtattgtcaaaaatatcattcatgaacgcatcttcgcccataaacaccccggcgtaatgcccgccggaaatggtgttgcgggcaatgatgttctcatagcagggggtgaaatccaggccctgcacggcttcgtccgcgttcaggtcagtgctgagctcaataccaaagaagtggaaggtatcgctggcaccccggttgttgtcaatgatctggttgcacagaatggtgttgctgaacgccgagcgcacagccttgatgccggaaccgtaattgtcccgcacaatgttgccgtaaatggtgttgtaggcggtgttatccagcgagatgccgggcagcttggcgggggaggaaccatccgccatgcggccctgatccagaataaagtcagcttccagatcctcatcactcatgcggttgcggccgccgttctggcggatctcacatccggtaatgtagttgccgaaggagccgtaatccaggcacatgccctctttttcgttcttgtagatcgtgttctctacataatagttcaggtagccgctttccgaataaatgccggaggaatggttctgcgcaaccgtgttgccgcgcacaaccagctgatggggagactgtaaaatatcgtacagcatttcatccgggaacggattgtaggcggtctcaatgtcctcaatgggcatggagcagagcaccagcccggcggtcaggttgcgggcaccagagttattttcaatgcggttgccctcgatcacgccattgctgatctcgccgttcaggaagatggcaccattctggttttcatggatgctgttattgaccagtgcaaagccggtgttctcccccataacgcaaaggcccttgagggaaacattgctgatgtcaaggtcagccagatagaaactgctggaattcttgacatacacaccgtaattgcacccgccgttgatgacaaagccggtcacggcggtattttccgcctggtccagaacaatggctttgtccagcgtttcattgccgggggtcagcactgcgccgttgccgtgcaggatcgtaccagtgggtaccaccagggtggcatccatcaccagagcaggggagatgacctccaccgtgctgccggggttggctgtcagaaagtcattcagttctgccaggctggaaccggtaaaattcacagcctgggcggtttcggcggtggccaggggagccagccgggtcatgacagagttgtacaggtttttccagttggcctccggggtatcaaaggtggcagggtcaataccgagggtctgaatgcgctggatgacctgcaaaggggcaatcaggctttcggtgtcggactgggtcatccgctccaaagcgggcagggcatagcgctcggtcaggctctggctgtcggtatccagcagggaaacatattcctctgcgccgggatccgcaaaatccacaacctgcccggtaccggccagcacgcagctgatgggctccggctcagcggtagcctgtggttctgcgctgggagccaggctgaaaatcacatgcggagcaggggtcagcttgaccccgaccacgccgatcacggtggcagcagtaatgcccgcaatggtaagaacaaacgaatttgccttttttttggccataagtgtaagattcctttccagggaaaaccggggataggcccggtaaaattacttgtccaggttcagatactttttccagaagtccagactgcgcacttcgctgcagcgctcgcggtagctctgggcggcagcgtcaaactgggcgtcgatctctttcatgcaggctttcatctcgcgcacgcaacggctgtattcttccttgctgcgctcggtcacaaagcctttctgggagttggaatcatagttcagcaccttctgcacgcggtaagcattgtaggcggtcatgtgcatcatgctcacaacggtgttttcgcgggtggggggcaccagccagccgttgcgggtcagcttgaccttgaggtttttcagcttgcccttgtttttttcttcctctttggtggcgtacaggtagcgggaataatcaaacggaacatccagctggtccaccggctgggccttgtagccatatgccataatctctttgtgcagggcttcggcatcggtctgttccagccagtcaatgcctttcaaaaagtcgcgcacgccgcggatcagcaggtcagcattcttatagcggtagcggttcacttcgcccatcacctggctgcgcaggtcggctttcagggcgttggcatcatagccggggcagtgcatgctgttgtcaatgcactggttgcgcaggatgtagtagtacatcgaggaagaatacttgctctcaaacggctcatgccatacgcagatgccgttcagggtgaccaggcgtttgcagttgcgtaggccgtattcaatgtcatcgccgcggataaagatgggcatgggcaggttgtccggccgcacaacggcaatggggatgcagcagtaccaccaggcgttatactcatggcgttcttccagctcattggcaacgcacaggtcaaccttggtcagatcaaagttggctttgtggctgatcaactggccctggttccaggcggcgccgttttctacctgaatgttggggcggtccagccgcagcatggcaccgccgacaaatacatccgcatattccggcttgcgcaggctcagcagggtgtaggtgcgcagcagcacatcggtatccagcacaatgtcatcatccatgaccagtacatgggtaacgcctgcgccattttcgttggctttcaggatctcgatcatgccgcgggtaaagccgccggcaccgcccacattggcgttgggcacaacatgcacggtatcgctgttcagcttatcgtaatccagcgtctggccgttatcggaaacaaacacttccaggtggttgtgcagcgggctggcggcgttttccaaaatatcgctgcgcatgcgggcaatgttgcccataacgaacggctcccggcggaaggtgcagatatccacgccgattttgacgggctgcacatccttttcagcggcatcgcactcataagcgccgccgcaataggcggcattgccgctcagggcctgcagctcaaaaaacagcatgccgtcagcgcccttgggaaaatcgaagcagaattcctgcacggaatccgcctgcactactttttcggccagcacggtgcgcacgctctggctgttgatgaaatggcggctgcacagcacaacgcgcagcttgccgctcagtttcagccgcagcgaaaaattctgcgcggcggtgtagcggcgccatttgtctgcgctgacgctgttaaagtaggtatcaaagcagacgcgttcgccctgctcaatgcgcaggatatccccctcatcgcggaagctgggggctttcatacggtaatacagttggtcctcggtgcatatgcccacgcggggccaaagcagcttttgcagcagcatacggtattctcctttcactttttgccttatcatatccggcaaagtattcaagtatccggcacagcattataaaatgccgccgttggattgttttccgcgcgcccatgcgctcaatgtgcggtagggcaggtaacgcccggcccgcagcagacgggtgtttttgttggtcatcatggcagcgatgtgtgggtaagtctggcacagcatctcgtcataccggcgcagggccaggccggtttcacggtcggggggaaagcgcaggtacagctcaatcaggtactgcgccacatcccgcgcccgctgcaccagcagcaggtcccgcccggcgggggcaggctgtgcggccagcggttcggcaacatccaacagaatgcgcgctacgcggatgtaatcctgcgtgtgggcgcggtagctggccatgctcacgctctggccatcccgccccaggcggtactggtacagaaccaccggcacaaagcagatggtctgcgccgcagccatgccaacaaacgtatagcccatatccgtgtagctgcaatgctccggcatagggcgccatgcggcgcgcagagttttggtgcagagggtcagcgcgtgcatctccatgcacaaatcaggtgtggcctgctgcacttcacccacagcatacacacggtttgtatcaaatttgcagcagacatcaaaggcctttccgctgccgttttcctgcacggtgcggtagttggtgtataccgcatccgccgtgcagttttgcaggcggcgcaaaagggtctgcaaagcattggtgtcaaaccagtcatcgcagtccagcgtgcgaaagtaccgcccggaggccagctctaccgcggtattcagcgtggagccgtacccgccgttcaccttgctcaccagccggaaactgccggggtgtgcctgcacaaaggcctgcgccagcgcggcggtgccatcggtggagccatcatcaataatgatcacatccagcagcgcctgcaggctttcatccgccaccaggcaggattcaagcgctttttgcagcgtggcagcgccgttataggcggcaaccgaaaccgtcagcagcttttccatcaggtttcaccggcctccatagcgcgcacatagtccgcgcagacttcacgcgatggcccatccccgcgcagaacaccgtgatccagccagatggagcgctggcacagctgctgcacctggttgatatcatggctgacgaacagcagcgtggtgccgttggaaagcatctcttccatgcggcggtggcatttctgctggaacataaaatcgccaacggccagcacttcgtcacaaaccagaatgtcggcctgtacttcagtggcaatggaaaagcccaaacgagcgatcatgccgctggaaaagtttttgaccggaacatccacaaaatctttcagctccgaaaattcaatgatgcggtcaaaatgcgccatcatatagtcccggtcgtggccaagcaccgcgccgttcaggaaaatgttttcccgcgcggtcagatccatgtcaaaaccggcgcccagctcgatcatgggggcaatttcgccgttgacggcaacgctgccgccggaggggtacatcacgccggaaatcactttcagcatggtgcttttgccgctgccgttgcgcccgatcagcgccagggattcgccgcgcttcatgctgaaagaaacatgtttcagtgcgtaaaattcgttaaaaaacagcttatgggtcagcagttttacggtgtattctttcagggtctcagttttttcctgcgcaaggttaaagcgcatggaaacgtcattgactttaataatctcgtccatacgttacctcacgtcagatatacaggataaagttcttttgcagcttgcggaacaccaacaggccaatagccatagaggcaacggcacaaaaaatgcaggcaatccaggtgttggggccgggaatgttgccgtacatcatcaggttgcggaacaggttgatgtagtggtacagcgggttcagcttcatcagtttctgcagggtttccggcagggcggtgatggggtagaacagcggggtggcgtacatccaacccatggtaaggatactgtacaggtgcatcatatcacggaaatacaccgccagcgcggaaagcagcagccccagcccgcagctgaaaaagaagagcagcaccagcggcagccagctcaaaaagatggtccaatagaaggtggcacgggtaaagatcatgaccagcagaaccgcaccaaagctgaacagcatggtgacaaagcgggaaaccgcctggctgatggggaagatgaacttgggaatgtacacctttttgatcagcggggcgttctggataacagaagtcaggcccatgctggtggtctcattgaaaaaggtaaacagggtgttgccgcagatcaggtaaagcgggaagtttgggatatcgttgcggaacatgtacgaaaagatgatgctttgcagcagcatcatcagcagcgggttcaaaatgctccagatgtaacccagaaagctgcggcggtatttgactttcagatcgcggctgacaagttcatggatcagcggttggtattttttcaggtgggtccaggcgcgctgcgcggagacctgcattgtttcggccatgtttggctccctccagatttatggcccgcataaaacgtcagaacgctgttttgtgcggcacttgtatcaacaccccgcgcggcagccaccgccagggcacagtttctactattatacaataaaagacattaaaatgcaattcgaaccgggcagcaaaaaatcatgggtgtgcgatgttttttgccgcccggtaccgccctttttgtgcaacagtgaaaaggaacgcaaaatatgagcgcagtttgtgtaaaaatcgttgaaaccgggacgaaaatacggtacaataaatatgacataacaaaccctgcggcgggccatgacctggttttgcccgtggggccagaaaagagaggtagatgttatggaacattttaaccccctgctcctgcataacgacagcccggctaaatttattacgattggtgaggtcatgctgcgcctgaccccgccgaactatgaaaagatccgtatggcttccaactttgaagccagctatggaggcagcgaggccaacattgccctggctcttgccaacctgggtgtggacagcacgtttttcagcgtggtgcccaacaactctttgggcaaaagtgcggtgcgctggctgcgctccaatgatgtgcactgtaccccgatgatcctttccaccccggaggaaaccccgacccaccgtctgggcacctattacctggaaaccggttatggcatccgccccagcaaggttacttacgaccgcaagcactccgcttttacggagtatgacctttccaaagtgaatctggacgccctgctggacggctttgactggctgcatctttccggcattaccccggctttgggccagaactgcgccgattttgtgatggcctgcctgaaaaaagccaaggaaaagggcctgaccgtcagctttgacggcaacttccgctccaccctgtggacttgggaagaagcccgtgactactgcaccaagtgcctgccctatgtggatgttctgtttggcattgagccttaccacctgtggaaagacgatgccgaccacgcccagggcgactggaaagacggcgtgcccctacagcccagctatgaacagcaggatgagatcttccagcgctttgtggagcgttaccccaatatcaagtgcattgcccgccatgtgcgttatgcccattccggctccgagaacagcctgaaagcctttatgtggtatgaggaccatacctttgaaagcaagctgtttacctttaatattctggaccgtgtaggcggcggtgatgcatttgccagcggcctgatttacgccatgctgcacaactacaagccgatggatatggtcaactttgcggtggcaagctccgccatcaagcacaccatccatggcgatgccaacatcaccgatgatgtttccaccatccgcaacctgatggacatgaattacgatatcaagcgctgagaataagtttgttttcagcagtgccccaaaacggtgcagcaggctgcggctttgctgcaccgtttttgtatgggggtaagattggtttagaaccgtttaagaatgtacaaaccttgcatcccgtgttataataatgccgaatcagtaaatgaaaaaggtgggtagattatggaacaaaacaccgttcaaaaaccggattgcgccgccattacggcgcaggcacgccaggcagcggaagaactgctggcggctgcacacctgcgcgccggggatatttttgtggtcggctgctcttccagcgagatcgttggcgggcatattggcaaggacagcagcatggaagccgccgcggctgtgctggcgggtattctgccggtgctcaaagcgcagggcgtctatctggcggctcagtgctgcgaacacctgaatcgcgccattgtcatcgagcaggaagctgccgaaaagtatggttatgaacaggtgaacgccgtgccgcagccccatgcgggcggcagctgggcaaccaactgctggcaggcgtttgaacatccggttctggtggaggaagtgcgtgccgctgccggaattgatatcggcggtacgctgattggcatgcacttaaagcgcgtggccgtgccggtgcgcctgaccatcaagcagatcggcgctgcgcccatcatctgcgcccgcacccgccccaaatacatcggcggcagccgtgccgtttaccaggagatgtgaaccatgctgacacaggaacaactgacaatgatggccgaaaatgtggcccgcatccgtgaaaatatggccgccgccgcccgtgaagccggccgcgacccggcagatattctgctgtgcgccgcctgcaagacccgcaccgtggaagaagtgattgccagcgccgctctgcccattgacctgtttggcgaaaaccatgtgcaggaactggtggaaaagaccgacgccaacgcttattgcggtaagccggggcattttatcggccatttgcagaccaacaaggtcaacaaagtggtgggccgtgctgctttgattgaaagcgtggacagcgagcatttgctgcaaaaggtggagcgcgccgctgccgccgcaaacctgacccaggaaattttgatcgagatcaacatcggcggggaagaaagcaagtctggcgtttctgccgaaagcctgtggcccctgctggatatggcagccgcacagccgcatatccgcctgcgcggcctgatggccatcccgccggcagctgcaaccccggatgagacccgcgcgttctttgcccaaatgtgggaactgctggcaaaagctgctgaccgccattatgagaacgccaaaatggatatcctttccatgggcatgagcggggattaccccgatgccatccgcgagggtgccaccattgtgcgcatcggcaccgccatttacggcgcacgcgattacagcaaaaagccataaggcattccaggaacccatacctgcacgttgacagctgcaaggtgaataggtaaagcaacagcccggaaccaccgcaaatgcaggcggcagttccgggctgttttgttaagcggcggtgggggcgtgggcctcaaaagtctccaccggagacttttgtgcgcggcttagccgtgccgccctgttcgccccccgtgaccatgccaaaaaaagaccccaaaaagctctgcgccttttggggttttatatcagtgccggtggtgggggtcgaacccacacggtgtcaccaccaacggattttgagtcggcccaagtgagaagaacttggtggattttttaggaatttcaaggaacttatttcctgccctttttagtgaaaaagcacctatccacgatacaatttttgattttcggacgtacttacgattggaaatctggcagaccaacgtagttgagaaatcactctcgctttgtggacaatctttcaaaaatggcagactaaaaaccaccgcattcggaaagtagaggcacataaaaaacggcagtacccaatagcggacatttttctactatctaacggtttggcgacccgctattattcaaaaactgtcattctgccactttgttacacttgtcaaaactatccaaggggaaactgtatctttttataggaatgggctgcggcgcgttcctctcccccacaccccctctccagctggctgaagaagcagccaactgaaaaagagaatatcggctcttgtaagcatcttacctgtcacacaggcaaggtgcttttttatttcaaaaatcggaggtcatcatgggcaaatatcagaaaaatatcgaagctgcgcggcgtatcagcgtgatgcagtatcttcaagcctatcaccccggcgaactggttcgcaaaacggacaaggagtattgcaccaagacgcacagcagccttgttatcacgcccgcaaatg

SEQ ID NO: 902 - DNA, 7797 bp, unidentified
  source 1..7797: mol_type = unassigned DNA
ttaaaactccgggtcatccccgatgcggatagggattttctccacagtttccgccgcaatccgttccagctctgccaggccgggcattccggcttcggcggcttcgatctccgccaggctgggcttggttttggggtgcgacggggtaaagatggtacagcaatcctcatacggctcaatggaggtatcaaaggtgccgatcttgcgggaaatagcaatgatctcggtcttatccatgccgatcagcgggcgcagaatcggcaggttctgcgcggcgtcggtgcaggcaatggcctgcatggtctggctggcaacctgtgctagactttcgccggtaatcaaagcttccatctcgctctggtcggccaccagtttggcaatgcgcagcatgctgcggcgcatgagcacggtaaacaacacatcaggcgcattatcgcggatatactcctgcggcttggtatagggcaccacaaacagctggcagttgccggtatattctgccagttcgcgggccagggcgcgcaccttcagtttggcgcgcaggctggtgtacggcgggctggcaaagtggatgtggtgcagtgcaagcccgcggcgcgccatgcaataagctgctaccgggctgtcgatgccgccggaaagcaggttcagcgcacggccgctggtgccaacgggcaggccgcccgcggcttccaccttggggccatggatatatgcgcctttatcgcggatttccaccatgatttccagctgcggctcatgcacgttcacccgcaggtgggggtgcttgcccagcaggtaagcgcccagttcgcggcacagctccgggcttttcatcgggaacgttttatccgcgcgcttggcttccaccttaaaggtgcggatgccgcgcagcgtttcgccaagataagcttccgccgtggcgcagatctcgtcaaaatccttgctgcaacaagcagcgcggctcattttgacaatgccaaaaattttggaaatacggcggaacgcttcgtccatgtccaggtcatcttccagtggctcaatgaacacggtggactgcgcctgggtcaccttgaatttgcccaggtcttccagccggtagcggatgcttttggccaggcgggcttcaaatttgctgcggttcaggcctttcagggtcatttcgccctgataggcaaggatgatttctttcatgtttatggcaaacctttcgtgtctggtgttatggtttcattcaatagcgttatcttttcagatgtgctgcaactctttcaggccgtctttcaggccgtccagcagggcctgcacatcttcgggggtattgtccccgcaaaagctgacgcgcagcgccgtgcgcacggcaaggtccggcgcgcccatcgccatcagggtgtggctcggctcgcccttatcgcaggcggagccgccggaaatataaatgtgccgcccgctcaaatattcaataaaggtctggctgttgacacagttggtggaaaagttcagcacctccggcacggcatccgccggggagttcagggtgatgggtgcctgctgggccagctcttccagcccggtgcgcagctgggcgttcagggcgcggatatgcgcattgcggtcgctcaggtttttggccccctttgccgcagcaaggccaaggccaacgatataaggggtattctcggtgccggggcgcaggccgcgctcctgatggccgcccaggtagggcgggcaaagcgtctggcgcacgctgtcccggatgaacaaagcgccgattcccttgggggcatgcactttatggccggataccgagagagtatccacgttcttccactttttcaggtcaatggggatgcgcagccatgcctgcacggcatccacatgcaccgcacagcggctgtttttggccttgacggctgtggaaagagcggcaatatcctgcaaagtgccggtttcattattgaccgccatgcagctgaccagaacggtatttttatccacctcggcagccagtttggcaacatccaggtgaccgtctgcttcgggcaggatttccaccacctcaaagccgcggtctttcagtgcacggatgggccgctgcacgctggggtgctcaaaaccggaaaccacaattttgctgccccagtttttgcgtgccatggcaaggccctgcacggcaaggttgttgctctcgctgccgcatgaggtaaaatacagatccttggcctggcagcccagggtgcgggcaatctgcccgcgggccgtggtcagggcttcatgggtttctaccgccggttcgtacaggctggaggggttcgcccactcctttaataatgcttcatggatggcacccgcaatctccgggtccaccatggtggttgcggcattatccagataatgcagttcagggtccaacagcatgagaaagcctcgtttcgctacgcgtaaaattaaatcaaattaaaaaagaataatgaataaagaataatgttggtgcgccgcccgcggcggcgcagataaaacaggcagcaaactctggcatgcaacagccctgccagagcgccgaacctgttttcaatgtgatgccgtgggcatcacacagccattattcattattcttttttctctattatttttcttcgctcttttccatagtaatacatagtaaattatacacaccacacccgcaaaacacaagtagcgccatacaaaaaaggcgtgcggggttggccgcacgccggagaggcttcttttgtgttatcttgtgtgccggtcctttacttcgtgggcgtggccgattacggcgctgcgcttatggaacagcaggcccaccacggcaaacataccgccctcgatcaatacagtaaacagccagtcccccgttaccaggtagctgcctgccaggcaggtcagcagggtggggatcggcatgctgatgcagacagccgcaaagaactgtttcggcttcatgttggcgtgagcggcggcatagggaatgatgccgttgggcagccccggtgtgataaacgccagaatggtataaaaccaggggttcttgctgttgcgcacgctgttcagcaacttattcgccttggggctgttcgctgtgagcagttcaatgacttttgccaggcggcgcgccagcagaaacaccagaaagtttgccgccaccgatgccgaaaagctggtcacaaagcctttccacggcccataggcgatccccgccgccagttgaaccggcatagccgggattaccagcgataccacctgcacgaacgccaggaaccacagcgtcaaaaagctgcgcagccgcccctcgcttgtcaaataatcgctcagagcctgttcgtccccgctggaaaatgcagtccataaccccggcaacagcaggcggaatgtttcaataatcagcagcaccataaccagaattacggctgctgccgcaataacggccaggcgcttggtgcgttcggggggctgttgtttcatgcaggggtactccttaattctaaaatataatgtttattcgccgaaatcctgtgccacttttttgagcatatcccggatgggcaagttatacgggcagcgggtctcgcacttgccacagccaatgcaggcaccggctttcaccgtcagggtatcgtaccgttcgtgtgcccagcccgcaaggccataacgctccaggtagccatggaacaagaaacagctgggaatctggatgcccaccgtgcagggggcacagtaattgcagcggcggcagaactgggtgccaagggtatcccgcactttctggcaggcggctttctcctccggggtcagcggggcagtgttggcgctgcccgccacattctgttccaattcttccggcgcggccatgccagggatggatactgtgactgccgggttggaaagcacataccgcagcgccagccgtccatcctcaatggcaccaccggccagcggcttcatatcaataaaggccttgcccttttccgcacagcggtcgatcagctctttgccctgctgctccacaatattataggggaacataatggtttcgatttcgtccaccttcagcgccttttcaaacgtctggctcaggtgggcggtaatgccaatgtgccccacaacgcccttggccttggcttccagcagggcttccatggcgccgccgggggccaggattttatccaggttttccgggctggggttgtggaactggtacaggtcaatgtgatcggtgcgcagttttttcaggctggcggcaagctcggcttccatctctgccttggtcagcgcacggcacttggtggcaaggataaattcatcccgcaggcccagttcctccagcgcctggccgatccactcctcgctgacggtgtaagcgcgggcggtatcaatgtaattgatgcccgcctcatgcgcggctttcagcatggcgcgggtgccaggttcatcaatgcgctgcaccggaatgccgccaaagcccaggcgcgaaacccgcagcccggtgcggccaaaatcaacatactgcatatttcattctccctttttgcggcgggggtgccctgccccgcctggacggttgtgcaaagtatcactattatagcaggcaaggctttacttgtcacgttttttggcagttttttattgactttacacctgctgtgcgttaggattagactattcattgggtatttgttggtacattataaaggatatacatgttatagtagagggaggaaattcctatgcgttatggttttatcggctgcggcaatatgggcggtgcggttgcccgcgcagtgtgccgcggcgttgggccggaaaatgttgtgctggccaaccgcaccccggccaaggctgaagccctggccgaagcacttggctgccgcgccgccaccaacgatgtggtcgcgcaggactgcgatgtaattttccttggcgtaaagccgcagatgatggccgatatgctggccggcatcgcccccatcctggcaaagcgcagcgggcgttttgtcctagttactatggctgccgggctgagcatggcccgcgtgcgcgagatggccggcggtgcatatccgatcatccgcatcatgcccaacaccccggtttcgctgggggccggtatgacccagtactgcgctgacggcgtgagcgatgaccagatgttcgcctttttgggtgccatggccccggccgggcggctggatgccatcccggaaaatttgatcgacgccgcctgctgtgtttccggctgcggccccgcgtgggtataccagtttattgaagcattggccgacggcggcgttgctgccggattgccccgcgccaaagcccaggaatatgccgcccagacccttttgggcagcgcccgcatggtgctggaaagcggtagccaccccggcgtactgaaagatgctgtgtgcagccccggcggttccaccattcagggtgtgcgcgtgctggaagagcacgcgttccgcggcgcagtgaccgatgccgtcctggccgcctatgacaaaacaaaggaaatggggaaaaactgatgcgcattgttgtcaagatcggcaccagcacgctggcccatccgggcgggcggctgaacatccgccacaccgaagcactggtaaaagtgtggagcgacatcaaaaacgccgggcacgagctgattattgtatcgtccggcgcaaccggccttggcgtgggcaagctgcagatttcccgccccaaagatatggtgacaaagcaggccgccgcagccgtgggccagtgcgagctgatgtatacttacgacaagctgtttgccgaatacagccacaccgttgcccagctgctggtgacctgggaggactttgaccatccccaccggctgaacaacctgcaaaacacgctggagcgcctgatccagctgggcgctgtgccggtcatcaacgaaaacgacccgatttccaccgaggaatactccctgggcgataacgaccgcctgggtgccctgattgccaaatacacccacgccgacctgctggtgctgctgagcgacattgacggcctgtacaccgccgacccgcatacccacccggaagccacgctgatccaccgggtagagagcgttacccccgaaattgagcaactgggcggcggctccaacagcggccttggcaccggcggcatgtccgccaagctgaccgccgccaaaattgccaccggtgccggtgttgacatggtcatcgccaacggtgccaacgcccatgtgctgtacgacattgtggacggcaaggatgtggggacgagatttgttggaaaaaataataaataataatgaataaagaataatgttggtgcgccgcccgcggcagcgcggataaaataggcggacagctccggttaggatattggtttaccggagaaatagccctaattgaaatgtgacgccgcgggcgtcactcaaccattattctctattctttattcattcttaattacaaccaaaggagttctgctatgactacgcatgaaattctgttagcggcgcaggcggcaaagctgccgctggcgctggcggataccgataccaaaaacgctgcgctggaagccatggcagttgccctggtggaaaacagcgatgcaattctggccgccaacaagcaggatctggccgccgcacgcgggcgcatcagcgatgtaatgctggaccgtcttgccctgacccctgcccggctggccgccatggccaagggcatgcgtgaggttgccgccctgccagacccggtgggtgccgtgctacgcaaaattgtgcggccgaacgggctgctgattgaaaaaacctcggtgcccatgggcgtgatcgccattatttatgaaagccgccccaacgtgacttccgacgccgccgcgctggccctgaaagccggcagcgcctgtgtgctgcgctgcgggcgcgatgcctgggccagctgccatgccattgtcaacgctctgcgctgcggtctggcccgtgccggcctgccggaaagtgccgtcagcctgattgaggacactacccacgcttccgccaacgagctgatgacggcaaacggtctggtggatctgctgattccccgcggcggtgccgggctgatccgcgcctgtgtggaaaacgccacggtgccctgcatccagaccgggaccggcatctgccatgtatatgtggacaaagccgccgacctgaacatggcggtggatatcattgagaacgccaaaaccagccgccccagcgtgtgcaatgccgaggaagtgtgcctggtacacaaggatgttgccgcagggtttctgccgttgctgaaagcccgcctggtggatgcccgcgcagctgccgggctggttccggtggatctgcggctggatgagcgcgccgccgccatcattcccggaacacccgccggcgagcaggattttgacactgaatttttgaactacatcctggccattgccgtggtggatgatgtggatgctgccattgcccacattgcccgccattccacccaccacagtgaggccatcatcacggcggacgataccgccgcagaccgctttaccacctgtgtggacagcgccgccgtgtatgtcaacgcctccacccgctttaccgatggcggagagttcggcctggggtgcgaaatgggcatcagcacccaaaagctgcatgcccgcggccccatgggcctggccgagctgtgcagctacaaatatatcatccacggctccggccagacccgcggcggctccgcggcaaaattgcagaatccgtgtaattga

SEQ ID NO: 903 - DNA, 8200 bp, unidentified
  source 1..8200: mol_type = unassigned DNA
acagatgccataccgaaagggaaagagtatgattacagccttccggcggtgcagagaaaacagttccgtcttgaaaaggagaagccgatactggatgcattctggaattggctggatcaacagcacccaaacaaaggaacccgtttggcgaaagcggtgaactatgcccaaaatcggaaaggcaccctgatgacctacctggaagacggacattgcagtctttcaaataatctcagtgaaaatgcaatcagaccattcacggttggccggaagaactggctgttcagtgccagtcctaaaggagccactgctagtgctattgtgtatacaatggttgagatggcaaaagcggactgtcaaaactaaaataaagtaaaacgcttgcatctatcattttggtgcaagcgtaattcatgagtaacgtagcaatatttttcacttacattagattaacgtgaaaataagaggataactttatggcaaaattacgagctgataaaagaaattataaaaaagcgtttacagttcatgcaaattcctatgataattggaatattggaagtccttacagtagacgtttattattatgttattgtgttgaatgtggattgaaatgcttgatcatggagaatgataatatatatacgatttctcaggcggatgatgagacagcgaaaattttggggtcacatgactttagaacgctgttaaagagagttggtcaggctggaacttatcgatttaagagttttcctacggagtatggaaatacggtaggaacagcggattatcatcagttgtgcaggtatttgattgctcctgcagagcagaatattacatatttgcaggaatttgatcatacgctggctgagattaaagaatggctgaaagaggtggtgtaaattatgaggttctatacatggaaagatattgaacgatatattttaatgcatcatgatgagtggaaagatgaattatacgatatagaagtttatccgaatgaaatggttgtatacccaaaatcagaacagggtacgctgcagaatgctgtattaaagaaactttttccgaaaaatattacacctgataatttaagtataaaattggatggtcagggagaagatttgatgattttatatgagtacgagtacagtccggttacggtaagaacgttgccattgtttaaaaaggcgatttatgaagattccatatatccgacggagcagttggcggatcttagctgtccggtttttgcatttcattcttataaggggggagttggacgaacactgtcgcttattgcatttgcacgggcatggaccaatcttcagaagaatccggaaaacagcaaacttttaattattgattctgatctggaggcaccgggacttaccttaatccagggtgatctaaatgatagtgcttttagttatttggatttattaactttgattcaggataacagcaatgtagaggaaattgtatcaacggcaggaaatttaatggggacgattaccttgccaatcgaaaccagccaacagagagtagaacatttctttcttccgacatatcgttatgaagagcaattgtttgatctgtatgcaagtccgcaaacaatcactgccagtcgaaataaagaatatattttggcagaagtactttcaaaactggcaagtagtttagggacaacagcagttctggtggatcttcgtgcggggatcagcgaatattcagcaccattgttgcttgatccgcgagtgaaaaaatattgtgtaacttctacttctcttcagtctgtaatgggaacaaagcaggtattaagttttattgcaaaaggtctgaagataaaggaagatacgcttctgcctactgtttttctgggtatgattccggaaacttttccaagaagagagaaacaggaaatcaaggaaaatttactcggatgttttgagactacagaggtaaaagaggaacttcttgataatatgatcgtggagcttccgtttgccagtgaattaatacatttaacagaatggaagcagattttaaatgttttaaaagacagagatatgtatgatgctgtcaaagaattagtaaaaccttactgtatatcagaagaaccagaaagaggaatttatacagaaaaacagcatcagatcattacaaaacaaatttgtgactttgcgaataatcagatcacggctgaagccaatggagcggaagaactattattaaccgaaccgattaaaaatctttgtgctcgtttcaatcaccagattccggtaacggttgttcagggagcaaagggatctggaaaaacattcttgtatcgtcagttgatagaaaagaaaaactggaattcttttttttctgaaattactcataaaaaaatcagtaaggaaaatggctattttatccctgttttagcaccgcagaatatttcacagattcaaacggttctgggacaatgtattgactgttttaatgaggcattgccttttgcagatgtttcacagagtatctacagtgacaattcttacagactggatcttaaagcgaataaagaaattgactggatgaatttttgggaacaattgtttgtaaattccgttaataaagagtttacctcatttgctcaactgaatgaaaaattaaaagaagaggaaaagacagttatctttttgattgatgggctggaagagatattaaaagcagtatcttcaaataaaaatcagcaaaaagcgatagaagttttatgccagggagttttgaatacgatcagtgcgagatatgaaaatattggtcttattatttttatacgaagcgatatggcacagaatgcaattacagttaattatgagcaattcaggcagtcatttgcctatgcagaactgaaatggtcttcggcagaagctttaaagttggcagtttggctggtaagccatgcaaacagtgatttttatcgggaaagtattccgattgaaaatgcgtcacaggaaataatcgataaatatctggaagaactctggggattgaaattaggaaagaaggattcaaatgaagcgtattcatcacgttggatactggcagctctttccgattttaatggacaacttcaggcacgtgacattatccggtttttgaaatatgcagcagggcagaatatgaaaaaaccgccgtatgatgatcggatattaatgcctgcagagatacgttatgcagtaccaaagtgttcaaatgccaaaatcagtgatattaaggcggaatatgaaaatttaaagcctatttttgaaaagctggaagatttgccgacagacgaaaaaacacttccaatgaatctggaaaataatatatttacatcggtagaagaaaagtccatgacacaatccggatatttgaaacgtgatggagaaaaactttatttaccggaaattatacgtcatgcactgggatttcgatatgaaaaaggtgcaagaccgagagtattgtctttgcttcttaaacattaaaaacatggaaggttaaaagaaagactccacaaatcaaagaaatagtggtatgatagatagactttagatttattggctatccgcatgcggtgaaatagtatcttccggattacatggggttgatttttgagaagatgtgtcaggattatctgctctattattcagataatcttctcgttgagctgagtgaaatcggtcagtggtgggggacagaccggaagaagaaaaatatcttttcaaaaggagattttacggatggacttcttcaggcacaggagcacggtgaagtccggctggtaacgctggaggatctctacagatagagggagatttttgaaaaatttttttgagttattatggaaaagagaaacataaggattgtctgaagtatttgatttttgataagagcaaatttcaaatcattttattcagaaaaagtggaggaatacattatgtgtggaattgttggttttacaggagaacatcaggcagcaccgattttattggatggtttgtcaaaactggagtaccggggatatgattcggcgggattggctgttcgagacggagagaatctggcacaggttgtgaaggcaaagggacgcttgagcaatctggcggagaaaacggacgatggtcataccttaaaaggtacttgcgggatcggtcatactcgctgggcaacgcatggggaaccgagtcagacaaatgcacatccgcatgtgtcgggaaactgcagcggttctggctcaggtatggtagaatccgaggttgttggtgtgcataatggcattattgagaattatacggagctaaaggaaaagttattaaaacatggctatactttttacagtcagacagatacagaagttgtgatcaagctggtggactactattataagaaatataatctgggtccgatcgatgcgatcgcgaaaacgatggtgcgtgtacgcggttcgtatgctctggaactgatgtttaaggattatccgggggagatctgggtggcacgaaaagacagtccgatgatcattggtattgcagacggcgaaacttatgttgcttctgatgttccggcaattctcaaatataccagaaatgtttattatattggaaatctggagttcgcaaaactgactccgggagaggcacatttttataatcttgatggcgatgagattgaaaaagaaacaaccgagatcaagtgggatgccgaagcagcagagaaagccggttttgagcattttatgatgaaggagatccatgagcagccaaaagcaatccaggatacgctcaattcggtcatcaaagaggataaaattgacctttcaacagtagaaatcacggacgaagagattcagaattttgatcagatctatattgttgcctgcggatcggcatggcatgtgggtatggcagcacagtatgtatttgaagatctggcggatattccggtgagggtagagctggcatccgaattccgttatcgaaaaatgccattaaaccagaaagcactggtgatcgtagttagccagtccggtgaaacagccgatacactggcggctcttagaatggcaaaagaaaagaatattaccacaatggcgatcgtcaatgtagttggaagcagcattgcacgcgaagccgataaggtattctatacacttgcaggtccggaaatctcagttgcgacaacgaaagcctacagtgcacagttagccgcaatgtactgcttggcagtgcagttcgcaaaagtcagaggaaagatttcagaagaacagtacagctattacatttccgagatgcttaccatcccggataaaatgcagaaagtcctggaagataaagaacggatccagtggtttgcttccaaatatgcaaacgcacatgatgtattcttcgtgggccgcggcattgattatgcagtctgcctggaaggaagcttaaaactcaaagaaatttcctatatccattccgaagcctatgcggcgggagaactgaagcatggaaccatcagcctgatcgaacagggcaccctggtgatcggagtcctgacacagagcgaactctatgagaaaaccatcagcaatatgctcgaatgtaagagccgcggagcttacctgatgggtctgacaacctatggaaaatacgaaatcgaagatcaggtgaactttaccgtttatgtaccaaaagtagatgagcattttgtcggaagcctggccgtggttccgctgcagctgatcggatactatgtcagcgtggcaaaaggactggatgtggataaaccgagaaatctggcgaagagcgtgacggtggagtgatatcaggtgcggtatgacctgcaaaaaaggcgcagcagcactgaaagatttcagagaacgtaaacaatactatatatcaaggaggtgcagcactgcatgagtaatgtattacctgttgaggatttaagtaaaacttacctggaacactctatggttatcaacaattttgttatcaaaatcggcagtcagattaaagacagtctgtgtcgtgtctttggtgatggtgtgcagtatgaatggcgtgcgaacgatgataaagtaatgattccggatgtatccattatctgcaacttgagagatcgaaagaatatttcttttacaggtattccacgttttgtgatggaggtcttatccaatgctacggaagaatacgacaggcacgaaaaaatgaatatttactgcaaagtcggagtttctgaatactggatcgttgattggagaaaaaagtccgtagaaatctatctttttgacttcgaagaggatggaacaggatatccgtatctttataaaacagttactgcacagaataaagaggagttacaactggtgatgttcccgaatttgaaaataacctttgaggaattgtttgatcttggagaatattgattttacatgactctccggtgcagtcagggaatgatttcagcttttcagtttgacttagtaaatgctatgagttatgatacttaaaagaagtaacttgtgagccagtcgctcatgagcataattagtggaggaaacagcatgaaattttttgtaacaggtgtcggcggacagcttggacatgatgtaatgaacgaactgatcaagagaggacatgagggtgtcggttctgatattcaggagcagtacagcggtgtggaagatggttctgaggtgacaaaagcaccttatctttcactggatatcacagataaagaagcagtaaagcgtgtcattgagagcgtaaaaccggatgcggtgatccactgcgcggcatggactgcggttgatatggcggaagatgatgacaagattgcaaaggtccgtgcgatcaatgcgggcggcacacagaacattgcggatgtctgcaagaagctggactgcaagatgacttacatcagcacagattatgtatttgacggtcagggcacagagccatggaagccggactgcaaggattataagccgatgaatgtctatgggcagacgaagctggaaggggaattggcagtaagccagacactggagaaatattttatcgtccgtattgcatgggtatttggcttaaatggcaagaattttatcaagacgatgctgaatgtcggcaagacgcatgacacggttcgtgtagtcaatgatcagatcggtacaccaacttacacttatgatctggcacgtctgctggttgatatgaatgaaacagaaaaatatggttattatcatgcgacgaacgagggcggatacatcagctggtatgattttacgagggaaatctaccgtcaggcaggttatacgaccagggttctgccggtaaccacagcagaatatggcttaagcaaagcggcaagaccgtttaacagccgtctggataagagcaagctggtggaaaatggatttaccccgcttccgacctggcaggacgcactgagccgttatctgaaagaaatcaaagtgtgatttcggatacattttaaatgataagtacaaaaaataagaagtgggagtcttctccgactaagataaaaagatactgaacagttgcagaaggagataaagaaaatgggacagatcaaagttgagaaaaatgtaggcggcatcgaaggcctttgtatcgtagaaccggccgttcatggtgacgaacgtggttatttcatggaaacctacaacgaaagagatatgaaagaggcaggcattgatattcatttcgtacaggataaccagtccatgtccacaaaaggagtattgagaggcctgcatttccagaaacagtatccgcagtgcaagctggtccgtgcggtacgcggaacggtatttgacgttgccgtggatctgcgttccgattccaggacttatggaaaatggttcggcgtggttttatctgcggaaaataaaaagcagttcctcattccagaaggatttgcacatggatttctggtgctgagcgatgaggcagaattctgctataaagtgaacgatttctggcatccgaacgatgagggcggcatggcatggaacgacccggagatcggcatcgagtggccggaagtgaagggcgagtacaaaggcagtgcatctgcagaaggttatacactggcagacggtacaccgctgaacctgagtgataaagaccagaaatggctgggattgaaagatacctttaaattttaa

SEQ ID NO: 904 - DNA, 18747 bp, unidentified
  source 1..18747: mol_type = unassigned DNA
taaaaatcggtattcccattgcattgcaggacggtttcatccaggtggcatttatgattatcaccatcattgcgaaccagcgtggattaaatgatgcagcggctgtgggaatcgtggaaaagataataagcttcctgttcctgattccgtcctccatgttatcaacagtatctgcacttggtgcacagaatatcggagcgggaaagaggcagcgtgccaatgaaacactgcgctatgctgtgatgattacagtgggctttggaattatcgtaggaatcttcatgcagttcttcgccagtccggtggtggcgttatttacagatgcatcggatgcatcgggagcggaagtggtacgtctgggaggtcaatacttaaggggatatgtctgggattgcatgttcgcaggaattcatttcagcttcagcggatatttctgtgcctgcggcaaatccggcatctcatttttacataatatcattgcaattacactggtaagaattccgggcgtttatctgacttcgactttattcccggataccttattcccgatggggctggcaacggcagcaggctccctgctttccgcaatcatctgtgttgttgcatttacaatcttaaaccggaaggaaaaaatgaaaaaagattgattttggctaataaaaacaccagtgatttaaaaatgtaaatacgaggaaggcttgcataattcctcctgttttccacatactacccatacagcacaaaaatggaaagtatgtaggaaacaggaggaatttttaatgaaagcaacaggaattgtacgtagaatagatgatttggggagagttgtagtgccaaaggaaatccgcaggacactgcgaatccgggaaggtgacccactggaaatttttacagaccgggaaggtgaaatcattcttaagaaatattctcccattggagaactgagccagtttgccggacagtatgcggagagcctggcacagagcaccgggcatctggtatgtattaccgacagggaccatgtgattgcggctgcaggaaacggaaagaaggaattcgaaggaaagccaatcagcaggcagttagaggaactgatcgaagaccggaaaaatattcttgcacagcagggagacagcaaatttgtacgaattaccttagatgataccgggaactatcatgaccaggcaatcagcacgattatctgtgaaggagatgccatcggagcagttgttttatatgagaaaaatgaaactgcaaaaatgggagaaaccgaaagcaagcttgctattacagcggcgggatttttaggaagacaaatggaacagtagccttgtaactttttatggaacagtgtaaaatagagcaatatggaggaatcccatgtcccataaagagaagaaaaaaaggaaaaagaaataccgtggtttctggctttttgtaaagctgcagatagttctgatacttctggtaatcggcgggctggcgtattactattttggcgggtatgccagtcaggtcagtgccatgcatgaagaggcagtccggtttgtaaaagagtcgacgaaggacacatttcgggcggagcagaccagccaggtttatgatgtgaatggaacgagaatcatgtcacttcgtggcaccaaggatgtaagctatctgaccagtgatgagataccggaagaagtcaaagaagctatggtcagtattgaagataaaaaattttacagtcatggcggaatcgattttaaggcaattatccgtgcagtctgggcaatggtgcgtaacggagaagtaacccagggcggaagtaccattacgcagcagcttgcaagaaccattttcctaaataatgacagaacgtggcagcgaaaaatggaagaaattttcattgccacagagctggaaaagaaatataccaaggatgaaatcttagagttttatcttaataatatttattttggaaatggatattatggcattcaggcggcgagccggggatattttgatacagatgtttcatttttgtcattgtcccagatggcatatctttgtgcgataccgaataatccgacgatgtataatccttataagaacccggataatacgttaggaagacgtgaccgcattttaaaaaacatgtatgaggatggcaaaatcagccgcagggaatataaggatgccagacaggaaacgattgtactcagcacagcagagccaacaaagcgttatgatgcggtagagacctatgcctgctattgtgcaacacgggcattgatggagcagcagggctttgaattccggacagatttttcttcggaggaagatcgaaagacctatgaagatgcctatcaggagcagtataaaacctgcgaacagtctctttatacaggaggctatagaatctatacttccattgatttaaatatggaagagcagcttcagaatgcagtggatgagaagctgcaggattttaccgatgtcaatgaagagggcatttatacattgcagagtgcggcagtatgcattgacaatgagaccggttttgtaaaggcaatcgtaggcggcagaagtcaggaatatgacgggcatatgctaaaccgcgcctatcagagttaccggcagccgggcagtgccatcaaaccgttgattgtatacacaccggcgttggagcggggctataccccggatactgtggtggaagatgcaccgattgaggatggaccggaaaatgccagtggcaggtatcttggcagcgtaaccttgcgttatgcagtagaaaattccattaatacagtggcgtggaatcttttagaagagatgactcccgttacaggaatttcctatctgaaggagatgaatttcgcaaagctgtccccggaggatgaaagacctgccgcatccctgggtggatttaccaatggagtctctccggtagaaatggcggcggcttatgccaccatagaaaatgatggaaaataccgggagcctacctgcattgtagagatacaggatgcagacggaaacgctatctatcagaaaattgtcgatgaaaagcaggtttataaaaccaatgcagcccgttggatgaccaatatattagagggtgttctgacacaaggaacagcaaagggcctggcattgtccgagactgccagtgcagcgaaaacaggaaccaccaattccaataaggatggctggtttgtaggctatacaaagtattacaccaccagcgtctgggttggatatgatattccggcagaacttccaggactgacaggagccagctatccgggagaaatctggtatgattatatggaaaatttacataaagaattaccgtatgcagattttgtggcacctcttggcacaggcaatgatgctgatgcggagagtggcacagatgtgacagagggtaatgcagcagagaatgacaccatagaaaatgacactacaggagataatacagctccggcagaggaagaaaggcgataatatggaaaagaaagctgatttaaagacaatgacctggaaacagcggatcggatttgtctgggactattacagacttgtaatactggcagtagttgcagtgattattttgattggtatgacggtacatcattatatgaccacaaaggaagatatttcccagattgtattagtaaatgcaaagagtatgccagcagatgaagaaccggatttctcagaattcatggagcaatatggatatgatacagcagtccaggaggttgtggtaaatgatgcatattatgtggatttaaccagcacagataccagtaatctctattcctatcagtccctgcagacagtgattgcaggcggtggagtagatgttttgggtgctgatgaaatggtttttgaaaatcttgcccagtctggtgccatagcagatttgacgcagtacttttccaaagacgagctggaacagttaaaggattatatcttctatgtagaggataaggacaccggagatacttttgcagcaggcatccgtcttggagccggaagctggccggttgaacacggttattatgaaaaggaatgtattcttggtattgcccttggctccgaacataaggaagcagcggagcagatgttccgttatttgctggaaaaatccaatttagactaaagaaagcgcaagatatagacgatataaaaataagaaatggtacattgtgtatatcttgcggaaaaatcttgcgaaagatgacaaaatgacctataataaaactacctggaccatgagaagataaggcagatgaatcataaattatggatgaaaagatttataaaataggtgattatgaattcgaaaccttaagggaatacaggcaggcgcaggaagatttaaagaaaatcaagtatattaccgatgaactggatatttatgatccggaagtagcaatccggttgtataccatgatgcgcacgaagaaaatccgttttaaaagtgaaatcggaaaatcgttcttctggtgcatttcagatattgttgcggatagttcgcagaacatgatagaagaaaaaattgccaaggaagaagcggaagcagaagcaaagctgccatttcattttacctggcagaaggtggtcggcatcgtatgcatcattgttgcgacagcctgtatcggatattatgcgatttcggaatatgcggattataaagctgctaacaggcttaaggatttacagaataagaaacagaataatgtagtagagcaccttgtaacaggaacggagcagatgaatccggaaatcacagaagatgcaactgaaacaggagagacaacagagcagccactgattatgttagaggattatgtttccctgtatgcggaaaatccggaattaatcggatggttacatattccggatacggatattgattatccggtcatgcagtcttcacaggaagaaccggattattatctgaaacatgattttgataaaaatgacgacctgaatggcaccctttttatcgatgccagaaatgattacataaacagggataccaatatcatcatttacggacataatatgaaaagcggaatgatgtttggtgaattaaagaaatatctggacgaagatttctacaatgcccataagacgatagaatttaatactctttatgaaagaggagtctatgaagtcattgaagtgggattatcggaggtccagtatcaggatgaaaatgtattccggtattataattttctgaatgcagattccgaagaagaatatcaggaatatttaaataatgtggcacagctttctgtatatggcacagagatagacagtacttatggagaccagctgctgactctttctacctgcaataattatacacaggacggaagaatgtttatactggcaaagcgtgtacagtaagcagataagaagtataatgtatcaagcagataaagctaggagagatgagagatgcagatattgaaaaaaggattttctatttttgcagcaatatgtttgctgctggcagtgatgccgggacagacagtccgggcagacgagacaacagatgaaaatggatttacagtagatgacagtggaacactggttgcctacagcggagccggtggagcaattacaattccagagtcagtatctacaattgcaagtggtgtatttgcatccaatacatccattacaagtgtaacgattccatcttatgtgactggaatgggaaccgcagttttctataactgtacaagccttggttctgtcagcatagaaggagatatcggttctattccggcagagacattttataactgtacaagccttaccagtgtatctattggaacttcaatttcatccattggttcccagtcatttgcagagtgcagttcattatcccagtttacaattccggaatccgtaggaagcatcggtgataaagcattttatgattgtacttctttaaccggaattacaattccatctggcgtttccagcatcggaagcaacgtatttaccggctgcagcagactggcatccatcagtgttgcatcaggaaatggtacatatgcatccagtgacggatgtctttataacaaagcaatgaccaggttaatccgttgcccggagggaaaatccagtgcaaaaattgcgaccagtactgtaaccatcggagcaggtgcttttgcaaactgtaagtcggttacttcgctgacggttccggattctgttaataccattgaaacagatgcgttcagcggcagcagtatcagtacaattttgattccggcaagtgtaacgtcaatcggaagccagagcagctggagtccatctacaatttccggttattcaggaacacaggcacaggtatatgcaaccggaaatggaatcagtttccaaagccttggaggagaaaatccacagccgactccggataatggaaataattccaatagcaatggttcaacagatacttccaacagcaacaacggaagtggttccgctactacagtaaccggtggcggcacagcagtgactggcggaaatgtgattggcgcaaccaagaacagcaattccggtaagacagtaacttcgggcagccatgagaaggacagcacaccgaagacaggtgacggtatcaatccggtattcttcttatgcatcggagtattattagtaggtgtttactttgtagtatcaaatcgtaaaaaagctgcataagtgataaaaaataaaagaagtaactaacataagacagtgaaagaacagaaagttctgacactgtcttttttactttacaggaaattgctttcctgtaaagtaaaaacgctctgcgaggatgcgcactgcggcgtataaggtagatgtcgcaagcgaccgccgcaggcgcgagaatgtgccaaggcacattcttttttacacgataactcgagaaatacgcaaagcgtgtttctcgtagtttacgcgagtcggtaaaaatatagttgacaactgaaatgcttatgtatatactttgagttgcaaataatttgataatcaaaatatttgcaactcaaagtattatcaaagaaaagacaaaaaaggagaacgaaataatgttagagaaattagcagaattaatcaaagagcagttaaactatgatggagaggtaaaagcagaatccaatttcaaggatgatttaggagcagattctttagacttgtttgaactggttatgagcatggaagaagaattcggtgtagagattccgtcagaagatttagagaaaatcgcaactgtaggagatgttattgactacttaaaagcaaagggcgttgaggaataaaatatgaaaacaagaatcacagaactgttaggaatagaagagcctgttatccagggcggaatggcatgggttgcagaatatcatctggctgctgcagtatctgaagcaggtggacttggtattatcggtgcagccagtgctccacctgaagtggttcgggagcagattcgcaaggtgaaggaacgcaccagcaaaccatttggtgtaaatgtcatgttgatgaatccgaatgcaccggaagtggcaaaggtggtagttgaggagcaggttccggttgtcacaacaggagccggaaatccagccaaattcatgagcctctggaaagaagcaggtgttaaagtaattccggtagtagcaagtgtagctatggcaaaacttatggtccgcggtggcgcagatgctgttgtggcagagggaatggaatccggtggccatatcggttccactacaaccatggcattggtgccacaggtggcagatgccattgatgcaccggtgattgcagccggaggaattgcagatggaagaggaatggctgcagcatttatgctgggggcagaagcagttcagatgggaacaagatttgtggcagccaaagaatctatcgtacatgcaaactacaaagaaaaactgataaaatccaaagacattgattctgaaataacaggttccagtaccggacatccaatccgtgtcatccgtaataagatgagccgtgagtatctgaagatggaaaaagaaggcgcaacattagatgaattagaacagcttacccttggttccctccgcaaagcagtgatggatggcgatgtggtaaatggaagtctgatggcaggtcagattgccggaatgatacaggatgaattgtcctgtaaggaaattattacttctatcgtatcagaagcagaacgtctgatgaatcggaaataaggagaagaaaatgagtaaggttgtattcatgttccctggacagggagcacagtatattggaatgggcaaagatttctatgatgcctgtgaagagagtaaagccgtatatgagcttgcttcaaaagtaaccggacttgatattgcaaagctttgttttgaagaaaatgaagaaatcaatattacagagtatacacagattgccatgctgaccacagaggcagcaatttatgcagcattaaagaaagctggaaaagaaccggcagcttgcgcaggattaagccttggagaatacggcgcattgattgcatccggtgtcatgagtatggaagatgcattccgtgtcattcgtgcaagaggaatctttatgcaggaagcagtaccaaccggcggagcaatggcagccgttttaggactggatgcgaaggcaattgaagaagtatgcagcaataccgaaggaattgtatctatagcaaattataactgtccggggcagattgtaattaccggagaagaagcggcagtagaaaaagccggtgcagcattaaaggaagctggagcaaagcgtgtggttccgttaaaagtaagcggaccgttccattccgccatgttgaccggagccggagaaaaattagcagaagtattggaaaatacaaagctgcaggaatttagcattccgtatgtaaccaatgtgacagcagattacgttaccacaacagaaccggtaaaagagctgttaaagaagcaggtatcttcttctgtaagatggcagcagagcatcgagcgtctgatagcagacggttatgatgaattcgtagaaatcggaccgggacatactttatctggatttatgcgtaaaatcaaccgggatgtcaaaacggtaagtattgaaaaactggaggattataaagcttatgttggagaataaagtagcactggtaaccggtgcagccaaagggattggtcgtgccattgcacttcgtctggcagaagacaaagcaacggtaattgtaaattacaatggcagtaaagaacgggctgaagaagtggtaaaaatgattaccgatatgggtggcagagcagaatcctatcagtgcaatgtggcagatgacgaggcatgtcaggccatgctcagagatatcataaagaaatacggacatctggatattcttgtaaataatgcaggaattacaagagataatcttgtgatgaagatgaatgatgaagaatttgatgcagtctatgagacaaacttaaagggtgtattccataccattcatcatacatcccgctatttcttaaaacagaaaagtggaaggataatcaatatatcatccgtatccggaattaccggaaatgccggccaggcaaattattgtgcagccaaagccggagtcatcggattgactaaaagtgttgcgagagaactttcctcccgcggtattactgcaaatgtagtagcaccgggaatgattgagaccgatatgacaaaggatttaccggatacggtaaaagaaaatatgcttcataacattccgcttggaagaatcggaaagccggaagaaattgcggcagcagttgcattcttagcatccgaagaggcaggttatatcacaggacaggtgctggctgtagatggcggaatgactatgtagatgcagaaataatactggctgatgaaaaagctagaaagaacagcggatgacgaatgacgagagatggattgtttagatagagaggataagaacatgaatcgtagagttgtagtaacaggattgggtgcaattaccccgattggaaataatgtgccggaattctggtctgcagtaaagcagcagaaggtaggtattggagagattacacattttgatgcaacagactataaatgtcatcttgcagcagaagtaaaggattttgatgcaaaagaatatatggatttccgctctgcaaagagaatggaagcattctgccagtttgccgtagcggcagccggagaagcactggaggattccagactttccatggaagcagaggatgcataccgtgtgggtacttccatcagttccggagtcggaagtttacaggcaatcgaaagagagcatagcaaattattggaaaagggaccgggaagagtaaatccgttattcgtcccgatgatgatttccaatatggcagcaggaaatgtatccattcagtttggattaaaaggaaagagcttaaatatcagtaccgcctgtgcatccggaacgaatgccattggtgaagccttccgtaccatccagtatggtgatgcagaagtgatggtagcaggtggaacagaaagctgcattactccacttggaatagcaggatttacatctttaaccgcacttacttcttcagatgatccaaaacatgcatccattccgtttgataaaaacagaagtggatttgttatgggagaaggtgctgcaatcgtaattctggaagaattagaacatgccaaaaaacgtggagcaaagatttatgcagaagtaaccggatatggatgttcttcggatgcataccatattacatctccggcagaggatggtgcaggcgcagcaaccgcaatgataaatgcaatgaaggatgccggtgtaaatccggaagaaattacttatatcaatgcccatggaaccagcacccatcataatgacttatttgagacaagagcaatcaagctggcgtttggtgagcatgcaaaggatatccggattaattccaccaaatccatgattggacatcttcttggagcagcaggagccatcgagtgcctgacctgtgtaaaggaaatcgaggaaggttacattcatgcaaccgtaggttatgagacaccggatgaagaactggatctgaattattgcaaagaggcatatgaagaagaagtgccatatgccatcagcaattcactgggctttggcggacataatgcaagtctgcttctgaaaaaatatcaggcataaaggagaagggaacaatgtcagtactgacaacgaaagaaattatggaaatcatcccacatcgtcatccgtttcttctgattgacacgattgaagaactggtgccgggacttcgtgcagtagggaaaaaatgtgttacctttgatgaaccttattttgcaggacattttccgggagaaccggtaatgccgggtgttttaattatagaagcactggcacagaccggcgcggttgcaatgctctgtcaggatgaattcaaaggaaaaaccgcatattttgcaggaatcagcaatgcaaaatttaagaaaaaggtggttccgggggatgtacttgttttagagacagaaatcataaaagtaaagggaccgattggaattggaaaggcaactgcaacagtagatggaaaaatagctgcaacagcagagttgacatttgcgattggaagtggtgagtaaagtgagcagattactggataaaatcaaggaaaatagagctgtaaaggatgccacagaaggtattttacaggaagaaaaaaagaaagaggaagtactttgtaaagcctgtggcaaaatggtaaacaaagcagaggtagtaagaaaccgctatgtctgttatgagtgtggagcatatttccgcgtaaaaaccggaaaccgcctgaagatggtattagacccacagagctttgaagaatggtttgccgaagagcatggaacgaatccgctggattttccgggctatgtcgataagctgacggcagtccgtgagaaaaccggattaaaagaagcagtaaccgtagggaaaggtaagatttacggagaagatgcagtcattggtgtgtgtgatgccagatttatgatgggaagcatgggccatgcagtcggagagaaaattgcgggggcagtagaacgtgctacggaagaaaaacttccggttattcttttctgttgttccggcggagccagaatgcaggagggtattgtatccctgatgcagatggcaaagacagcagcagctttaaagaaacattccgatgccggacttttatatatttccgtattaactgacccgacaaccggaggtgtaacagcaagttttgctatgttaggtgatattattttagcagagcctggcgcactgattggatttgccggagcaagagtaattgagcagaccatcggacagaaactgccggagggattccagagagcagagttccagttagagcatggttttgtggatgccattgtagagcggaaagatttaaagaaacgtctgtatgaaatccttcgtatgcataaagtaagtggatatgccaaatttgatccggcaactgaagtagacggaagaccgacagagttgatgcgggaacgcgcttacaatacaaaagaaaagagtgcatgggaaaaggttaagatggcacgtaaggtagaccgtctgtccgcagaggattatatcaacagtatctttaccaaattcatagaatttcatggagaccgttattacagggatgacccggcaattgtgggcggtatcgcataccttgacggacaaccggttacggtaatcggaatccagaagggaaaggacatgaaggactgcatgcgtcataattacggaatgccatctccggaaggataccgtaaagcaatccgcctgatgaagcaggcagaaaaattccatcgtccggttatcacctttgttaatacagccggagcattctgcggtatggaagcagaggaaggcggacagggagaagctattgcaagaaatctttatgaaatgtcagggttgaaagttccggttattacctttatgataggagaaggcggaagtggcggtgcattggcactggcagttggaaatgaagtctgcatgatggagaatgcaacttattccgtactttctccggaaggctttgcatctattctctggaaggatggcaagcgtgccaaagaagcagcagaagtaatgaagataacagcaaaggatcttttaggacttggcattatcgagaaaattataccggagtatggtggagcagatgatgaggcattgagttccattgcagtttatatgcataaatgtatccgcgaatttttagaatcatatgaaggaaaaagcggagaagagattgcaaaagcacgttatgaacgtttccgtaaattttaaaggagcagagcatgaacattcgaatatgtggaactggaagtgcgttaccggaaagaaaaattaccaatgacgatttaagtcagattatggatacttccgatgaatggatttccagcagaacaggaataaaaacaagacaccttgcaacggaagagacaacaacatcacttgccacagaagctgcaaaaaaagcacttgcagatgcagacatgaagccggaagaagtggaacttatcattgcagcgacggtaacaccggatcatcttgtgccgacactttcctgtgaagtgcagcgggaaatcggagcagtgaatgccgtagcctttgaccttggtgcagcatgttccggattcttatttgcattgagtacagcacaggcatatattgccagtggcagatttaaaaatgcactcttaatcggagcagaagtactttctaaaattatggactggaatgaccgcagtacctgtgttctttttggagatggcgcaggagcagcagtagtccgggcagacgaagaaaatatctgtcatgtggtgcagggctcagacggtgcgaagggactggtactggcatgtgagaaccgtccggtcaataatccatatcataagatggaaagtccgctgggttatgtaagcatgaatggacaggaggtttataaatttgctgtccgcacagttccggcaaccattacaaaagtgctggaagaggcggatttagaggcagaggaaatttcacttttcgtattacatcaggcaaacttaagaattattgaagcggtagcaaaacgattgaaacagccgatggagaaattcccggtaaatttgacggaatgtggcaatatttcggcagcaagtgtgccgattttacttgataatatcaaccggcatggtatgatacatagaggagataaagttgtactggctggtttcggcggcggactcacatggggcgcagcggtactggtctggtaaaaggagataagaatgaatgcggataaaaccttaaatgacattctggtaaagctgtttaatgatttgatggaaattgaggaaaaatgcttaatctccggagaattcatgaacatttccggaaatgatatgcatattattgaagcaattggtctggatgaaccaaagcggatgtcggaagtggcggcgaagatgaatgttacaacaggaaccctgacaaaagcaattgaagcactggaacagaaaggttatgtaaaccgttgcagaaatgacagggataaaagggtggtccgtgtatcactcaccgattccggagtccgggcatatgagcatcatgcacgttttcacagcaatatgatacatgatatcaaggaaagcctgactgaccaggagagtgagattctgattggaacactgggaaaactggtgaagttcttccagaagaaatatgaatcatatttgaaaaataaaaaatagtatatttatacaaaaaaagaagtggagaagggaaataaaaaactgttttctacttctttttaattataaaaatgaattttactggtacaaaacttgcaaaaaagaagaaaaagtacacaaaagtataaagtttttgacacaaatatgaaaaaaacgttgcgaaaaaattcatttcatactaaaatagtagtgttgatgtatatataatactcaaattaatatgtaaaggagatataatatgagctacgttgatgaagtattagaaagagtaaaagcaaaaaacgcttctgagccagaattccttcaggcagtagaagaagtactggagtctttaagaccggtaatcgaagcaaatgaggagaaatatcgtaaagaagcattacttgagagaataaccgagccggatagacagcttaaattccgtgtaccttgggtagatgacaagggacaggttcaggttaatacaggatacagagtacagttcaacaattctattggaccgtacaagggaggtcttcgtctccatccttccgtaaatatcggaatcatcaaattcttaggatttgagcaggtatttaaaaactctttaacaggacttccaatcggcggtggtaaaggtggttctgactttgatcctaagggaaaatcagaccgtgaagtaatggcattctgccagagctttatgaccgagctttgcaaatatattggcgctgacgttgacgttccggcaggagatatcggaacaggcgcaagagaaatcggatacatgtttggacagtataagagaatccgtggaatgtacgaaggtgttctgacaggtaagggacttacctatggtggatctttagctcgtacagaagctaccggatatggtcttttatacattacagaagaattaatgaaatgccatggtgaatctatggaaggtaagacagttgttgtatctggtgctggtaacgttgcaatctacgctatccagaaagcgcagcagatgggtgcaaaagttgttacctgttctgattctaccggatggatttatgatccggaaggaatcgatgttgcattattaaaagaagtaaaagaagtaaaacgtgctcgtcttactgagtatgctgctgcaagaaagagtgcagaatatcatgaaggccgtggtgtatggcagattaaatgtgatatcgctcttccatgtgctacacagaacgagctccttatcgatgatgcaaaacagttagtagcaaacggatgtaaagcagtttgtgaaggtgctaacatgcctacaaccttagatgcaaccaaatacttacaggataacggagtatggtttatctgtggtaaagcttctaacgcaggtggagttgcaacttctgcattagagatgagccagaactcagagcgtttaagctggacattcgaagaagtagatgctaagttaaaacagattatggtaaatatctatcataacattgatgatgctgcaaaacgttacaacatggaaggtaactatgtagcaggagctaacatcgcaggcttcgaaaaagtagctgacgctatgcttgcccagggcgtttgctaggcattgaacatttagagaacgcgagccataggcgaagcgtgaacttagtgtgaaagcccatcccgagacttgatgaaaacgagtcgcagacgaagtttgaatcctagccgagtggatgtcattgaatacttagataacgcagatgtcattgaacacatagaaaacatccccgaaacgttatgtttcggggactttttaatttacacgagaaactcgcaaagcatttccagtggaatttctttcctgcttggagtataatagaacgaacaacgggaaggaaagagaccggaggcaatttagatgcagaaaaaagaaagaaatgaagaattagaatatatagatgactttgagaatatcgaagaaccggaagagtcagaggacaaccgggaagaattagaagaaccagaagaggaatattcagaaggcggcagacgcaggaagaaaggaagaaaatccgatacaaagaatgcagcttctgtggcaggggaatttctaagctgggtaattacgattgtagcagcggtgctgattgctatgtttttaaatcgttttgtgttaattaatgcagagattccatccggttccatggaaaatacaatcatgaccggagataagctgattggattccgatggtcatatctgttttccggaccggagcggggagacatcattatctttaagtttccagatgatgagagccagaactatgtaaaacgtatcattggctgtccgggagatacggtaaagatagaagatggcaaagtatatgtcaacggagaactcttagaggagaattatctcaaagagacatggacggtagctacaggaccgtatacctttgaagtgccggaggacagctattttgtaatgggagataaccggaataactcctatgatggaagatactggaccaatacctatgtgaagaaagataaaatacttggaaaagcgattttccggtattggccactaaagaattttaaaatattgaattagtgcggaacgaataaggaagcaaaaggagaagatttatgataacattattagcccggatatttatccgggaagatgacaagccggagaaggtacggcttgcctacggtattttatgtggtattgtaggtattttgctaaatgtattattatttacaggaaaatttattgcgggaaccatcagtaaatccattgcaattacagcggacgcatttaataacctgtcggatgccggctcatccattgtaacattgctgggctttaaactgggagcagcaaagccggatccggagcatccatttggacatggaagaatggaatacgtttccgggcttgtggttgctgcagttattttaattatggcagtggaactgatacaggattccatcagaaagattcttcatccggaagcaacggaatgctctgcattaattatcgtgattctgctgatatcgattgctgtaaagctgtatatgaccttctacaacaggagagtcgcaaagaagattaattcagcggctatgcgggcaacggccatggacagcttaagcgacagcattaccacatctgtggttttaatcaccacattgattgcagaatttacgtcagtcaatattgacggctactgtggtgtggcggtaggactgtttatcttatatggtggaattaatgcagcgaaggagactttaaatccactgctgggacagccaccggaggaagaattcgtaaaagagatagaacatctggtgttggaagaaaaaatgattatcggtattcatgatttagtcgtacatgattatgggccgggacgtctgatggtatcactacatgcggaagtgccggcagaaatgaatatccttgtaatacatgatatgatagacaatgtagaaatgaaattgaaaagggaactgaattgtgaggctgtcatacatatggatccggtgattaccggaagcaaggaactgaccgagataaaagaaacggttacaggtattttgaaggatattgatgaggtcattaccatgcatgatttccgtatggttcagggaccgacccataccaatcttatctttgatgtagtgattccatttggctaccgttccagtgatgaagcagtgttaaaagaactggagcaccaggtacaggaaaagctgggcgaacagtatcatatcgtggtcaacgtagataaaaattatgtgaaataaaagaaataacaaagccccgatgggagaaatctgatagtgatatgtacccagaatcctggacacatatttacgaactaggctgaacacatggatgctatcctgtattgtacaggcggcatccatttt

SEQ ID NO: 905 - DNA, 9056 bp, unidentified
  source 1..9056: mol_type = unassigned DNA
atgactaagatagattctaaaataccggaaggaccggtggctgagaaatggaccaattataaagctcaccaaaaattagtaaaccctgccaacaaacgccgtttggacatcatcgtagtaggaaccggacttgccggtgcttccgctgccgcttctctcggtgaaatgggtttcagagtatttaatttctgcatccaagactctccgcgtcgtgcgcactctattgctgcacaaggtggtatcaatgcagcaaagaattatcaaaacgacggtgactccgtttaccgtttgttctacgatacagtaaagggtggtgactatcgtgcccgcgaagctaacgtttaccgtctggctgaggtatcaaacgctatcatcgaccaatgcgttgcacaaggtgttcctttcgctcgcgaatacggtggcttgctcgacaaccgttctttcggtggcgcacaggtttcacgtacattctacgctaaaggtcagacaggccaacaactgttgttgggtgcatactccgcactgagccgccaggtaaacgtaggtactgtaaaactgtttacacgctatgaaatgcaagacgttgttctcgtggagggacgtgcccgcggtatcattgcaaagaaccttgtaaccggtaagctggaacgctttgcagcccatgcagtagttatcgccaccggtggttatggaaacgcatatttcctctctaccaacgccatgacttgtaactgtacggcagctatttcctgctaccgcaagggtgcatggatggctaaccccgcttacgtacagattcacccgacatgtatccccgttcatggcgacaagcagtctaagctgactttgatgtccgaatcactgcgtaacgacggtcgcatctgggttccgaagaaactggaagatgccaagaaactgcaagaaggcactctacaaggaaaagatattcctgaggaagaccgcgactactacttggaacgccgttatccggcattcggtaacctcgttccgcgcgacgttgccagccgcgccgccaaagaacgttgtgacaaaggcttcggcgtaaacaataccggcctggccgtattcctcgactttagcgatgcaatcaaccgtctgggcaaggatgttgtggctcaacgctacggtaaccttttcgatatgtatgaagaaatcaccgacgtaagcccctatgagaacccgatgatgatttaccctgccatccactacacaatgggcggtatctgggttgactacgaactgcagacttctatcaagggcttgttcgctatcggtgaatgtaacttctccgaccatggcgccaaccgcctcggtgcttccgcattgatgcaaggtctggccgacggttatttcgtattgccttacactattcagaactatctggctgaccagattaccgttccccgcttctctaccgacctgcctgaatttgcagctgcagagaaagccatccaggagaagattgactggatgatgaacatcaagggtaagaagtccgtagactctatccacaaggaactgggccacgttatgtgggaatacgtcggtatgggacgtacagccgaaggattgaaagaaggattgaagaaaatgaaagaaatccgtaaggaattcgaaaccaacctcttcatccccggcgacaaagaaggcatgaacgtagaactcgacaaggctatccgtctgtacgacttcataacaatgggcgaactggtggcatacgatgccctgaaccgcgacgaaagctgtggtggccacttccgcgaagaataccagacagaagaaggcgaagctaaacgtgatgacgaaaacttcttctacgttgcttgctgggaataccaaggctctgatgaaaaggctccggtattgctgaaagaaccgctggtttacgaagcaatcaaggtacagactcgtaactataagagctaatcgggaagttgaacatttaaagaattaaagaaaatggataaaaatatatcatttacgctcaaggtatggcgccaaaagggtccaaaagcaaaaggcgcttttgaaacataccaaatgaaagatatcccgggcgatacttcattcctcgaaatgctggatattctgaacgaacagctcattagtgaaggtaaagagccagttgtattcgaccatgattgccgcgaaggtatctgcggtatgtgttctctctacattaacggacatccacatggccctgcaacaggtgccactacttgccaaatctatatgcgtcgtttcaacgacggtgacacgatcaccgtagaaccttggcgctctgccggcttcccggtaatcaaggacttgatggtggaccgtacggcatacgacaaaattatgcaagccggtggttacgtaagtgtacgcaccggtgctcctcaggacgccaatgctatcctgatcccgaagcccatcgctgacgaagctatggatgccgcttcttgcatcggctgtggcgcctgtgtagctgcttgtaagaatggttctgccatgctgttcgtttctgctaaggtaagccagctgaatctgttgccccaaggcaaaccggaagcattacgtcgtgccaaagccatgttgagcaaaatggatgaactcggtttcggtaactgtacaaatactcgtgcttgtgaagctgaatgtccgaagaacatttccatcagcaacattgcacgtctgaaccgcgacttcatcatcgcaaaactgaaagactaaccgtactttctacatcttagacaatataggatacggcttcggataaacctctggacaagctcaagtttatcactttgctttcactatatttgattaatatcacaaagaactcttctgtcgggaaaccggtagaagagttttttattacatagaaactactgaagctgagaaaaggctgtcccaaaggattatcatatcgtcagcatatattccccattgaaatcaggatgtcaatcgtgtgcgaaaacagtgaataacattaaaagataattaaaagaaattccgaaaaagagtaaacatttggaagatatacaaagaaaccatacatttgccatgtgatttttttcatagtattagatttaaggttaacaaaggttggagtacagcggtactcctttttttatgccaataaatgatatactcctccaaccaacgttttcaccactcctttcatttccagttcaaagagcaaggcactcatgcggtttacgggaatatccgcctccaccacaagtgtattgatatgcaagtcaccctggcggaccaatatacgcaccacagcctcttcctcttccgtcaactccggaaacaaacttcgctggatgccctctgccttaaccgacggttccgtatcagtccaacccatcattttcacaaactcccctgcactttgcacaagcgccgccttattatcccgtatcaactgattgcaaccgatagaagccgtatccgtcactcgtccgggtatggcaaagcaatcgcgatgataaccatcagctaaatcggctgtaatcaaagaacctcctttagcagcagactccactacaattgttgcatcacacattccggccacaatacggttacggctgacaaaattatgtttatccggattagtttcggtgagaaactccgtaagcagcccgccatttgccagcatatcaacagccgttttgcgatgaagcgaggggtaaatgcggtccaagccatgagccaagacggcgacagtggaaatatcattggccaaagccgcacgatgcgcatgaatatcaatgccataagcaagtccgctcaccaccagcacatcgggaagaagcgcggacaaatcgtgtaggaaatccgcacaaaactgcttaccgtattccgtagcacgacgcgtacctaccatattgatgacatgcagacgattaagatcgacattccctttaaaaaacaggacaaccggagcatcttcacattcacgcagccgggcaggataggcctcatcctgcaaggtaaggcaagtcaggcgattcttttccacaaaccccatttcgcgttcggcacgaataaaagcggcaggacagtcaagagcagtaactatggagggatttacaccgggcaggagtttcggcaactctttacgctgtctgaaaacgttgacggcacttcccgcaccgtctattaaacgctttgccccgatatgtcctataccggggcaaagcgtaagagctatactacaaaggcgttcgtcgttattcatggtcgaggtaaggggcaaagacgttatcgaataattcgctgtcgcttaaacgtccgttaaccacacataccgtttcaaccaccgccttaatggctactttattatcactctctctgaaaatatcctgataaaacacatatttgatgccttctttcttcatagccagcttcgacacaaattcgtcaccgcttttcaacggtgtcttgaaagccatattgatacgtgccactaccggatccacaccctgttcatgcagcgcggcaaagctgacacccgtactcaacaggaactcatgccgcgtatgctccagataatgctgatagttggcattgttgacaatgccttgcaggtcacactcatagtcgcggaccttcattttcagttcataaatataattcattttgatatttacggtttattcctacgtgataacacgtcttttatctctgacacatagatatattgacaatcgacgatcgggcaatcagccgcgtttgttttctatatccaagcctttgaacttcttcagttcctccacagaaaccagcttgtagagtttgtcactgggacgtattttatctgctttcatcgagaaatgctgccctttcctaacagtctgcacaggcttcaaatccacgcgtgcttcttccagggtagtaaagacagcccctgtcgtgggcccagttatcaacagtttgtcacccacgttgacttcagcggcttccaccagaaactccgccacaccgatattcgagaaatagcgaatccctttacccacatagattttgcgttccgtagcggccgagccataattccgggtccattcgcccaaacgttgtcccaaataatagccatcccaaaatccgcggttaaagacggttttcagacgttcatcccagacagctatcttttcatcggtgaatgtaccttccacgtacgaacggatggcttctttatagcattccactacggtacgtacatactcaggaccgcgggcacgcccttcaatcttgaacacgcgcacaccggcatccagcatcttgttcataaaatggatagtcttcaagtccttaggcgacatgatatattggttgtcaatatcgagttctacatccgtctctttgtcgcgtaccgtataggaacggcgacacacctgcatacaggctccccggttggcagaatggttcatctcgtgcaacgaaagataacacttgcccgataccgccatgcacaaagcgccatggcagaacatttcaatgcgtatctgctcaccacccggtccgcagatattctcttcgcgaatatggcggtaaatctctgccacctgttccaagttcaactcacgcgccagcaccactacatcggcaaactgtgcataaaagcgcaaagcctccacattcgaaatattcagttgtgtggacaaatgcacctcctgccctatctgccgggcataactcatcacagccacatccgctgcaatcacagccgaaataccggcgacttttgccgcatccacaatggtgcgcatcagaggaatatcattatcatatataatggtatttaccgtaagataacttttcataccatgctcatcacaggtctgagcaatctcccgcaaatcgttaatagtaaaggtattggcggaacgggcacgcatattcaggttctctataccgaagtaaatagagtccgcacccgcctgaatggctgcggcaagagactcgcgtgaacctaccggcgccattatttcaaaatcagtgatagaggacataacaaatctatttgtattattacattcgtaccttatttttcgcaaaggtagccttttttccgtatttttgcagccaaatcccgttagattatgaagattcaaaatatagacctcggcaagtaccctgtattgcttgcccctatggaagacgtgaccgacccggctttccgcctgatgtgcaaaaacttcggagcagacatggtatataccgagtttgtatcaagtgacgcactgatacgttccgtcagtaagaccgagcagaagctgaagatcagtgacgaggaacgtcccgtagccatacagatatacggtaaagatacggacacgatggtggaagctgcacgaattgtagaacaagcacgtccggatattctggacatcaacttcggatgtccggtgaagcgtgtagccggcaaaggagcaggagccggaatgttgcagaacattcccaaaatgctcgaaataacccgctccgtagtggatgccgtaaaaataccggtcaccgtaaagacccgtctcggttgggatgccagtaacaagattatcgtggacctggcagagcaactgcaagactgtggcattgccgcccttaccattcatggccgtacccgcgcccaaatgtacaccggcgaagcggactggacgctgattggcgaagtcaggaacaatccccgcatgcatatccccatcatcggcaacggcgacatcaccacccctcaaagagccaaagagtgttttgaccgttacggagtggacgctatcatgataggccgcgccagcttcggccgtccttggatattcaaggaagtgaaacattatctggagacaggcgaggaaatgccgcccctcagctccgaatggaagctgaacgtgctccggcaagaagtggaagacagcgtaaaactgctggacgaacgaagaggcattctgcatgtacgccgccatttggcggcaagtccgctattcaagggtattcccaacttccgggatacacgcatcgccatgctgcgtgcagaaacgaaagaagaactatatcgcatctttaacgaaatagcaaaattgaacatcacctgaacatcggctgcgcaaaccatcgcttgaacatccatgtaaccaccacatagagaacgatggcagagaaaaagcccacaatggcatcaatcaggtaatgagcctgaatatacaccgtagccccacacagcaacaaatagaaaggaagcagtccggcaaacaaacgcttgctaccccgccatgccataatcatcaggatggtggacatgccgacatgcgagctgggaaaagccgccgtcgggcgctcacccacttgttgcgaactctccaccaaattataaaagaaaccatgttcgtatcccggtccgggaagcaactcctgattatggttgaaataatcgccgatagaaggaaatactcctcttgctacatactcctcgccaatggccggaaaataaaactgtggtcctgccaccggcacgaagatataaaacagataataaataaagaaggcagtgactatgacaaacgagactttctcaaaaagctcaaaacgatagaggaaataccacaccaccaccaaaaggatcatcggatagtaaaagaagtaacccatattgaacggttcactgacccacatctgcgggaagcgcaaacagaaccatacggcaggctgcccgccgaatacccattgctcggctgaggcgaagacatggtcgagattgggaaagatgcgattgaactcaaatgtgtcaggataccagtaagaaagcagcgacatctggatagctatacggataaaagcagaaaacttacaaggcgcaagccggtaaagatacatcagtagaaacgtcatacccgcaatcacgacgcgatcgacaagcatctgcaccggatgatccatttcttggaaaagaaacagtatgagaatggaagtcaacagattatatatcagcgtgatcttctctaccgcaaaaagccctttacgggtttctactctcttgaataagtctaaagccatcctttatctttataccaggcaatggtttctttcactccccgttccaaatcatattcagggcggtagccaagttccttgacagccggagttatgtcgcattgccagttgcgttgtttcattattctatacttgtccgaattgagcgtactggtagtgttccggcatttcgcccaatattcagcgagcaaagatacaactttcaatataattaacggacatctcagacgaattacaaacggatttcccaattctttccgtatcaagtcggaaaaagcgcgactctgatacaccttgccatctgccagaaaataagcgcgacgggatatttgcttctcgattccaaggaacacagcctgcacaatatctttgacatagacaaacgtcaaatcctgccggcggaagcccactgagaagtcggtgtgttgtcggatggactttgccatcaggaaataatccttctcacgcggcccatagacacccgtaggacggtaaatgacgtacgggaaatcaggtatactttgcaggtaagcctctgccttcaacttactaaggccataagccgtattgggcaacggagtatcctcttcccttatcggagtatatgacttttcgtgtaccggaccgaacacacttagcgtactgataaaaacaaactgtccgggaatcatatccaagtttcgcaacgtatccgcaaaatttctggtttgcaaataattcacccggtcgaaatcgttcttgtccacgcactttgtcgccccggcgcaatggatgatgtaatcgaacttgccattggcttccttatgggcggacaactgcgcacaaagcacatcgggatgggcaaagtcgagttcaagaaaatgtatcctgctatcttgcaaatactcccggctgctggacgaacgaatacccgcccatacgccaaacccgcgtttcaacgcttcctccacgatgaaacttccgataaaaccacttgctcctgtaactaaaactgacttcac

SEQ ID NO: 906 - DNA, 23244 bp, unidentified
  source 1..23244: mol_type = unassigned DNA
gctgctgccctccagtatgcagccggtcatggtggcgcgctggggcatcgaccctgccaccaaggcaaaccagatcacccgggagcagaagcgggaactggtgcagctggtcaagcactggcaagtgtccattgacgcccggggcgaccttgcccacgcagtcatcaccagcggcggtgtatcggtgcgggaggtagaccccaagaccatgcagagcaaaaaggcactggggctgtactttgcgggcgaggtgctggacgtggacgcctacaccggcggctacaatctgcagatcgccttctgcaccgcacaaagctttgccaataatctgtaaaaaagcagtgcagtccattcctgtgtactatatataaataaggagaacatatcatggtatctgttgcaattgatgggcctgcgggtgcaggcaaatccactctggcacgccgtctggcggcagagctgggctatatctatgtagacaccggcgcaatgtaccgcgccatcggcctgtacgccctgcgcgcgggcaaggaccccaaggacaacgcggcggtggacgctctgctgccggaaatcgagctgcggctggcctccattgcgggcgagcagcacatctacttgaaggacgaggacgtgagcaccgccatccgcaccgaagccgcgggtatggcagcctctgccgtgggtgcaaaccccgccgtgcgggcatttctgctggacttgcagcgcagcatggccaaaaagcaggatgtgctgatggacggccgggatatcggcacggtggtgctgccggacgctacggtgaagatcttcctgactgccagcccggaggcacgcgccacccgccgctggaaggagtatcaggccaagggtatcgacactccctacgaggaagtgctggcagacgtgaagcagcgggactatcaggacacccaccgcgccgccgccccgctgaagcaggcggaggacgccgtgctgctggatacctcggaactggactttgagcagagccttgacgccatgaagcagatcattgcccatagaaatcaggtttccgaatgaaggcttcccccggccgggggaagctgtcaccgcaggtgactgatgagggcgtaggcgagtagcagcttacggggaaattacccctcatccggcgctgcgcgccaccttccccccaaggggtgaaggcttttgctcagggtcaatctgcaaaagatcggctgataaaacaaacaggacaggaatagaaaatggtactatattatattctggtgccccttgcgtggcttgtgtggcacatcggctttcgcatccgggtagaggggcgcgaaaacctgaaaaaagtgcagacgaagggctatatccttgcgcccacccatgtatctgctatcgacccggtgttcatcgttgtcacccgctggggcaggcggatggtggtgttcgccaaaaaggaactgttcgagatcaacgcctttctgacctggttcttccgctgctgcggcggcgtgtgcgtccgcggcaccaaggacgagatggcggtcatcacgcagacggtggaagcctgcaaacagggcaagaccctgctcatcttcccggagggcacccgcgaaaaggagggcaaactgctgccccccaagagcggtctttttgtcattgccgccgaagccggggtggacgttgtgccctgccgcatcttctacgacaccccggacggaaaaatgcacctgttctgcagggtgcgggtgatctacggcgagccgatgcccgcagcacagtttgccatggaaagccgccgggacaccaaaaaactccgtgccaacaagcaggcattgctggaagcatgggaaaagatgggagcgtaaaaaatggagatccgtttggctaaaacggcggggttctgcttcggcgtgaaccgtgccgtggaactgacctataagctgctggacgaggggcacagggtagcaacgctgggcccgctgatccacaacccacaggcggtggaggatatgcggcgcaagggtgcacaggtggtaaacaccgtgcaggatgtgcctgccgggtgcgaggtggtcatccgcagccatggggtgccccgcagcatctacgacgagctggagtcgcgcggcatcccttaccacgatgccacctgtccctttgtgcagaagatccagcgcattgccgcacaggccgaaaaagagggcgcggtgctgctggtggcgggtgataagacccacccggaggtgcagggcatcgtgggacacacccggggcgaggtgttcgtttttgccgatttagccgaattggaggcgtggaacggcccttctgacccccaaaaacccctttttgcagttgcacagaccacatttcaggtaacaaaatggaaagaaagttcggagtttctcaaaaaagcctatacaaacgcccgaatttttgatacaatatgtaatgcgacgtgggcgaggcaacaggaagcggaagacctcagccaaaaatgcgacattgttgttgtcattggcggtcatcattcttccaatacccaaaagctggtacaggtcgccgcaaaacacacgcgtgccgtaacggtcgagacagcgagcgaacttcggccggaatggtttgcagatgttaaagtggcgggcgtgacagccggggcttcaacgccatcgtctattattgaggaggtacttaacagtatgagcgcagaaatcaatgacagcatgagctttgaggagatgctgaacgcatccgaagaaaagcgggttcatgcaggcagtattgtgaaaggaatcgtgaccagcatctctgccaacgagatccaggtggatatcggtgcgaagcagaccggctttgtcaagctgagcgagctgaccgatgattcctccgccaaggtcgaagacctggtgaaggttggcgatgagctggacctcatcgtcgagaaggttatggatcaggatggcgtcatccagctctcccgcaagaagctcgcatctcgcaagggcatggaagagatcgccaaggcagcagaatccggtgaagtcgtcgagggcgatgttaccgagttcaataagggcggcgttgtcgtcaacgtcaagggcgtcaaggtgttcgttccccgttctcaggccactatgcgccgcgacgaggactacactgctctggtcggccagcacgttcagctggtcgtcaccgagtgctctggccgcaagatcgtgggcagcatcaacaaggtgaccgctgagcagaacaaggcaaagcgcgaggagttctgggcaaacgttgaggtgggcaagacctacaccggcgttgtcaagagcctgacctcttatggtgcattcgttgacatcggtggtgttgacggcctgtgccacatcagcgagctgagctggaaccgcatcaagcacccctccgaggtcgtctccgttggtgacaccatcgaagtgtatgtcaaggacatcgacaccgagaaccacaaggtctctctgggctacaagaagtccgaggacaacccctgggagcagctgaagaacaactaccccatcggcagcaccttccacgctccggtcgtttctctgaccaagtttggtgcattcgtccgcatcctgccgggtgttgacggtctggtccacatcagcgagatcagcaatgaccgcgttgaaaaggtctccgacgcactgaaggtcggcgatatggtcgatgtgaagctgctggatgttgacttcgacaagaagcgcatcagcctgtccatgaaggctctgctgaacgacgacgctgagtaatcagcccttcgtgcaaaagcatagcttctgacacaatgcgatctgcagccccgttgccgggaaaacggcggcggggctgtttttgttaacaaagccatgatgaaatttttaaaaaagcactgggaagtgctcagttacctgatcttcggcgtgctgaccaccctgctgaacatcctgctgtacgcgctgttcagccggctgttcggctatactgccgccaacagctggggcaatgtgctggataacgccttatgcatcctgtttgcctactgtaccaaccgcgcgttcgtgttccgcagcaagaccaccggcaaagccatggccaaggagttcggcacctttgtcacctgccgtctgggcaccatggtgttggatgccgttatcatgatcgtgggcggcaacctgctggcggcgcagggcgcggcgctgatggaaagcctgttcggcagcttcctgacggtatcgggcagctacaccggcgcggcggcttcggcagcagcatcagtagcgggcgttgccatcattggcggcgcagacggcccgacagccgtttttgtcaccacccgcatcaccgcgcaggagatctgggggctgtgcgtcaaggtattctccaacgtggtggtcgtggtgctgaactatgtgttcagcaagctgatcatctttaagaaaaagtaatggaaaagttacccctcatccgtcacctgcggtgacaccttccccccaaggggtgaaggcctaagaagagcaggcttcgcctgaatttgaaatgaaggacgttaaaaacggaatgctgacaccactctctcaaacgctgcgccggaatatgacgcgagaagagagacatttgtggtatgattttttaaaaagtcagccggtcatttttaaacggcagaaggtcatcgggaattatatcgttgattttttctgtgcagaagccaagcttgtaatagaactggatggctcgcagcattataatgatgcgggtaaggcggcagatatggtacgggaccaatacctgaaggacaagggtcttacggttttgcgctactctaatctggagattgcggaaaattttgcaggagtttgtacagatatccgaaaccatatcggcagatgcacctaaagccttcccccggtcgggggaaggtggcacgaagtgccggatgagggcgctttacaagaaacaatcatcttaggaggtacggtattatgaaacgtggtctgaaagggttcgcattcctggtttccggtctggtgctgggcatcattggtgcaacggcatcggtgactgcgatcgcactgagtgctgtgggcatggcaaaggtgcgccgtgccagcaagtaaaacaacggaggaacgagaatgaatcgcgaagagatcctgtcccatgtcgatcataccctgctgaagccggaggctacctggccccagatccagcagctgtgtgacgaagccattgcaaaccacaccgcatctgtctgcatcaacacctgctacgtcaagcaggctgtggagtatatggcaggccgcatccccgtgtgctgcgtggtaggcttccctctgggtgctatggataccgccagcaaggcctttgaagccaagactgccatcgccaacggcgcagccgaggtggatatggtcatcaacatcggccgcctgaagaacaaggagtacgatgctgtccgcgaggacatccgtgccgtgaagcaggctgtgggcgataagattttgaaggtcatcattgagacctgcctgctgaccgaggaagagaaggaaaagatgtgcgacatcgtctgcgaggccggtgccgactacatcaagaccagcaccggcttctccaccgccggtgccaacttccatgatgtggagctgatggtcaagggcgtgcatggccgctgcaaggtcaaggctgccggcggcatttccaccgtggaggatatggagaccttccttgcactgggcgctgaccgtctgggcacctcccgcgctgtcaagattttgaacggcgagcaggcaaagggctattaagttttctgcaaaaaaggtatttcggcaaagctctgggcttggctgaactgcaaaggatgatttcccaagggctgctgcacaaattgccgtgcagcggcctttttgcgtccaagccttgcaagcagggtgcagcagggtgtataatacagatagatactgtataaaacagggggctgcccgctttatggggtaaggcgggcagaggaggaaacgcaatgaatatacccgagatccttgtggccaatggcacaggggcggtgctggtaagctttttgcttttgctgcgggtgcgcggcgagagcaaaaacagcgtgggaacagagctgttttgccggattctggtggtgacgctgctggcacaggcaacagagacgatcagctttctgttggacggcgtgcccggcgcggtaagccggttctggctgtacctgaccaacaccgtctgcaccggcgctaccgtgagcgtgggctatgcgtggtgtttgtatgtggacttccgggtctaccgcagcattggacgcctgcgcagaagacactttctgctgggcgcgccgctgctggcgcttttggtgctgctggtggcaaacctttttggcacggggtggatctttaccatctcggcggacaacgtttaccatcggggtccgctgaatatcttgctgtatctgctgctgttcagctattacgccgagagcgtgtggcaggtgcataaggccaagcgcgatggcgttacggtggagtttttcccggtgtactacttcgtggtcacctgtgcggtgggcacgctgctgcagggcgcattctacggcatggcctttggctggctgtcagtagccatcgcttttgtgcttgtggacagtcagacccgcagcctgcgcggctataccgatgaactgtccggcctgtttgggcgcaagtacatgaactactgtctggaccgcatccacgccacgcaggagaaggacgtttacggcatcatgatggacgtgaactgcttcaaggagatcaatgatacctacggtcacgccgagggcgaccgcgccattcaggagatcgggcacatcctgtccggggcgctggcagcaaactcggtagccatccgcatgagcggcgatgagttcatggtgctgatccgtcatggctcggaggagcttttgggtaagacctgcgccgccatcaagcggcgggtgcagcactataacgaaaccgctccggcgggcagctttcagctgtccttttccaccggtgtggcaaagtacgagggcggcagcgtggagaagtttctggtggagctggatcagcggatgtatgcggaaaagcgtgccttccacgccgcccgggacggccatgcagcaccggagcagggaaatgctccatcaatttaaaaggaatgtctaaaataagtgagacttatcttgacaatctgacgctgcaatgatagaatatggagcgtaccaattgaataccgacttatcaagagcggctgaggggacaggccctgtgaagcccgacaacctgcgcgagagcgtaaggtgccaaatcctgcgggaaaccggaagataagagtgcaacgctcagagctttcggctctgggcgcttttatttttcagaacaaacttgatggaatggtaaatacacgcaactgcaacatttaggaggcaaaaaatggctagacacctgtttacttcggagtccgttaccgagggacatcccgacaagatctgcgaccagatctctgatgcaattctggacgagatcctgacccacgaccctgatgcccgcgtggcctgcgagacctgcgcatccaccggccttgtgcacatcatgggcgagatcaccaccagctgctatgtggacttccagaaggtcgtccgcgaggtggtggcagatatcggctacacccgcgcaaagttcggctttgacgccgacacctgcgccgtcatctccaacattgacggtcagagccccgatattgcactgggcaccaacgatcaggtgggcggtgcaggcgatcagggcatgatgttcggttatgcctgtgacgagacccccgagctgatgcctatgcccatcagccttgcccacaagctggcaaagcgcctgactgaggtgcgcaagagcggcgagatggactacctgcgcccggacggcaagagccaggtgaccgtggagtacgacgagaacaacaagcccgtgcgcgtggatgccgtggtcatctccagccagcacagcgagagcgtgagcatggagcagctgcgcgcagacgtgatggaaaaggtcatcaaggccaccatccccgccgagctgctggacgagaacaccaagtactacatcaaccccaccggccgctttgttgtgggcggcccgcagggcgataccggtctgaccggccgtaagatcatcgtggatacctacggcggctatgcacgccacggcggcggcgctttctccggcaaggaccccagcaaggtggaccgcagcgcagcctacgctacccgctgggtggcaaagaacatcgtggctgcgggtctggcaaagcagtgcgaggtgcaggtggcctacgccatcggcgtggcaaagcccgtgtccatcatggtggataccttcggcaccggcactgtggcagacgagaagatcgagcaggctgtggagaaggtgtttgacctgacccccgctgccatcatccgcgagctggatctgcgcaagcccatctaccgccagctggccgcctacggccacatgggccgcgaggatctgggcgtgaagtgggagaacaccgaccgcgtggatgccctgaaggctgccgtggctgccctgtaaaaagcgtttttccatagaaggtacgtgaagaaaaaagccgctgcacctgaccgtgcggcggcttttttgtgggtgcggcagcgcttccccaaaacggtactgtaaaatacataactccggttcttgcccggcggcgctggctgtgttacactaaggtcatatcgaactgcaagaatatgcccacaaggagggaaccggactttgaaacatctgcattcttttgcccgccgcgcggcggcttttctgctggcggcggtgctgtgcgtctgcatcccggcggcagcggcttcggctgccaccaccatcggcggggccgataccaccctgatccccgcagaggacgaaaactgtctcagctggctgtttggctccaaggataagatcaccatgccctacctgaacatcaaggggcaggggctcaagcgcaatgtcacactggatctggtggattgtctggtgggcatcacctacaccgaacttggctccattggcagctatgtcagcgccagcgctgcgcagcaggcgtggaaggcgcaggcggtggctatccactcctatctggaataccacaagcagtacggctcgtccgccaatgcgctgatctacaccccggtcagccagatcccatcctccacccgtagcgccatccgcaaggcggtgcaggcggtcagggatgaggtgctggtgtacaacggcagcgtgtgcgacgcggtatggtcggccagtgcgggctacaacacccagaccggcgtgtacggcacctgcgccagtctggacgcatggggcacggacgtgccctacctgcaaagcgtggaaagcccctacgaggagcagtaccacaacctgctgcgccgggtgatcggcaaggactacacctatatagaatacaacgacagccgcaccggcgagccctatcagagcgccgacactacccacaaggatctgggcggctttgtacagtacaacacgctggtgtccaacgggcgcagctaccggtacatcaaccagttcgtttcctcccgctactgcttcgatttcggcaccgatgccggcggcaccccctgcatgacctattacggctatggtcacggcgtgggcatgagccagtgcggcgcagtgggctacgccgccgaggaaggcatgaactacaagcagatcttacggcactactacaccggggcgcagatccgtacccgcactacccgcagcggcgggctgttcggctggcttgcggggttgttccgctgagcggctatttgactgaaattttggaaaaaccttctcaaacgccgcaggatttggtatactatatccgtttgtgaaaaatgaacgggaaacataactgcgcagaaaaacgcacggattggagtatcagcatggagttggatcaggaaaagcagaatcaggaggccgccgagcgctgccgtgcactggcacagcgcatcgtgcgggaactggcaccccgcagtgtgcaggtgctggagaacagcggcctgctggaagaggcttttgacaaaatgaataccacggtggtgcaaagcagcccggagctgctggtggtggcagaccctcagtgggtcaccctgcccgccgtgcaggccgaaaaggtggtgctggtgtgcgatgagtacaccggtatggcagactgcgcaaagcagcttgccgcacagggcttttgccgggagtttgcatggaaggacagcggcaaggagcagctgacggcgctgttctgccgcacggctgccccggagctgccggagctggagacgggctatgaacagcagctggacattttgcgggagcgtactgtgcaggccgagcgcaccgccgccgaacaggctgcccagctggagcggctgcgcagcgacctttccctgagccgcagccacgagcaggacttggaaaagaccctgaacagtgtggtcaactccaccttctggagggccagctggccgctgcggtatctggtaagcaagtgccgccagctgtggcgcaccttcccgctcttcgtcttttttgccaccctgcgccgggtgggctttgcgggcgtaatggcacaggccaaggccaagcgggagtataaaaagctgttcccgggcaaggccatgcccgccgaccgctttgcggacgtggaactgctggtaaagcaggccgcagaccagcccgctgcaccgtgcatcagcatcgtggtgccgctgtacaacaccccccacgattttctggtggagctgctggactcggtgcagaaccagacctaccgcaactgggagctgtgcatggtggatgccggacaggacgcggacgtgggtgtccttgtgcaggagcgtgcccgcaccgacagccgcatccgctaccggaaactggacagcaacgagggcattgcgggcaacaccaatcagggctttgcccttgccacgggtgaatatatcgctctgctggaccatgacgatattctgcacccctgtgcactgtggtatgtggccgaagccattgccaagcagggcgcggactttgtgtacaccgacgaagtgacctttgaagggaacatcgaccacctgacggtctaccacttcaagccggattatatgctggataacctgcgctccaacaactatatctgccacctgagcgtgttcagcgcggcgctgctggcaaaggtgggcggcgacgagcgggcagagttcaacggcagtcaggattacgacctctacctgcgcctgaccgagcaggcagagaagatcgtgcacatcccgcatctgctgtactactggcgttccagccccgcaagcgtggccagcaacatctccgccaagacctactgtctggaagcagctatgaaggcgctgcgcgcccactacgaccgcatgggcgtgccggtggacgcagtgaccatggtgcccaacaccccgggcttttataagaccgattacaccatcacaaagcccgggcgggtcagcgtgctgatccccagctgcgaccattcgggcgacctgcgggtgtgcgtggagtccatctaccgcaagaccacctacccggattttgaagtgatcatcatcgagaacaacagcaaggagcctgccaccttccgctgctacgagcagctgcaaaaggagtacccggacaccctgcatctgctcacatggcagggcaccggcttcaattacagcgccctgaacaactttggcgcaaaggctgccaccggcgagtatctgctgttgctcaacaacgacaccgaggtcatctctccccgctggatggaggagatggtcatgtacgcccagcaggaccgcgtgggctgcgtaggcgcaaagctgctctacccggacaacactatccagcacgcaggcatcggctttggtttccggacgctggcggcgcatatgcacaagaacttccctgtgggacaccccggctatatgggacggctttcctacgcgcaggacgtgtacgcggtgaccgccgcctgcctgatggtgcgcaaggatgtgtacgagcaggtggacgggctggacgagagctttgccgtggccttcaacgacgtggacttctgcgtccgtgtgcgggaggcaggctacaccaatgtgttcaccccctttgcgcagctgtaccactacgagagcaagagccgcggcttggacgagagcccggtcaagcgcaagcgctttgtctccgaggtggagcgcttccagaagcggtgggcaaagcagctggctgcgggcgacccctgcatgaaccccaactttgatctgatgaaggaggacttcagctttgacatcaagccgctggagtgagcctttgacccaaactgaaacgaaagggagaacgcagatggagctttcggcctgcatcgtggtgtataacggcgcacaggaagccatcaaggccgcgcagaccgtgctggactgcacccgccgctacccgcttacgctgtatctggtggataacgccagcccggacggcagcggcaagcggctgaccgctgccgcaaaggacggcactctgcgcaccgcccccgggcagaccgtgcaggtgctctgccggctggagaacggcggcttcggcaccgggcacaacacggtgctctcgctgctgcacagccgggtgcactttatcctgaacccggatatccagctgaccgcggataccctgagcgaccttgccgactggatggcggcgcaccccggcgtggtgatgacccgccctgggctgaccttcccggacggcagaccccagcagctgccgctgcgccggtgcaatgtgcgcgccatggtctaccgtcagctgccctgtctgcgtttttgggcaaagtacaacgaccgctacctgatggcagacaaggatctgacaaagcctaccgagatcgagttctgcaccggcagcttttcggcggtggacactgccgccttcaaggctgtgggcggctttgacgaggggtactttatgtatgtggaggacgccgatcttacccaaaaaatgcgcacgcagggcaaggcatatctggtgccccagtacaccgccatccacgcatggcaccgcgcggcgcaccgcagcctgaagccttttctgtggcagctgcgcagcctgctgcgctacttttccaaatggggttttgcgtggtgagcggggacgaaaaatattgtttttgatccgcagaaagcggcgtgccgatggcacgccgctttctgacgtttcaccctcttgcattttgcgtgctttcatagtaaaataaagtgtactgctatcgtcttttgcaaaaatacggacgcggcagacccaaaattgtttacagcggacgcagctccgctttgaattaagctgcacatctttttataagaaaaaaggagtgcacaagtatgaaaggcattattctcgccggcggtgccggcacacggctctatcctttgaccatggtcaccagcaaacagctgctgccggtctacgacaagccgatgatctactatccgctgtccacccttatgctggcgggcattcaggatatcctgatcatctctacccctaccgatacgccccgctttgaggcgctgctgggcgatggcagccagtacggcatccatctgcagtataaggtgcagccctccccggacggtctggcacaggcctttattctgggcgaagagttcattggcgatgactgctgcgccatgatcctgggcgataacattttctacggcaacggcttctccaagctgctcaagagcgctgcggccaatgcagagaacaagggtcgctgcaccgtgttcggctactatgtgcaggatcccgagcgctttggcatcgtggagttcgacaaggacggcaaggtgctcagcgtggaggaaaagccccagcatcccaagtccaactacgccatcaccggtctgtacttctacaacaaggaagtggtggagatggcaaagcaggtaaagccctctgcccgcggcgagctggagatcaccaccctgaacgatatgtacctgaagaaggacgagctggatgtgcagctgctgggccgcggctttgcatggctggataccggcacgatggaaagccttgtggaggctgccgactttgtgcacatgatcgaaaagcgtcagggcatcaagatcagcgcaccggaggagatcgccttcaagtacggctggatcgaccgcgacaccctgctggaaagcgcccagcgctacggtaagagcccctacggccagcacctgaagaacgtggccgaaggcaagctgcgctactaagcataaggaaaggcacattggtatgaaaatcattgtcacaggctgcaaagggcagctgggcacggagctgctcaagcagctgcaggagggccgcagcgagctgggtcccatccccgaaaagctgctcaacgctacggtgatcccggtggatctgccggagctggatatctccaactacaagatggtggacgagttcgtgcggcgcaaccgcccggatatcatcatcaactgcgccgcctacaccaacgtggacgggtgcgaagtgcaccacgacgatgcctttaaggcaaacgcccttggcccccgcaatctggcgcaggctgccgaaaagaccggcgcacggctggtgcacgtttccaccgactatgtgttctccggccgggaaaacggcggcattccgcaggatgaagccaccctgcccgggcccatcagcgcctacggctctaccaagctcatgggcgaaaagtatgtggaacggttctgccaccgccacttcatcgtgcgcaccgcatggctgtacagctactacggcaaaaactttgtcaagaccatcgtgaatgccggcaaaaagttcggtaagctggaggtggtcaacgaccagtgcggcaaccccaccaacgcagtcgaccttgcccacgagatcctgcagctgtgcgtgacccacgagtacggcttgtaccactgcaccggcgagggcatctgctcgtggtacgattttgctgccgagatcatccgcctttccggcgtagatgctaccgtagccccctgcaccagcgaggagtacaaggcaaagcacccggacagcgccgaccgccccaagtggagcgcactggacaaccggatgctgcgctgcactgtgggcaacgatgtccgcgactggaaggacgcactggcctgcttctttgccaactgggacggcgaaaacggcatgaagtaaagaagccgttttcataagcgcaccgcttacgaaaacagcttttaaaacaacaccccctgcggaagaactgaggatgtatcatgtttgatgcgatttttagcagatctgtcaagatattaaagatctttgcaaaggtgcagtgtgtgctgtcctttgtgcttgcggccatgctgtgcggttcgatccatgaagcactgaagcccttcagccagttttcagccatcgtggtggggctggtggccgctgtggtgctgtgggtgctgcagatgttccttgcatgggcactgtatgcctttgcggagctggtggagtacaccaaagagactcacaaggagctcagcaacatgagcgagggtctggcacggtacacccaagccacctacgaggaaattcacagcatgaacaaagggctggaagcatacgccaacgccatgggcaagaccatgaacagcatgaacaagaacctctaccttgtggcaaagcactgctgcgccgaggaggaacgcgcccgcgccgcagcccgcccgcagtccggggacaacaacaaataaataaaggggaatactgacctatgaaaacctatctgatcaccggctgcgccggttttatcggttccaactttgtgcactatatgctcaaaaaatacccggagatcctgctggtcaatctggataagctgacctacgcaggcaatctggaaaacctgaaggacgtggagggcgacccccgccatgtgttcgtgcagggcgatatctgcgataaggagctggtggagagcctgtttgcaaagtacgatttcgactacgtcatcaactttgccgccgagagccatgtggaccgctccattaagaaccccgagatctttgtgcagagcaacgtgatgggcaccgtcaacctgctgcagcgcgccaaggaggcatggtacgacgccgatgccaagacttggaaagagggcaagaagtacctgcaggtgtccaccgatgaggtgtacggcgctctgggcgcagacggtttctttatggagaccacgcccctgtgcccccacagcccctactcctcctccaaggccagcgccgatatgttcgtcatggccttccacgacacctatgggatgccggtgaacatcacccgctgctccaacaactacggcccctaccagttcccggagaagctgatccccctgatgatcaacaacgtcaagcaccacaagcagctgcccatctacggcgatggtatgcagatccgcgactggctgtatgtggaagatcactgcaaggccatcgacatggtggccaacggcggcaagatcggtgaggtgtacaacgtgggcggccacaacgagcgccccaacatcttcatcgtcaagaccatcatcgcccagctgcacgaccgcctgcaggacgagggcatcagcgaggatctcatcaagcacgtcgccgaccgtctgggtcacgaccgccgctatggcatcgaccccaccaagatcaagaacgatctgggctggtaccccgaaactcccttcgagaagggcatcgtgctgaccattgactggtacctgaaccacgaggagtggatgaaccatgtcaccagcggcgactaccagaactactatcaggatatgtacaagaataagtaacagactgtaaattcaaactccccctgcaccgtgagatgcagggggagtttttggttcaagtgcagcgcttgctttccccgcgtagcggagcgcatttcaaatcgtcccgccttgggtggtctccaccacaaaatccgcgctttcggctatgccgtactgcgcaaaatacccctcctccagcggcacccaccgggcggaaaaatccgcgtagcgtgcgccctcccgcgcttgtaagcgccgggtctgctcgggctttgcgcaggtcacgaatacccgcagcgtctcgtaggggcgcagcagtgggtggtgactgtaactgccctctaaaatcaccagcggctgcgcgggcagctgtgcagggggcagataagccccctcccggcagctgtatgcccggtagtccaccgtctgccccgcgtaggcagggcgcagggcttcgtcccgcaagcgggcaaggtccatgttggcgcagggggtgtgcgcccagtccgggatgcgctgcgcgggcggcagatagaaatcatccgtgcgcagcagggtgcagccgggcagctgcgccgccagcccgttggcaagggtggtcttgccgctgccgcagcggccgtccagcgccagtaccagcgggcgggtgggcttttgcgccagcgcggcgctcagcagcgcagacagggtggacgcggtgatgggtgtgggcatgggggtgaacctccttggcagggtgcgccccaaggggcagacccgagaatatccccattataccacgactgccgccggaagggtagcgcgggtgtggtttgttataaataacttttttgccggaaaggcttgacacagccggtggtgctgtggtacactactgacgttagaaataactaactacataagaccccaccggcagtgcccgcagcccgggcgtgctgcttcttttttgaagtgctggttagctacgtcttactcataacagcccggcatccggggcacactgaccctgacaccgccgccaaaggagaaccgccatggagcgtgattttgagaccgtaatgatcgaacaatgtgccccggtactggcggggctgaagcctgcggggctgttccgctacgaaacgcgcgaccgtgccgaccttgcccggcgggtggcgggctggaacgcccagctgaaccccaagggcctgcaggtgcgggtgctgcgggggtgcatcgctacccggcagtatctggtgtacgtctaccgcgccgccaagctgcaaacggtgctggcagatgccgccgtgcgcggctttttagcccgggagggctaccgtctgccggaagatgccgcggactgcggtgccttgctcgaccagctcagcctgcgtctgtgctgtgcggcagaggcggcggatttcccccatgagatcggggtatttctgggctatccgctggaggacgtggagggctttatccgctaccggggcaagtgttttacctgctgcggatgctggaagtcctacggcgaccccgccgccgcgcagcagcactttgaccagcttgccaagtgcacggcggtgtacctgcggctgttccacagcggcacgcccattttaaagctggcagttgccgcctgaaaaattgatattctcttttcaaatactctcttttatcctggcaactctcctatgcttccgacacaggagagggcgatcctcctttttacacatgaccgcccggtgcagctttgacccctgtgccgggcagtcgtgcgtttgggggaatgcgctcccgcgcggggtgggacgattgggaatgcgctgcgctccgcgggggaagtttctgcctgccttcagcgtgcagggacgctccgctgggccagaggcagggaggggtgttccgactcccccctccctacctctggactccacccaccccgcaacgggccaagggctgcacgcccttgacaatcctaaagaagaagtcgaagcacaaaaaagctagcgctgcgccagtcggcgctatcgctttaacgcttttttcgcttctccattaaaagcccctcagtcgctgcgcgacagctcccccaagggggagcgagcacgcccgcacactttgcgcttgagccgggaagtgtaccgccatgccaagggccccatcccagagggggctggcacggcgatagccgtgactgggggagtttagcgcgttagcgcctgagagggtttttctccgtcaccctgccctataaaaccgcaaaacaccccttaaaaatgtaaacaatggctaactttaactcaagaaatagagttagttattgatgattttgataaaaatgcagagcgatgccggcataaaatttgtttgttcatataaactaactataagatatgaaaaaactattgacaagcttggttagcagaggtaaactatctacgctgatagttacggctgactaaccaccgcagcatcacatatttttcaagggaaggggagcacagcgatgatgcctttgacgatgacaaaagcaggcgagaccgtcaccatccgcagaatcagcggcaaggacgaggtgcggctgcatctggccgagctggggttcgtggttggcagcgaggtgaccgtggtcaacgagatcgcgggcaacctgatcgtgcaggtcaagcagagccgtctggcactggataagaccatggcaagccgcatcatggtgtcctgagcagcgccttcccggtgctgcatgaaatactgcaagggaggaacgagtacgatgaaaacactgaaagacgtaaaggtgggcgagaccgccaccgtggcacgcctgcacggcgaaggcccggtgaaacgccgcatcatggatatgggcatcaccaagggggtgcagatctatgtgcgcaaggtggcaccgctgggcgaccccatggagctgaccgtgcgcaactacgagctgagcgtgcgcaaggccgacgctgagatgatcgaagtggtctgataagaccaaagggaggaaaggtatccgcaatgagcattaaaattgcactggccggcaacccgaactgcggcaaaacgaccctgttcaacaacctgaccggctccaaccagtatgtgggcaactggcccggcgttactgtggaaaaaaaggaaggcaaactcaagggcgataaggacgtgatcattcaggatctgcccggcatctactcgctgtccccctacacgctggaagaggtggtctcccgtacttaccttgtgaaggagaagcccgacgccatcctgaacatcatcgacggcaccaacatcgagcgcaacctctacctgaccacccagctgatcgagctgggcatcccggtggtcatggctgtgaacatgatcgatctggtgcgcaagaacggcgataagatcgacctgaagaagctgagcgcagagctgggctgtcaggcagtggagatcagcgccctgaagggcgagggcaccgaggcagccgccaaggctgcggtggcagctgccaaggccggcaagaccggcgagctgccccatgtgttcaccggcagtgtggagcacgccattgcccatatcgaggagagcattcagggcaaggtggatgaccgtttcctgcgctggtacgctgtcaagctgttcgagcgcgacgacaaggtgcaggatgagctgaagctggacaagaccctgatggatcacatcgacgagcacattcaggactgcgaaaaagagatggacgatgacgccgagagcatcatcaccaaccagcgctatgcatacatcaacaccgtggtgggcaaggctgtcaagaagaaggcccgcgtggagcacctgaccgtttccgataagatcgaccggatcgttaccaaccgtgtgctggcactgcccatctttgcagtggtgatgtacctgatgtactccctgtccatgggcacctccattgcggacggcggctgggccatcggtacctttgccaccgactggaccaacgatgtcctgttcggtgagatcgttcccaatgcgctgggcggctttttggagagcatcggcgtggcgggctggctgtacggcctgatcatggacggcatcgtggccggtgtgggcgcggtgctgggctttgtgccccagatgctggtgctgttcttcctgctgtctatcctggaggacgtgggctatatgtcccgcgtggcctttatcatggaccgtatcttccgcaagttcggcctttccggcaagagcttcatcccggtgctggtgggcaccggctgcggcgtgccgggcgttatggcaagccgtaccatcgagaacgagcgtgaccgccgcatgaccatcatgaccacctgctttatcccctgcggcgcaaagatgcccatcatcggcctgatcgccggtgcactgttcggcggttcttcgctggtggcagtgtctgcctacttcatcggcatggcagccatcatctgctccggcatcatgctgaaaaagaccaagctcttcgcaggtgatcccgctcccttcgtgatggagctgcccgcctaccatgtgcctgcatggggcaacgtgctgcgggcaacctgggagcgcggctggtccttcatcaagcgcgcaggctctgtgattttgctcgctaccgttgtgctgtggtttatgcagggcttcggcttcgagaacggtgccttcggtatggtcgaggatcaggacaactccgtgctggctgctatcgctaccaaggtcgcatggatctttgcacctctgggcttcggcaactggcgtgcaaccgtcgcttccgtctccggcctgattgcaaaggagaatgtggttggtaccttcggtgttctgtatcacttcggcggcgagctgtctgagaacggcgacgagatctgggctgctgttgcgaaggactacaccgctctgtcggcttacgccttcatgatcttcaacctgctgtgcgctccctgcttcgctgctatgggcgccatcaagcgcgagatgaataacggcaagtggacggccatcgccattggttacatgtgtgctctggcttactgctctgcgctggtggtgtatcagctgggcggccttatcaccggcgaggtgcacttcggcctgttcaccgtggtggctgttgtggtgctggcagcgtttatctacttgatggtgcgccccaacaagtacgcaaacaacaacgaagtaaagctggatacttcccgcatctgatagaaacgaaagggtgtatgctgtatgatggaatttattgcaacaaactttaatctgcccaccatcatcgtggcagcgctggtattcggcgcgctgggctgggtcgtatggcacacccataagcacggcggcggctgcagctgcggtggcgattgcagccactgcaagggctgccactaaacactgaaccgcaaggagcgcgggctgaaactctcggctcgcgctccttttttaagtaaaataaagttagcttgtgataacaccgggcaagccccggcgcgtaaaaaggagagtgaccggtatgcagctgaccgcagcgcatctgcgctatctgctggccatctacgaggtaagccgcacccatctggacatcagctcccgcagcattgcggaaaagctgggggtgacaaagccctcggtggtgcgcattctgaacctgctcatggagcagggcatgatcgtaaaggaatactacggtaaaatttacctgaccgaccgcggcatctgggtggcaaagcgggtgcagcaggagctggacgccattctggcgcactttccgccggtgagcggggagctgactgacgaggaaaagtggagcgccgcccttgctatgaccagcgctttgccccagcgccttttcaccgccgactatgagcggatggtggaaggggaagaggagaaacacccatgataaacaaaaaactgctgtccttcgaccgggcggcgctgcgctatgtttgggcaaacgtggcgttccagtggctggggctggtgtgtaatatcatctttgtccgggcggtcgcacggctggtgggggcggcctttgcgggcagcctgaccgctgccgcgctgcggcagaatatcctgctctgccttggcacagtgccgctgcgttttgcctttaccatgctggcttccggcatgagcgatcaggcctcgcgggacgtcaagcgcaccctgcgcagcaagatctatgaaaaactcacccgccttggccccggctataccggcacggtggctaccagcgaggtggtcatgctggccagcgagggcgtggagcagatcgacacctactttgcaaaatatctgccgcagctgttctacagcctgctggcacctgtcaccctgttt

SEQ ID NO: 907 - DNA, 21329 bp, unidentified
  source 1..21329: mol_type = unassigned DNA
ttaaactttagggattttgcgtccacataccagctgcaggccgtattccgccgcaagctctgcggattgcacggtgggcatacttttgcttaccagcaccggcacccccgcgcggatggccttgcgcaccatatccagcggcacccggccgctggtgtacagcacacattctgccagcggcagccctgccagcaccgcgcagcccacggccttatccagcgcgttgtgccgccccagatcctcgcaggcaaaaacaatttctcctttgtgcagcacaaagcagctgtgcaccgcccgggtggcgcggtacaacggcagtccggcgtgcatggcggcggtcagggtctgcacccattccggctgtagtgccagcccgggcacagggcgcaggggctgcagctccaccggactgcccagcgcgatattatcggtgcagcagctggcaacttcctgcgcggcggcgcggcgggtgggcagcgggtggcgcagatatacctgcacctttgcaccctcggcgcagacggcaatctgctccacctcgtctgcagatgcgatccacccttcggtgagcagccgccccaaggccagctgcggcagcagcgccggggtgcataccacccggaaggcgggctgctcgtttacatagatagcggcggcgtgctctgccggtacggcggcttcggtgccgtccggcaggcgcaggctggcaaaggccgcctgtgcgccaaagcggtcagtgatctgcaaaggggtcgtgctgcgtattttcataaagttaccttatattataaatgcaatgctgtgtggcaaacggacagtaccaacataccggttcggcggcaaaaagtcaagagcagcttgcgctgcgatgggagacgggacgacccggaagggggcttgctgcacctgtgttttgcaccgccaacgcaaagcagccgccgcacggcaaggtgcagcggctgttttgactttgtgcagaaaggcttttatgccatatcgcggcaggtcacaatgtctgccccggtgtcgcagacgttgtgcagcaccacatcacccacatggatgggcgcgtgcagcaccacgctgtccagcgcggcgacaacctcggccatctgtcccttgggcacgggcttggaggtcttgaccgggcagcgggagtgcaggctgccctcggcgcgcacggtgctggtaatgatgcgggtggggtgggtcagctcttccttgccgtaggcgatgccgttggggcagccgttgccggtcactttatagccgttggcctcatccacctgcagatggcagccctgcgggcagcaggtgcaaattacttccttcatatcgctcatgcctcctcgatctcaatggtcacttcgtccacgggggctctgtccagcagcactctgggcagggcaatgtgctccatctcaccgggggcaaggcggtcgcgcttgaagcgtgcgatcaccgtgtcaccgctcttgacaaggatggtgctcctgctgcagatgcggcggacgcggaaggagacgttggtgctcttttccacgccttccagacggatgcgctgcggcagggtgtagccaagatctgcaccgggcttcacggtcagcacgcgtccctcggctacggggccgttctggacgtagctggcagcggccgcaccggccagctcgctctcaccggaaacaaagtccaccagatcgtgcacctgcaccacgttgccgcaggcaaacacgccgggaatactggtctccatgttttcgtacacgatggcgcccttggtacgggggtccatctcaataccggcctgtttggtcagctcgttctcggggatcagacccacactcagcagaatagtgtccacatcaaactccatctcggtgccggggatgggcttgcggtcggggctgatctcggccacgatggccttttctacgcgatctttgccctgaatatccacgatggtgtgggagaggtacagaggaatatcaaagtcgttcaggcactgcacgatgttgcgggtcaggccgccggagtagggcatcacctctacgcaggccagcacctttgcgccctcaagggtcatgcggcgtgccatgatcaggccgatgtcgccgctgccgaggatcagcacccgcctgcccaccagataaccttccatgttcacatagcgctgtgctgcaccggcggtgtacacgccggcagggcgggtgcccggggtgccgatggcaccgcgggtgcgctcgcggcagcccatgcccagaacgatgctcttggcttcgatgatctgatagccgtactccttggagacgcagtgaacctttttatccggggtcacttccagcaccatggtgtccagctgcacctttacgccggtgtccttgagcatctcaataaagcgtccggcgtactccgggccggtcagctgctcgccaaagcggtgcagaccgaagccgttgtggatgcactggttcagaatgccgcccagctccttgtcgcgctccagaatgaggatgtcgcgcagaccgctttcccatgccttgcaggcagcagcaaggcccgcagggccgccgccgataatgaccagatcaaccattgctctttcctcctaccttcgtttcgctgaccagaacgttcgagccgttcttgtcctgcaggatgtccaaggggtctatgcccagctcacggctgatcagctccagcacgcggggaccgcagaaaccgccctgacagcggcccatgcctgcaccggcgcggcgcttgacgccgtcgatggtggtggcgggcacctcgctgtggagggctgctaagatctcgccctcggtgatggtctcgcagcggcagatcacccggccataggcgggctgttccctgaccagtgccgccttttcctctgcggaaagctccttgaagcggatatggcggcggccgtccttgtaatcggccttttcagcgcccagaacaccgcgctgctgcaggatggcaacagcttcctcagcaaccgccggggcagcggacaggccggggctcttcatgccggcaaggtcgatccagccgggtgcttccggctcttcgccaatgataaagtcgtccacgtccagattggcgcgcacgcccgcaaagctgcggatggactcgccaaagttgatgctgggcacgctgcgctgggcagtggtcttgacgaattccagaccgctgctggtgcaggaggtgtcgttgccttccaccggctctgcgttggggccaacgagcaggttgccgtgcacggtaggtgctaccagcacgcccttgcccagcgcgttggggcactggaagataacgtggctcacgcgggtgccctcgctcttgtccagcaggtagtactcgccccgggtgggaatgatgtggaagttggcgggctccaccatggagtgtaccttgtctgcccagataccggcagcgttgatgacgcagcgggtctctaccgtgccgccgggcacggtcaggcggtaaccgccctcgatggcttcggcatcggtcaccttgcagctgcggcgcagctccacgccgttgcgcactgccacctcggtcatggccagtgcgtactcccacgggttcacgatggcggcgctgggtgcccacagtgcgccgcagaccttctcagagaggctcggctccatggcaagggcctcttccttggaaaggatcttcatgccgggcacgccgttggcggtgccgttttcgaacagatgctgcaggtggggcagttccttttcgtccagtgccagcaccagcgagccgcactgcttataggagacatccagctttgcgcagatctcctttgccagtgccacgccgcgcacattcagccgtgccatgcgggtgccgggggcggggtcgtagcctgcgtggagaatggcgctgttggccttggtggtgcagtctgccacatcgttttcggcctcgaggatgaccaccctgttgtcgtagcgcgacagcgcataggcggcagcagcaccaatgacgccacagccgatgatcgcgatatcatacattgttcttttcctcctgtctgttctgccttggcctgcgggagccgggcatctgttggttgcacaaaaaaagagcgaaccgaaacaaaggcaactgcccttgtccgtttcgctcatatctcttgaaacaaacagcacttgtttgcttttatgataccctgtccctgcacaaaaagcaaggtattttgcactttttgtgaaacccttacaaaaaacacccgccgcttttgcgcagaatgcggatcacatatcccacaccgcctgattggtggtggaaatagcggtggcaccggcttccagagccgccatcacatcctccttgtccgcgatcagcccgccggtcagcaccggcaccttggccttggcgcagacgcggcgcaggatcttgggcatagcgccgggcagcagatccagacagtccggcaggtttgcggggattttgtccagactttccagcgcgatggaatccagcaggaatacccgcaggatggcaaccagccccagctccttggcgcggcggatgaaggactgccgggtggagatgatgccgtccgcttcggtggtattgcggatgaagtccaccgctacctccttgcccgccagcccggcaataagatctatgtgcaccacggcaaagcgccctgtttcgtggatgcggcgcacgatggaggagatattgcagatatctccatataatacaaagaccacccggatattctcgttggtcagcgcgctgcaaagtccggcatcgtccttgacggcagcaatgaccggcatttcctgaatggcgtccatcagctcctgtttcatgcttttcctcctgcacacgaaaacgtcttttacagttaaagatattatgaatgctttgacagataaaatcaatgattttcagcaaaaattccggtgaaattgcggcagcctccgcaggcagcgccatcatcaaggatatcaacgccatgcagggctttggcaacatggatgtgctgtgcatggacaagaccggcgctctgaccaacgagagcaggtgcttatctgtgcagcgccggccggtaaggcttgtttggcgatgggcctatcgtcctgaaatctgttcttgacgtccgcacgaataagcggtacgatacgagcatagcgatgaaaaggcaaacggatgcggaataagcagaacagaccgcaggcggatgacacagaacgatcaagtacaggagggcgcttttgtgaatattgaaaagatcacgcaggggaagaacctgaccgataccgagcagacggtgttggagtacattctggatcatctggacacggtgcagacggaaggcgtgcgcggggtagcgcgggcgaactatacctccacctccaccattatgcggctggcgcgcaagatggattacagcggctttgtggatatgtgctacaagctgcgctcctttaccgagacaccgcaccagacgatgaaggaggaagaaaactttcttaacagctttggtgtggattcgctgctgaactacaatacctatacgcagcttaaagcctgtgcggaaaaaattctggagcagaaggataagatcgtctttgtctacggcaccggcttttccggtacggtgtgcacctacctgacccagaagctggtcaatatgggtattttgtgcgtcagcgccacaggctgcgcttgtgaagcgctgtcccggatatcccccatttccataaggtaaactgaagggctgctgcaccgcaatgtgcagcagcccttttgtgcagcggacgcatattgcaccagcagagctggacgggcagaccctgctggtgcccggctttgccccggatgcccttgcaccgctgtgccgttttttgcaggagcggctgaagttctgaaaaaaagaagccgctgcacaaaacgctgtgcagcggcttctctcagaaacgcattttacgcggccagagccttttcgatgttggacagaatggtgtcgtgatcctcagcgcagaccagaaccacctcgccggtgggcgctacggtgacggtggcagcctttgcaacaaggtactgatcctccagataatgctccatggactgctgttcgctggcaacataggcttccagtgcagcctttactgcatcggtcttgccctcggcgggctttacgatggcaacagcatagctgcgcaccatcatgctggaaatgctggcggcaaaggcggtgtactggtcgtcctccagattcagcagcggcatcaggatatcccggatctcttcgtccagctggtcggccttgtactcggagctgtaaccgtcaatggcggtaaacttgccgtcctcgcccttggtaaagatcatatcgtactcgttgtcctcgtcgctgcgggcatcgtggatgatctgggagtagtctttgggggtggagctgtcggccttgctgccgccggagcagcccaccaaggtaaacagggtcagccctgccagcagggcggcgatgaatcttttcatagtattaaagttcctttcatagtgctgtgtgtggaaggtgcagccggggcgcacacgctacaggtagtgtgtgccggttttgggctgctattctggatacgaatcactgcacagcagaattgcagggaaaaagtaacagttttatgaacagtgcccgcttacagcatcaaagcgtccagatcgccatggttcaccggggtggacaggatgatctgggtgctggtagtgcccagcttctggaactgcagaatcagatgttccagctgtgccatgctgccgcagctgaccttgaccagaaaggtatatgcgccggtaacgtggtagcactgcagcacctcgcggctgttctgcagcagctccagaaaggcatcctgcttggagggagccaccgaaaggctgatgagcgcatccacatacatccggtctgccggacggttcagcgtgacggtatagccgctgatgatgccgtctgtctccagcttgtggatacggctggaaactgccgggctggtaagagatacctgctctgcgatttctttgacgggcatccgcgcatttttggccagaagagtgaggatcttgcgatcgagatcgtccatataaaagtctccttaaaaaatatgttggattgtataaaattttctgaaagtaaagtttttatgttgtgcaaacccacagaaatggaataaaatttcgtttctgaaattctatgttaattatataaagtttttgcgaaaaagtaaagtattattttaaagcaaaatccaaaaatattgtttgacaagaaaagaaaaacgggtataatacatcatgcaaggcagcgcactgcacaaaagcctgccgctgatattgagattcaccactttatatactttcccacccctctatacacaaaaacccgctgccaggcgggtttttgtgttttatgcgtttttggggaactatacaacatgaccccgcgttttcacgcggggtcatgcttttatgcagaagggttttacagaaaacgaaagaaaaattattctgcgtacagagagatgatgttcagcacaatctcagtgcagcggtccatccgttccacggtggtgcactcgcacacgccgtggaagttgaagccgccggtgcccagattggggcagggcagaccattccagctcagggtagcgccatcggtgccgccgcgcacgggcacctccaccggctccagaccggccatgcgcacagccttgcgggcggtctcaatgaggtggaagtggggcttgatcttttccagcatattgcggtagctgtctttgatctccacttctacggtgcctgcgccgtacttgccgttcaggtaatcggcaatgtcctgcatattgtccttcttgaactgcagtttggcggcatcatggtcgcgcaggatgtagcccagctttgcggtggtgacgtcgccgtacatctggcacaggtggtagaagccctgacgcccctcggtggtctcgggacgcgccattacgggcagagcgccgtggaactccatggcaacgttggaagcgttgatcatggtgtccttggcagagccggggtgcaccgagaagccgtggatagtcacggtggcagcagcggcgttgaagttctcgtactcgatgtcgccggcatcgccgccgtccaccgtgtaggcaaagtctgcaccaaaaccggggatatcgaacagatcggcaccctcgccgatctcctcgtccggggtaaagccgatgcacagcttgccgtggggacggccctcgcggataacggtctccacggcggtcatgatctcagccacaccggctttatcatctgcacccagcagggtggtgccgtcggtggtgatcagggtctcgcccttcatggaggcaaggaaggggaaggcagagaccttcatcaccttgccggtggcgggcagcaccacatcaccgccgtcatagttctcgtgcaggatggggttcacgttctcgccgccggcatccggggcggtgtccatgtgggcgatcagacccagcgcgggcttttcctcgcagccgggggtggcgggcagggagccgtagacgtagcagtgttcgtccacccgggcatcctccacgcccagagccttcagttcctccaccagcttgtgagccagatcaaactcccgcgcagcggaaggatgggtgccggactccgggtccgaggtggtgtagaccctgacgtaatcaagcagtcgttcataggcgcgcataataaagcacactcctttagcaatattgaaggatcacagcccgtgatccagcttctatcataccccgtttttcctgttttgacaaccttttttgcccacttgggacagaaagcacgggcgcaataacaaaattcaacgtaaaaagttgtccgtcagtcataaacgtgctacaataaagacacccttataaagaagcgggcgcaccgcacagcagaaagatcaggaggagattttatggcagtcaaagtgtttttctacaccctgcgcccctacgatgagcagggcatcgtagaggaactggcaaagcagtatggcatcgagtacggttatactgaggtgtatcccaccatggagaacgcccagctggccgcaggctgcgatgcggtatcggtgactccctgcgatatgagcgcacccatgctgcagcgcttccacgatcttggggtgaaagccatctgctgccgctccatcggctacgaccatatagatctggaaaaggcacgggagctgggcatgaagatatccaatgcggattatcctcccgagggcgtggcgaactttgccattatgctcatgctgatgagtctgcgcaaggcggggcacatcctcaagcggggcgaagtgcaggactactccctgaagggcaagcttggacgggatatctcccactgcactgtgggcgtcattggcacgggacgcatcgggcagaccgtgctgaagcacctgtccggctttggctgccgtctgcttgcctacgacttgtaccagagtgaagaggtaaagaagatcgcggagtatgtgccgctggacaccctgtttgccgagagtgatgtcatcaccctgcacaccaatgccaccgaggaaaaccatcacctgctcaacgccgaagcctttgccaagatgaagcccggcgtgaccatcgtgaataccgcccgcggcaagctgatcgacagcgatgctctgctgaaggcgctggaaagcgggcaggtgggtgctgccagtctggatgtgctggaaaacgagaacggtctgtactattacgaccgcatgggggatgtgatcccgaacccggaactggctgcgctgcgcgcgatgcccaacgtgctcctgaccgaccacacagccttctacacctacgaggctgtaaagagcatggtgctcagtgtgctggaaagcgctgccgcctttgccgagggcttgcccacccggcatgatgtgactgaccgctgagaaatggtgaaatgcaaaaatcggacagaccgcggtctgtccgatttttgtgctatttatccatagtatcccaacgcaaattggtgctcagcccagacagacgcccatgcggcgcgccacgctcagcagctcgcagttttcaggcacattgcgggtcttgccggcaatgtctgccagacggttctcggtcacccggcggttcaccatggccacggttacgccgtagcgctccacctccaccagctgtgcggcatagctgccgaactgggtggcaagcacacggtcgtaggcgctggggctgccgccgcgctgcatatgacccgggatgcacacgcgagtctccatgccagtctttttctgtaccgcctgcgcaatgcggttggtggcggtggtgccaagccctgcctcagcacgcttggccatccagtccttgcgcttcatgcgggcttcctcggtgttgatggcaccctcggccacggcgaggatggagaagttcgagcccttcttcgcacggcgctccacggcctcgcacacgcggtcgatatcgtagggcagctcaggcagcaggatgatgtccgcgccgccggcaatgccggaatacaaggtaagccagccggccttgttgcccatgatctcgatgcacatcacgcggctgtggctgccggcggtggtgtggatgcggtcgatgacgtcagtggcgatgtctacagcggtatggaaaccgaatgtcacatcggtgccgtagatatcgttgtcaatggtcttgggcaggccgatgatgttcagcccctcctgtgaaagcaggttggcggtcttatgggtgccgttgccgcccagacacagcaggcagtccagcttggcagccttgtaggtctttttcatggcggcgaccttatcaatgttgtcgtcctccaccacacgcatcatcttaaagggggtgcgcttggtgcccagaatggtgccgcctaaggtcaggatgccgcggaagtcgtcctcggtcatctcgcggtaatcgccgttgatcaggccgctgtagccgttggcgatgcctacgatctccacgttatcccccatgcgggcgtacagtgcttttgcaacgccgcggatggtggcgttcaggcccggacaatcgccgccggaggtcaggataccaacacgttttttcattcaaaagccctctttccttatcattcaggcaaagccgaaccgcccggcaaaggatgccggagcgcccggggtcctacctttttatagtattagagtattccgaaaggggagtgctgtcaagagaaaaaccaaaaatttacaagcctatgtacaccgggcggccgctgcgaaaacttttgcagaaaaactgaaaaaatggttgacaagcagcccgccggcgtgtataatatcccttgtcagcaacgcacggcgcggctgacacaaccgaatattggggatttgcatagtggtagtgcggtagactctgactctacttgtgggagttcgattctctcatccccaaccagaaaaccgcagtctcaactggctgcggtattttcggggcatagcgcagttggtagcgcgcctcgttcgggacgaggaggccgtgggttcaaatcccgctgctccgaccaaaaaatgcacgttgattcgctaagaattttcgtgcttttttctttattcggcagaatgacgagccggttttgaaaaaaagcgccaaaaattatttcaggcgcaaacaggaaatctgttggaggctgactctgacagacttttttgtaaagctgaacgaggaaaatgtcgaggacagttccaccgggtggtgggactgtctttttttgtgtggctgctggcaagcagaagttgacgccagattgacaacttattcgagcatgggggatcggctgggacgtttctccttaaaataagcgtgttgttataagcgtgttgttgaaaagaaacgcttcatgcaatgttattatctgagaaaacccgctctgtttatattgatttccctctgcatccatgataaaataacaggagaattcgtacaattatgtcgaaaatgattgcaatggaagctacccttacggagatctgaatactccttgtgtcagctgtatggcagatggttataaacggagccgatgattggcttgacaaaaagtgcccggaagaagtcaggcaaaaacagtaattgcatcacaacttcagaacgagcggaaaagttggaaaagataggaattatgtgggatactatggagcaaaagaagggcaatcggccatgaagaaggttttgctgatcgcaacaacacggcttaccatggacggtttgacagagatcctgctccgggtagcccgcatagcggcacgggaatatttggtgggctttgcactgggtgaaggctgcagtgcggatatccagccgcagctggaagcaatcggcagcgtatatcagctgccttcccgtaaaaaaaagctgccctgctatatggccgcactggcagcattggtcaagaaaaaaggctgtgaagttgtgcacatccatggcaacagtgccacgatggcatttgacttgctggctgtatgggctggcggcgcgacagtgcgcattacgcattgtcataactgtgcgcaccagcctgcccttaagcaagcgacccttggcagactgctgaaccgtttggttacggatccggtggcgtgttcgcgtgcggcgggagagatgctatatacccggccattccgggtacttgtcaatggaatagactgcgagcgcttttccttttccccgtccgtacgagaacaaatgcgggcgaaattggggctgcaggactgctttgtggttggccacattggccgtttcagccagcaaaaaaatcatacccggcttttccgcatcttcaaaacagtcttgcagcaaaagccacaggcaaggcttctgctttgcggccaaggagagaatttcgaacaatctcagcaggaagccaaggcgcttggcattgcggagatggtgctgttttgcggtaatgtgaataggccggaagattatctgcaggcgatggatgtatttgtgatgaccagcctgtttgagggattgcccattgtgggtgtagaagcgcaggccagcggtctgccctgcatttttgctgacacgatcacgcaggaagtgaagatcctgccgcagactcagttcctcgcacttacacagcctgatgaagcatgggcagagcgtattgtccagacaaagccgatggaacgcagccttgcgggacattgcgtagagagtgctggatttgcagaagaaaatctggacaggcaggtctgtgcgctgtatggaatggaggaacatcattttgcgaatatcagtggtcgtgaccacctataacggaaaaatgcatctggaaaagcagcttctgtcgttgttgcagcaggagcgtgcaccagatgaggtgctgatctttgatgatggctccacggatggcacaattgagctggtacagagcttcatccgcaagaattgtctggagagctggcagttttatgtcaatgccaagcgcaaaggctggaagcaaaactttatggaggggctgcgaaaagccgcaggggacattcttttcccttgcgaccaggatgatatctggtacccgaggaagcttgcagaaatgaccgcagtgatggaacagcacccggaaatcaaactccttgcctgcgattaccgtgtgatctacgagtctggagccctaaaagcaacggtttacaagaaaacacctgaagaaacgcagggcctgattacaagatatggatttaccaaacatttctttatgaacccttatccgggctgtacttatgcggtgcggcgcgacttttttgatgcggtcaaagagctgtggtttgatggctcgccccacgacgaatttctatggcttatggccgcagtgcaggacggcgcatggttttacaaccgtgtgctgatggattatgtgcggtattctgataatgcatccggggtgcgctacaaagatgttgccctgcaaaaagaaaacctgcgctatatccacaaacagctttgtgccctgcaatcttttgcggcagagcacccggatgctgtgccggtagaacgctgcaaaatgcttgctgcggcgcagatctggtgtgcaaagcggcagaagctcatggaaacacgcagtccgctccgctggctggcactggcgccgtggtgggggtactacaattcaccaagaaactgcctgagtgatttgtggctggtggtgtttgggagttttcaacgtcgcagaaattagaactgccaaaggagaaaaaattgagacgacttggagtttttgtattttatgatcctcaaggagttgtagatgattatgtggtgtttcttttggcatcgatgcgaaaggtttgtacggagattgtgaccgtttgcaatggcttcctgacagaagaaggacatgatcggctttcccaatggagtgaaaccattttttgtagagaaaacaccgggatggatgccggagcactaaaagactttttcacaaatcttcggtcaagagagtattggaacacatttgatgagctggtctggttcaatgatacctgctatggccctctagtgccgatagacaaggtctttgaggagatgaagcagcgtgagccttgcgacttttggggaattaccatccatgcaaggtctaatgctaaatggccaggcagtaaacagcccggaattgctgaacatttacaatcatattttattgtaatacggcaaccgctgctccaggatgagcggttttatctattttggaaggatatgaagatatccgataatttcaatctcacggtgtcaaattatgaattgtctttaaccaaaacgtttgcatcatggggttatatttacgctgctttttgtgataccagaaagctggatacgaatccgaattgcgtttgcaatccaacagctgatgcaatgtatcggctggtaagccagtatcactgtccctttgttaaacgcaaaaattttattcgaacaaatgcagaagccacagtctccaccaatggagagcaagtcatgcggtccatgagctacatccgcagccataccacatatgatactgcactgatctatcggaatcttatgcggctatacgaccaagaactgtggaagggaaacctatgcctgaacttcactttgccttcagaatattctgccaatgacccgactccgcctgcattgatcctggcagaacttgatcatgaagattcgattcacgagttatcggagagcctatgcagcctttctgaatcttgcgatttgaacgttataacgcgtcgcactgaactcattcctacaatcaaaaagttttttccatcttgtaacatcacggtttcatctaatcgaccgcagggacttgcttccctatttttggtgctgaaccagatagaaaccgataaatataagtatttctgtattcttcaggagatgtggggaaatccatcaaacggtctgcatatttcagaatcttcgattcgttttagtatgtacggtaatttggtcgcaggaccacactttattcggaatgtgattcatacgtttgagtcagaacctctattaggaattctaaatccgccgatctttccgcaaagccgcagtgcaatggttgctcatttcaatttaaagcaagctgcaaaagattatggaattcctcttccgcaacgcctgtgtgattacgaggctttttgtcagccctcgctatggtgtcggaaagaggtagtattagctgcgcttgaaaagttgaacgatcagacatctccgctggaccccggcgttttggaacatctcctctgctatattgcacttagcagcggatatagttgcggtgaagtaaaggaaagccgtcaggcggcctgcttgcaagaatcgcagcaagggcttatcaacggtttttattctggaaatattgacttaaatctctttcagaaacgtcaaaagtttcaggctgtggctgccattcgttcaggaaaatgcaaaccagaagagacgaatattacaccatcggcattgcgaaaacttctatgggaaactgtaatttactggtttgaaaagaaactgaacccgcacatatcctcttctaaaaagaatacatactttttgggagcccgtgatgtatacgatgtatatcgcagggttgaaaaggcacggcgccattcttctgaaaaatagaaaaggacaaacaaaatgaatttcgaaaaggcgaaaaagttgctgacacagttgtcagtgttttattttctgcttgcagcaatgatattctttgtggccggagatggctttcgacatgaaattgtaaacggttccgccttatctcccagctctgtgatcggtgaaatcgttgacgggatggtcgttgaacagcgattgccgctgggagctgaccatgttgaagcattaaatcttcaagttgccacttttggcagacaaaatactggtatccttcacgttgatatctatggcgaagacggcaccttgatctcctcagcacaaggaagacttgaggatatgggggacaatcaggtgatacgcttttcgtttgcagagtcgcttgatggaatgcgcaaacagtatagcacggtaaaaatctggtccgaaggctgtcagcccggcaacgcaataaccgtttattacggaaacggcattcaggcgggaaagtatacgcttcagaagggcattgcatcagaagatctgtatcaggtggatggcacttcgggcagtggaactctgtgtgcatattttaatggttacaacgacctgattttttataaggtatactggctgctgatccttttcgtgtatgcagcggttgccgtagtgattagaagatggtggaatcaggcaaagcagggaaaatgcaaccccttgacaacattttacgcaatggtggttcaatatggctttttgacccgccagttggtgagccgagactttaagacaaagtacaaaagaagcctgctgggcgttggatggagcatcctgaaccctttgctgaccatgctggtgcagtatgtggtattctcaacgctgttcagtagcggaacaaaaaactatcccgtgtatcttttaacgggaatagtgttttttaacttctttaatgaagcaatcaatatgggaatgacctctatcacgagcaatgcagcattgatcaaaaaggtctatatgcccaaatatatttaccccgtaagccgcgtgttttcttctttgatcaatcttggaacctccttgataccgctgcttgcggtcatgctgttaacgcgtatttggcccaagtggtcgttgctgttgctggtgtttgatattctctgcttagttgtctttgtaatgggaatgagcttgatcctttccacctgcatgactttctttcaggacacgctgttcctgtggggcgttgtgagtatgatttggatgtatctgacgccgattttttatatggatacgatcattccagaaaagtttttggcactttaccacatgaatccaatgtaccaatatatcaactttgcgagaatttgcattattgatggcgtttctcccaatccgatctcttatctgtggtgtatccttacggcggtggtggtgtttgccattggtgtatcggtattccgcaaaaatcagaatcgttttgttctgtatttgtgaggtgggggcgtattatgggaaaaatgattgaagtgaacaatgtttccatgcgttttcgtatggcaaacgaccgcgtgtccagttttaaggagtttgccattcgaaaactgaagggcgatttgaaatattcagagtttgaagcgctgaaaaatgtatcgttttctgtggaaaaaggtgaagtggttggtttgatcggccacaacggcgccggtaaaagcacgctcttaaaggtaatttccggcattcttcagccaaccgagggaaatgtggtcgtacatggcaatgtggttcccatgttggagcttggaagtggctttgatatggatctgacaggcaccgaaaacattttcctgaacggtgccattctaggctattctgaggactttctgaaagaaaagtaccagcaaatcgtggatttctcggaactgggtgcagagtttctcgatatgcctttgcgcaactactcttctggtatgctggcaagattggcgttctcagtcgctacggtagtggagccggaagttctgatcgtagacgaagttttggcggtaggcgatgcagatttccagaaaaaaagcatgaaccgcatgatggaactgatgagtggcggaactaccgttctgtttgtgtcgcataatattgagcaaatcgagtctatctgcaaaaaggccgtatggcttgagaagggaactgtaaaattgatcggatctgtgcaagacgtatgcggggcatataaaaataattaaaatgcattttacaataatttgaggtgtgaacgggatggaacaaaacaaggtatatcattattcgctggatgatataaaaaagattgtacagcaggaaaagattaaagtggtgagctttgatctttttgataatttgttggtacgacctagtatgagaccaaccgatattttctatctgcttgaagaaaaagtgcgtcgagaatacggcttggactttgtagggatgcggcttcatgcggaagaagaactgcacacggatgatgcaacgcttgcggatatctggaattacatcgggaaaaagcatagcttgaaccttggcgtagtaaatacgctgatgaatttggaaattgagctggagaagcgtttgctgacagtgcgtccagagatgctctccgtattgaactgtgcgaagaaagccggaaagcgtgttatcatcacgacagatatgtatctcggagcgaacgttctttctgacatcctagcatccaaaggcgtcacgcacatagatgctatatatgtttccagtgatcttcatgccagaaaaagcgatggaaaactttatgctctcattgcagaaaaagagaagatcgaaaatccggcgcagatagtgcatattggtgataatttccggtccgattatcaaatggcgctggatgcaggtgttacaggtgtttactatccaagtatctgggaagacgcttgcggtagcggtagaccttgggaacgtgtgcttggcgcggattcttctgaagacccctatattcgccttatgacctcctatgcgatttacgatacgtatctgattcgcggtcgaaaatttgatagtaaccgatgtctggataatctgggtgatgttgcttctcttttgttaggaaatgttctgctcgctattgcattcgatttgctgaacaacgaacagattcagcaggattatgatggcgtgttcttcgccgcgcgagacggatatttgccaagaaaaatctacgatatcattgcttctgaagtaaagggtagccttccatcgcattattttcaggcttcaagacaggctttgagctatactagctatccgggattcatagagcagtttgacgatatctccgctggaacgataaatcagccttaccgactggaaaactacataaaactgatcattgtcgataaatctctggttcaccagattttgtcttctatgaccgatgaagaaaggtcgattgacctttctgagcatttactggaagcgcgcagtgtattggtacgctacaaagaaaggctggatgcttatttttctgtgcagcgtgagttagctcaaaaatactacggaaacctctttcctgagcaggaaaagcgctatcttatctttgattgtggttatagcggctctgtatcgattggtttaacgggtgcccggaaagattgtgacatcaaatttgataaatattatatctggcagacaaaaacaaatcaaaaacgagatcgagagaatggaaccaaaacgttctgtctaagtccgagtgatgatttcgcaggcaccaatttggtttttgaagagtgtttttcaccgttggaaggctcctgcatcggatttgagatgcaaaatgagaatgttgtcggcgtacaagattccttgtctcctgatgagaatatgacacggtctctatatgaaatccaccacatctgtgaagactatgccagacattttgttgatttgttcaaaccgtatttgagctgttttaagttggtagaccgggacgtgcttacgcgtgctgcaaacgttgcttttgtgagatctccctacatggaggcttccctgttaaaacctattcgctttacagactctcttaacggcggcgttccgattgaactatccaaaaagctctatgatagttatgagctcatgtgtaaatacccaacggtttttcatgggacacagttcttgaacccggaggtatttgcgattccaagacgtgaagtcagcacaaatttgaaaatcggcatccatctgcacattcactatctccatgtattggaagagtttctctgctacctgaaggattttccggcaccgtttgatttgatcattaccattacagacgctaaagcagagggcgcaattcaaaatctgtgtgacacgctgttaccgaatttgaaaaagttgattgttcttgcagtagaaaacagaggacgtgacgtggccccttggttggtagccacacggctctaccaaaaggactacgaccttttttgccatctgcatggtaaagcatctgtggagtacgaagctggagctgggacgacatggagacgatatctgctggacaatctcattggacataacgcagcatccgatattattaaaatgttcgatagcgattctgatttaggatgtgtattccctaattatgatgaatacgtggcaaaaatcatagtttcaaatcaaattccccctattggtgaatttggcgaacaaaaaatgattgaagaactgatgcagaaaatgggaattgataggctgttttctcgggatgatatgctatactcttgcggaacgatgctgtggtatcgaccgaatgcgatgaagccgttatttgatttgaagcttacaacagaagatttcccgccggagcccattatcaacggtggtacgattgcccatgcaattgagcgtgtgcctggtcttgtgacgatgtcccagcattatacggttaaaatctataacgagatgcagccgcagatgctcgatccgctggcaatgttgccacctccagcaccggcagcagttgcagtgcctaccgggatacctttccgtacttggaaaggacacccgataaagtggtacattaaaaagattgcaaaatcaattttcccatacggcgtaattcgtctttggcagagaatttactacaaatattga

SEQ ID NO: 908 - DNA, 32588 bp, unidentified
  source 1..32588: mol_type = unassigned DNA
actcaccggtattctgtttctgtttctggctcccgccattaagattcagtcacccggaccggtattcttttcccagatccgtgtgggaaaaaacggaaagaagtttaagctgtacaagttccggagtatgtatactgacgcggaagaacgcaaggcacagcttgccgcagaaaacagagtcacagacgggctgatgtttaagctggattttgacccacgcatcatcggctgcagacagctgccggatggaacggtgaagaaaggaatcgggaactttatccgtgactggtctttcgatgagtttccgcagttctggaatgtcttaaagggggacatgtctctggtagggacgagaccgcctacagaggatgagtgggtcagatacgaactgcaccacagaagccgtctggccatcaaaccgggaatcaccggaatgtggcaggtgagcggccgcagtaatattacggattttgaaaaagttgtggaactggaccggtattacattttaaactggagtctgggactggatgtgaaaattattttccggacggtaccggaagttgtgaaaaaaaacggatctatgtagaagaatttccggttgcagcaataaatagtttgagaaggcgtatcgcataattcctttgggaggcgggcgccttttctattatatggatcagggtcagagcatctttctgctgccactcccgttctgtttcagaaatttctccaaacatcatatagtctaaattcatatctaatgctttggcaattgccagcatcgtttcaatggacatgccacacatcccgcgttcaatatccgaacagtattttgttgcacggttgatccggacggccagttcatcctgagagagtccaagctgcattcgtttatgtcggattcgctcgccaactgcaattttatcataaggttcccgtttcttattcattttgtgatcctctgtatcttccaaaaacttccaattttttctatataaagatagtatcagttattgaaaaataataaacacttttcaaacgtaaaatataggcgcgtttagggcatgagtatttgtgcgtttacaaacggaaaaccggtaaaattcgccaatttttgcgtgcaaacgtactgtgagagggtaaagatatggggtaaaatattttctgttacaaatatgattatgaaataattatggaccataaaaaatgctgattgattttcatacacatattcttccggaaatcgatgacggaagccgaaatgtcgaaatgtcgctgaacatgttagcagcacagagggagcagcaggttgatgaaatcgtagcaactccccatttttatgcacagaaagattctgtggaagaatttttattgcgcaggcagcgcagctatgaaaaattgaaaacgaaaatggcagagacaaatctggatcagaagctgcatctggcagcggaagtctactactttcagggaatcggaagtgccggaatgatcccgaaactttgtgtggaaggaacacagacacttcttctggaaatgccgtttgcccagtggaattctgccatttatgcagatgtggagaaactggtacagcgccagaaactgaaggttgtcatcgcccatattgagcgttattacgaattccagaagaaaaaagaaatctggaatgcggtcatggaacttccattatacaggcagatgaatgcaggcgtatttctgaactggaaaaagaggcataaagcgtttcagcttgcaaaagaagccacaaccattattcttggcagtgattgccacaacatggataccaggcatccgaatcttgccgaggggcgcatcgtgcttacaaagagatttggcgaagcgttcctccagaaaacggatcgcctgaccagggaggtactgcagtgagcgaaaaaaagaaaaccatgcgtgcagttatagaaattatcattgccgtacttgtaatcattgccgtatattttatcatccgtgggatggatcggcacgacgtgcgtatccggcaggcagccacagaaaatgaaatgcagcgtgtctggaaagaatttcaggaaaaacccgtctcgattaagctacataaaaagacctggaaatttgcccatccggttcagacgtatctctttatcggaacggacaaaagcggaaacgaagatgccgagggagaagaatatcatggctcgatggcagatgcactgatgcttgttgtcgtggatgaagaagaaaaagcatatgggattttacagctgaaccgggacaccatcacggaagtgccaatgcttttgcaagacggaagcgctaatgccagtgcacagatgcagctttgtacggcacactggtatggaaaggacaaggctgcaagctgtgacaatacggttgagaccgtatccaaaatgcttggggggctgcctattgatggatactatgcattgaaaatggatgcaatgccacttctgaatcatgaggtggggggagtaaccgttacactggaagatgatatgaccaagctggatccggctatgaagaaaggtgcaacgcttaccttgacagaccggcaggcagaactgcttatgcagtcccggtatgtcatggatgacgatcgcaatacgcagcgtatgcgccgccagcagatctttttaaacgcattcatgaaaaaaataaaaaaacagaatgcgggggatgtcaatgcgaccgtgaaattatatgaccggctgcgcccgtatgcaacgacagatattaagatgaatgatctaactgccctgttaaagaatatgcagggatatacagacaaaggaattatcacaatcgacggtacatccaaaattggagaaaagctgcacgatgggaaaaagcactgggagttttatatggatgaagattcactggagacatccatgaaacaactgtatccactggtgcaagagaaaggaaagtaacgaatgaaccaggaaaaccaattgacagagcagaacagcgaagaaaccgaaattgatctgcttgaaattttttatctgctacgggcaaagctggtatggctgattctcgcatttgtgatcgggggagtgattgcaggctccatcacacattttctgatcacaccaaaatatacggcaactgcaaaaatgtatatgatttccgcatccagtggaagtgtgcttgatctgtcggatttcaatatcggaacatccctttcccaggactataccgaattgatcaaaatccgtcccgtgttcaatgaagtgattgataacctgaatctggatatggaatatgaagatcttttgaagaaagtaagcatctcggttgttggagattcacggttacttgctgtgtcggtggaggacaatgatccaaaacttgcacagtcgatggtcaatgaacttgtagatacagcggtaacctacattccgaaagttatgaatgcatcggagaatgcacagccgaccattgcggaatatgcagtggttccagatgaaccgagttcgccgaaccttgccaaaaatattattctcggagcggttgttgcaatgcttcttgtagccgtgatcttcgtggtacgtatgcttatggacgacagcttaaatacggcagaggatgtcgaaaaagaatttggtatcatgccgtttaccgttattccggagggggatatcgaagaaatttctgatgaggtagaaaaagcgatcagtaaagagaaaaagaaaagaaggaagaaaaagtaatggaatttacaccgaaaaaccgtgcgaccgtccagaatatgccgaaacttccgtatgcggtagaggaagcactgaaccgtctgcgcgtcaatgtgagctttcttggaagcaaagtgaaaaaaatcatggtgatatccagcgctccggatgagggaaaaagttttattgccatgcagctgtggcgtcagatggcagaagccggcagcaagagcattcttgtggacatggatctgcgcaagagtgttatggttgacaaatatcagattgtccgggaagacaatggaaaaattctgggaacttccgattatctggcaagtgacgatacgctggacaaatatgtgttgcgtaccaatatcggagcgggagatctccttccgaataaagaaaatattattaacccgtccatgcttctcgaaggacagaaactggcaagtacttttgaagaattgaatgaaaattaccgctatacatttattgatgctccaccattgaatctggtatcggatggagaaaagatcggctcgctgtgtgatggcgcactgctggttgtccgcgcaggagaaacgccaaaggcaatggttcgtaattcgatccgccagttggagcgtgccgggtgtccggttgtcggcattgcactcagccgtgccaaaggcgctgcaaatggatattatcacaaatatggcaactactatggcaagagttattatggaaaaggctatggctactatggaaaacatggatattatggctatggcacagagcagaagtaggtgattccccaaaagggttttcacataaatcaatcatcagggaaaggaggattatatcccaatgaacaaattaatcaagaaggtgctggtaggtattaccgctgctactatgatgtttggatctgtttgtactgcttatgctgcaacagattctgcaacagtagctccagctccggaaaaacagacaaacgtcaaggctgataatggcgcaaaggtaagtaccgcagcaaacggtacagcaaccgtaaaggctttaccaaagacaacaaagaagagtgttacagtagcttctaaggttgttgtagatggagtctcttacaaggttacagcaattggagcaaaggcttttgcaaatgctacaaaagctacaactgttacacttccagccagcatcaagaccattggcgctcaggcatttacaggtgcaaagtctgtaaagacaatcgtcatcaagtctgcttccgtaaaggttgacaagactgcatttaagggtgtagacaccaaaaagatgacaatcaaggtttccggtatgtctgcaaagcagctgaaagcattcaaggctcagctgaagaaagccggattcaaaggaaccgtaaagaaagtttctaaataatcccgggttcttgaaaagggcgcacagagttgattctgctgtgccctttcccatagaaaaaattgggaatgaacaaaagtaataagaatcataaaaatgaaagaaaggagacatcatgtatcagaaagcaaaaaacagctggatcaaacacattgattttgtgatactggatattctgtgtctgcaggtttcttttttcctggcatatctcgtcagacaccggaatctgaatttatattccaattccgtgtatggaaaccttgccatcgtgttgatcctgattgatgtatgcatgatgttctttttaaatacatgtaagaacgttctgaaacgtggactgctcatagaactggcggcaaccatgcgtcaggtcagcctggtgatactgtttgccgtgttttatctgttctttgtgaaagatgcgggtgatttttctcgtattacactgtttctgaccgctatcttttatgctataatcagttatgggacaagaattctctggaaacggcatgtattgcggaatctgcggcttggaagaaagaattctatcgtgatattgaccgactgggccaatcttccacaggtgcgggaagatatccaacatcacagctatgaactgtttcagattcgaggaatcgctgtgatcgatgtcaatgaaaagaaaacacttcccgaaaaactgggggacatcccatttgtggcagagggagaatctgttatggattacttgtgccatgcatgggtggatgaagtatttatcgatctgcagccaaatgatccgcgggtagacagatggatcgaccagctgacggagatgggagtaacggtacatctgaaacttgccaaccggatggatctggcggcaaacaaacagtttgtggaaaatctcggacgatacacggtgctgaccacaagcatccgtaccgtaagtacctgggaactgtttctcaaacggctgatggatattctcggaggcatcgtcggctgcatcctcactggaattctgtttctgatccttgcaccgatgatctatcatgaatcgcccggtccgatcttcttcggacagaccagagtcggaaagaatggcaagaaatttacgtgctataaattccgcagtatgtatctggatgcggaggaacgcaaagcggcacttgctgcagaaaaccgtgtatcggacggaatgatgtttaaactggattttgacccgcgcatcatcggcagcaggcgtctgccggacggaacgataaaaaaggggcttggaaataagatccgcgactggtccatcgatgagtttccacagttctggaacgtgctcaaaggggatatgtctctggtaggtacacgtccaccaacggaagatgagtgggtgaaatacgagttgcaccacagaagccgcctggcaatcaaacctgggatcaccgggatgtggcaggtaagtgggcgcagtgagattacggattttgaacaggtggtagcacttgatcgcagttatattgcgaactggagcctgggacttgatgtgaaaatattgtgcaaaacagtgggagtcgtgctgagacatgaaggtgcgatgtgagcgggagttatctaagatgaagcatgtgacagacaaaaaaaattttaaaatttgcttagtgggttcttcaggagggcatttgacgcacttgtatatgcttaaaccgttttggaaggataagaatcgtttctgggtaacgtttgataaagaagatgcgaggagccttcttaaggatgagaagatgtatccatgttattttccaacaaatcgtaatatcaaaaatttgattcgcaatacgtttcttgcaatcagagttttgaaaaaagaaaaaccggatttgattatttcttccggtgctgctgtagctgtgccgttcttctatctgggtaagatgatgggggcaaagttgatttacattgaagtgtttgatcgtatagataaacctacaatgacaggaaagatggtttatccgattgttgacaagtttattgtacagtgggaagaaatgaagaaagtatatccaaaggcagtcaattttggtagtattttttagaatggagaaattatgattttcgtaactgtggggacgcatgagcagccttttaaccgtctggtgaaaaaaattgatgaattaaaaggaaacggaacaatacaggatgatgtttttatccagacgggatttagtacatatgaaccgaaaaattgtcaatggagtaaattgattccatataatcagatgattaaaaatgtggaagatgcacgtattgtgattacgcatggaggtccggcaagttttattatgccgctacagataggaaagatacctattgtagtgccgagacagcatcagtttggtgaacatgtaaatgatcatcaggtggagtttacgagaaatgtggcagagagaatgggcacgattatacctgtagaggatatcaataatttgggggatacgataacaaattatgagcaaattattgtaaaaatgggacatgaaatgggtagcaataatgcaaggtttatcagaaatctagaatgcctgattaatgaactgatgtaatggaaaatgataaggaattataatgagacatgcttttttagtgattgcacataataattggtggcagttaaaaaaacttattcaacaactggatgacgaaagtaatgatatatatgttcatatagataagaaaagtaaagattttcatatagatgatttcattggaataacgacttattcaggtttatttttttatcaagaatatgaagttttttggggtgggtattctcaggttgaggttgaaatgtacttgatggataaagcacatcaaaagggatatgattattatcatattatttcaggggcggatttgttgcttaagtcaaattctgaaatacatgatttctttgaaaagcataaaggtttagaattcgttgatattaatgacaaaaagatgcatagtgatccagagataaaacgaggaactaaactatatcatttccttcaaaactatcgaagaagatataaagttgaatttgttaatgaaatattcacttttttagagcgcctatgtttggtactgcaaattattgtcggaattaatagaacaaaaacgctcgattggaaaattaaatatggttctaattgggtgagcataacaaattcgcttgtggaggttgtgcttagagaaaaagacaaaatttccaaagtgtttagttatactaattgtgcagatgagttgtttgtgcagactgttgtatataattgtggtttcgaagagcgaatatataaagctcaagatggtatgccatcgaatgttcgctatattgattggagcaggggaagaaacggaaatccatatacatttaagataaaggataaggggatccttttgcagaataaagcattgtttgcgcgcaagttttctgaaaaagtagacaaagaaattatagaacaacttgtgcgttaataagttctttggcagtgtttatgagattggataaaatgcgtatttgtatttcaatgagtttttggtatgaaggcttatgaggaagctgtagtggattcaaagtatgagctgagaagaggttgttaagaaaatatggtaattcgaataaataaaactattaattatttgattttatttcaaattacatggtgcttgtttgaagaaatcatttattcatataatcctaatttaggcattcttctctttggaccagaagtattaggcacattgtacttgtttttggctttggcaaaaaagaaatttaaagtcaataaggtcgcattgaggcgaaaaaattatagtgatttgttattagggtgttttgtaatatacgtaataataagcgttgtgtggagcaattgggacatatactcaataattgtaagattcagatatattattatgggatgcataacgtattgggtggtacacgagaatctgacagatgaagtttaccgaaagattataaatattatgtgcattgcgcaaataattaattttttcttggttttgtatcagttctttattatgggtataaacgtagatttcgcaaatggaatttttggatttacgggttatgcaaatgccgctcaaggaagtttttgtgttgcgcttagtttactggcatttgtgtattatttggatgggacttggcatcctatgcgaagttttttaatactaggattgtcatgtgttatatgtgcggtctcagaaattaaaatttattttgttttattagtgataggaataattggtattattgcaataagaaaaaattctttcaaggagagaattcgtattatagctataggggcagttattgtaactttgttatattttgcatatagaatcttgctaatgatattgccgcaaaatgtatatgcactatttagtttagcaggttatcttcgatatgatgggcgtagtgactatgcgggaagaacaaatacaattccttacgtttatgaacatttatttcgaaaaaattttttcaagtcattgtttggtatgggactaggtagtagtgcttccgattatatctatgagttgggaaaatcgttcgcggagtttggctttataggattgctacttattttattttttttgtttagcatcttttggttttattttgctcctaaaagaaaaacgttacggactcaagaacaattgtttgctgctgcgtatgcaggtgttgcattagtagctattgttgtttggaattgtacattcacaagatttgcatatttgaattttttctttttggcgatatcaagtgtagtttggaacagaccgagagaggaaaaatccgtagcaaatcagaagttataaagaataaatagcgatttgaggatagaatatttatgataataaataacaagtataaagtttctgttgtgattcccttttttaatgcaaaaaaaacgatacagaagagcatcgagagtgttgtccgacaatcgttagatgaagtacagattgtattgatagacgatggatcgacagatgatacaaatcaaattgtagatgaatatgaagccaatgagaatgcagtaattattcatcagacaaataaaggggtttcgtgcgcaagaaatgtaggaattgaagaagcaacgggaaaatacatattctttttagactcagatgattatcttgaaccagatgcactgcagataatgtatgaatatgcggaagacaatggattggatttagttgcatgcagtcatacagaatttaatgctacgatatatcaagggaatgacagtagaagcaaatcttttacagcatattctagggaggagattgctatcagatatcctgatatatttccacagagtgtgtgtgggaaattgttcgttagacagatcctagttgaaagaaaaattcgctttgatgaagaaatgacattgggagaggatcagttttttacgcaatcgtatttattagaaataagtagcatgggaaaatctgcagatgcctttttgagaatacagaatgtgaatccgttgtcactttcaaaaagatatgttccttcttattccaaggatgttgttcgacaaattgagctatgggataaattattattaaagtaccctagcatagagaattcttattatagggaaaaatatgattttaaattaagtttgtcagcaggagtttttaataatctttataagcaggattgcccactgagcagaaaagaaaaaagttctgagatagtgcattatctaaaggaacatggcgattggattagacagggaggcaatggaattcgaggtggaaagaatgcatttcaaaggttaacaattactgttttaaagacacaatcgcctatgattatagggtgtttttttggacttaaagaaatgataaaaaaaagaaagtttgaaggtggtcggagggatgaataataattatttagtttcggttattgtccccatttacaatgtacaggattatataggcagatgcattgagagtatactaaggcaatcatttcaaaatttagaaattcttcttgtgaatgatgggagtatagataatagcagacaaatttgcgaagcatatgcaaacaaagataaaagaataaagattatagataaagagaatggtggtttgtcagatgcaagaaatgttgggataaaagctgcaagaggggattatattgtcttagtcgatggggatgattatattaaagatgattacgtttggatcttgttaaaagaaaccatacggacaggtgcggaggttacaatttgctcatttgatgtagtggatgatgatggaaatctgattacaaatgagaacttgtctgagttgaattccttggtgatgggaaaagatgttttagattatgtactaacaccatatggatacaagtatgttgtagcgtggaataaaatgtattcagctcaagtctttgaaaataacttgtttgacaaagggaaactatatgaggatgagtatcttaatttccgattattttgggaaataaaatcagtagcgatagtacatacatcattgtattgttatgtacaaaggcaaggtagtattactcagtctgatatgtcaattaaaaaaattaaaatgaaggaagagatgcacaaatgtcgcatctcattttataaggaacacagagagagacatctttatatgaaatcttgtcagatgtattgcaactggttagttgaatgtgttcggcaatattctcaggtgttgcagccagtggataaaagacgttttcaattggaaatgagaaaatattcgaggatagcagatgatgataaagaatttggtatggcaataagaattcagaattatgttggacgtattagtttaagactagcgagtttttttaaaagaatttacaaaggtgataaaaatgtgcgagaaaagcatgggtaataaaatcaaagaatctttaaaaaatggagattttgtatttaaagcaagaagacgattacatagatgtttgccagtgttttatgtaagaaatcgtgatatacaaaatgacaattatatggcaaatacgtatttaaaactggaaaaaaaatacagatatattattaagaatgatatggttgatgatttgaaagaacaaaaacgatccaacaaagtatggatatgttggtttcagggatatgatcaagcaccagaactagttaaatgcactatttcatctgttaaaaagcatatgccagatcgagatattattatcttgacagataaaaatatttatcaatatgccaagtttcctaagtcgataattgctaaacgaaaagcgggaaaaatttcagcggctcatttttcggatttgttaagagttgaacttttgtgccgatatggaggaatatggattgatgctacggtactttgtacatcggataatattccatcctatattacagaaacagatttgtttgtttataagtctttgaagcttgggggaaagaatttggcacccactatatgctctagttggctgatagcagcaaaaagtaataatccaattttattattgacgagaaaactactgtggaaatactgggaggattacaatattttgtgcgattattttctttttcacatttttcttgcaatgtcggctagaaaatatgcagatctttgggagaaaattcctttttttaataatgtatcgccacatgttctagggagcgaacttagtaaaacatacaatgaagagcggtggaaacagatttgtgaaatgtcggtattccataaattagatcatcacatggactatacgcaggggcaggggacattttatcaacatataaaggaggtatatttgattgacgcaaaataatgatagagaaagcaatatagttgaaaaacataatcgaagtaattcgatatattttttaaggcgatagcgtgctttcttattattacgattcatgctccgattccgaaaatcggggggattttgcatttggcacgatgtgcggttcttttttttataatggttacaggttactatacaaacgttgaatatgatgttttggtgcggcgcgccaagaaaatattttatttaatagttatcgcgactattatttatttacctctaaatattcttgttcattgggctcaaggaaatatgaatttttggttgagtgagattcagaagccagaaatattatttaaaattattgtgttaaattggaccactccaatttggggtgtagggcatctttggtatttgtttgcatttttgtatgcttttttgataatggcactcatatcgcgtatttttcctatatataaggatcggatacttatagtatggagtacaatttcattgttaattatatttttaatccaagtatattcagagattacaggagagatgattgagcccatatattggagaaattcattttttcttattgttccttgttttatgataggaaactttttgaagaaaagtaatgaaaagttgaaagagatttctttagcgacaaatgttagattgattatacttacaatagggataattactctggaacattatgctcttagtgttgagtacgaattatatgtttcatcgatcttaatgggaatattgattattttaatatcgggaaagatagatgtagataataaactaacaattgtaggtagaaatttatctcaatggatttatattattcattatgtctttattgtgatattgaaccaattaactccaaaaaatatttatatggctatacgaccatttatgtttgttatagttacaattatgtctattggtgggagtgaaattatattttattttaataagaaagtgatggaaattagatgagcaaacctagcataaagaaaaattttatatataacattttttatcaggtattggctattatagttccattgataacatcgccttatttagcaagagtgcttggagcagaaaagattggaataaatacttggacatattctgtggttttctattttatgatatttgctacacttggagtgaataattatggaaatcgttcaattgcttatattcgagatgataaaaatgaactttcaaggaaattctggagtatatattcatgtcaggcatttgcctccacaatggtaatatttatctatatcatatatttggtttgttttgcgaataaatacaagcttattgcatcacttcaaatattttatattcttgggaatgcgtttgatattacatggtttttttatggattggaagaatttaagattacagttgccagaaattcattcgttaagattatgggacttgtagctatttttatttttgttcaaacacctaatgatttgtggaaatatacgcttattgtgtcgggaactagtttccttggacaaatttttttgtggccattggttttgaaaagaatcagatttgtacgcgtcagattatgtgatatgattcctcatataaaaccgatatgtgttctttttattcctgttcttgcaattagtatttttgcaaatatggataagtatatgattggccttatgagtaacatgagtcagactggattctatgaaaatgctaataagatcatcgagattcctaaagctgtaattactgcattaggaactgtgatgcttccaagaactgctaatttgattgcgacaggaaacgaggagaagagcaaagtatatatacgtaatactatgatatatacaatattattggggagtgcatttgtgtttggaatggcagctgttgcggagacgttttctgtgatattttggggagaggattttgtcacatcgggaagattgatcgctgtaatggcgccggcaattctattttctgtatttggaaatgtaataagaacacaatatttgattcctcgttcaaaggataaggagtacacaatatcattgttagtgggagctataatcaattttagtataaattatatgcttattcctaaaatgggtgccatgggagcgtcagtagcaactgtaatttctgaattttgtatgacttttcttcaatctttttatgtaagaaaaagtttggatataaagaattatctacttgataattatatgtttattgtcattggtttcattatgtttggtgtagtaaaagtaattggcaattacctttcggtatctataggcacattattggtaatgataataagtggagcattagtatatgtgtgtttgatagctattcttttgaaaatgtcgagaaaggaaaacatacagttgattaggaaattggtttgtgaacagagatatagacatttaaagagatagtggcaggaggatgaaaaatgttgactataaaaggagtaatagcgagaggatttatgtatttgtgccggatttttcctataactaataaagtggtgttttcttcatttgatggtaaaaattttggggatgatcctaaagcgatatttgatgaaatgataaagcaggggattgaaacggaatacatatggcttttagatgatataaaatttgatgttccagagaatgtaaaacttgtgaaagccttttcgattttggcaatataccatttggcaaccgcaaaggtgtgggtcgataattgtagaaaacatgcttggacagtaaaaagaaaaggacaatattatattcagacatggcatagtagtgtggggggagttggaataaagaaagttgaaaaagatgctgaagattttttgccaaaaccatatattgaggctgctattaatgattctaagatggcggatctgtttatttcaggaagtgcatggatcacacagtattataaggatgctttttggtattctggaaaaattttagaatgtggaaatcctgttgcagataattattttaagaatgttgacgcggcaagaaagcgcgtacacgaattttataatttggattcgactactaaaattattttatattcgccgacgtttagagatgatttatcgatgacggtatacgatatgaactacgaggcttttcgtaaagcggttgaaaaacgatggggaggacattgggtggttattgttagatttcatccgaatttgcgatataagcaaacaactataaaatttacaagtaacattttagatggattaccatatggtgatatatgcgatcaaatgatagcttgcgatattgttgtgtcagattactcttgttgtgcatttgatggtatgcagttaaataagaaagtgattttatattgtccagatcttgaagaatataagaataatagaggaattctaattgatattgagaaacttccattcccgatggcaaaaacaaatgatgaacttaacatgctaattgaaaactttgatgaagaggaatatagaaaagaagttaattcatatagagcgaacatacaaaattataatgatggtcatgcatcggaaacggtagtagatattataaaaaaacaacttggaatgtgatttgtaatttggtgaggtgaaacctctttaataaatctgaaaataatataatgggtacttgatacaatgcatgttcatgtactttggcaattgttatgaggtaaacgctccatagtccatacatagaattccagcagcatatttgagaaaataccggaacatctttattgctggagcaactggatagctatatactaccacaaaattaattttctttcactgataactatcctaacacacagggcgatttaaaaaccagtaggcaaataaaacaaaattgtatttttaataggaatccgttatactatatgcaaagtataacggatttttattaatcaataaaaccaataacatttcattcgtgaaatcgtataggataaatcaggagataattatgttaacaatcgtttatggagaggttgatggggcaatcaatgacccagacacctattttaatcatacctattctcaaaaatggtttgaggacccttttgttaaggagatgatccgggcggtagacaagtcggaggtattgtcatcccatgcaattgaaagtcctgttcttggaattattccgacatcgaaattgtctggtggggtaaaggcacttatccttgtttataaaaagccggagttgttgatagattgtactgcatgcggtgaaaattgtgccgaatggattcttaaaattgcggaaaaacaggacactttgatcaatttgaattattttatggattttccggaaccgtttgaacttaagatacaaaataccggggctatttgtcgcgattccaaagaattgtatcgtaattctattcattttgtgaggtgatcagatcatatgataggaaaacacagagttcaaattggagataatacgatcagatatgactttgtattatcacgcaatattaccattatacgtggagacagcggaactggaaagactactttatataatcttatacaggaaatgaaccagaagaaaaacagtgggattgcatggaattgtgactgtggttgttatgcattgacagattttgactgggaggatgttattgaaagacatccgaaatccattatttttgtagatgaaaatttcagttcaatgaggagcgaaaaatttgcgtctattgtgaattcagcggataattattttgttttgattacacgcgcatatcttccaatgctggcatacagtattaaagaagtatatagtatgcatgtatcaggaaaatatgctacgttaaataatgagtatgagataactgtcaatgaacttcagaatgtatatagttcgacattaagttatccgccccggcttattacgccggattacgtgctgtgtgaggattctaattcagggttggagatgtttcatgctttagctgaaaaagtttcagcagaatgtcatagcgcacatggaaaatccaacattccagaaaaggtacttgattttgaggaaaataagacgtatctcataattgtagatggagcggcatatggaccggagatgggagctacggtcaggtacatcgaagatcattttaactgttacctgtatgctccggaatcttttgaatggctgttgctgaaagttatgttttcaaaagatccaatgatttatcgtatcctgaaaaatccaagtgactatacagagagcacaaaatacctgagctgggagaggtattttacgcatgtactggaagaacatacgaaggggacagagctggaatatcacaagaaaaaattaaacaaacaatatctttatgccaaagcgatgaaaatattatcaaagtttttactggccagtaatattaattttgacaggtgcatggtataggaaaaaaggatgagataaaaccagcgtccaggcccgacacataaagaaaggagaacgaaaacgatgaaagcattaaaaaaacaacaaattgcggtcattttggtactgtctgtcatactcagcacatttgtagctgttatacctgtaagtgcggcgacgctgtctgcacagcagtatttggaaaagatggatatagcggtgcgaaacttaaaatcatatgattttacgcagacaaccgatcagaagatgacaatggaagggcagatcattcaaaataagacggtggtaaagcaaagcgtatacaacagtcctctgaaggtaaaaagcgtaacagatacaaccacagtacttgcaggaatgagttctaagaaccaggcggttgcctatctgacaaaagatgcggatggattgctgtgggagtacatttcttccaatggttccggatatcagaaaacagggattttaaactataccaatcagatcaaaggtatggatatttccatgtattcggatgcaaaaattgtgaaaaagaaaataaaagtcaaccggatcaataccgttcagatttcggcgcaggtaaagggctccgatgtggtgaaatttttggaccagatgggaatgagcaaagagatcaatgcggcagctgctgtggattacaatacgttgccggcaatcaaagtgacctgttggatcgataaaaaaacctgtcgtccagtcagaaccacggcggatatgaaagcgtttatgaacgggtatatgtcggcgctgtatcagaagctgggacaggatctgaaacttgtttattcgcaggcaaaagcaacggtaatctataaaaattttaataaggctgcaacatttaccataccgaaggaatgcagataaagataccacattttcaaagatgacaacaacagttactgcggatacaaataaaatagtatatacggcaaaggttccgaaagacgctacatctgcacggtaagtattcggttggaacatacacctatcaaaaataaatgtttctgagaagagagaatagctgtttgcgaaaacggctattctttttttatctaaaatggcatatttcttgtcagaagcaattgaaattataattcaaatatgataggataaagtaggctgtctagtgtagaaaagacacataaggcagagttggtgatatatgtaatgtcagagaatgatagttactacatataaaattataaaactacggaggaagaaacatgaagaacaaagattatttaacagtaagacaggaagaattgatgaattttctgtggaaggtcaatgagccgctgactgccaacgagatggcagagcgtctggcagaagacggatggaacaatgttacattgtttaagaccgttcagtctctgacaacggatggctatctggaagttgtaggacttgagaaaaccgtcaagacttatgcacgtaaactcgctccgtctatgtcaaaagacgattattatgcatctgtattgattaagcgtggaattgacagcagttctattgcgaacattacagctgctctgatcggagcaaaagataagcaggcaaaagaaaaaaatgcagaggttattgcaaagttagaggagattattgatactctgaaaaatgatgaggaataagaatgcaaataacgatattttcggtttggatgacgttcgtttggtgtaacatttttattgtactgtgctacattctcagaaaacgatcggttctgctgaatttatccagtatgacaggaatcatcattttatatttgttttgtctgatcaggcttgccgtcccggtggaattgccatggacgaaagtggtatccggaggcagcctgtataatttcctgtatcagatattcgggtgtgaaataacctgtgtggcagggcacgaaatctatgtctatcatatatttgtggtggcatggggagtggtcatggcagttcttttgacgcggtatctgatacagtatcacagagttgtgtcgtatttttcagagatggaaaaaacggaagatacagaattaaataatattttagatgaaatttgtacggataaagaaaagcggaacattaagatcgtacagacagccgcggtagaaataccgtgttgtatagggatttttgagaaacggatattgattccggacaaaaaatattcgcgtgaagaattgcattatattattctacatgaatatacacatttggataataaggatatactgacgatacagctgatcaacattctgtgtatcgtgttctggtggaacccgtttgtgtatattttaaaaggagatatgtatcagagtattgagatccgttgtgaccagacggttacaaagaaactcaaatcggcagagcggggtaactatctggcggtgatattaaaagagtataaggcaagtgtgcaggaaaaagaatttcgaaaacctgcaggagccatgccattgtttgaagatcattcggatcatctgatcgaacgatttcgtctggtcgcggagggaaagcaaagcagttcgcgtattggaagaattcttgttccggtgattgcggttgctctgttggtgctttcgtattcatttgtacttcagtcacaatatgaggtgccagaaagtacatacaatgtagaaaacagtatttgggaagtgaatcgacagaatgcatatgtgcatgaggtggatggaaaatattatcttcattatgaacggggagatattttgcttgataagaaaactgtgaagcttttgaagaaaaatgggtttaagattcgaaaaggagaaaactaactatgaaaaagaaaattttaattgcagcagcgatttgtgcatctttgtttgttgttgtacctactggatatgtaagtgcagcggagatagagacggagtcgataccgcagacacagagtgcttatgataacattgctattgcaccatataaggatgtgattgaaacaaaatttcgtgtttataaggacaaattacagtatcgacgttggaatgcaacgcgtggatactgggtggataagaagtggattgatttaacttaattaaagaatttgccggtgcagctgcaccggcatttttttacaaattattctttcgcaaattataattcttccggcagttcccacgcctgtgcctgttgttcatattccgaagcacgggagagaagatccccggcagagcatggatcacagggttcattttctgccagcgtacggtaacattctgccagttgaagcaatgctttttttcctgaaatttcaatatccagaacaggctgtgtctcaaatgcagcattgtaaaaccacagagaagcttcctggggattctgccgttcctggtagtattgtccgagctcataacagatttcggagcaggaagaactgcacatatctttcagacagatcgaaaagaaatcatccacagaattttggatacgggcagcgtgtgccagaatacacgcggattctgcatcagcgtgtgcttcatagtgtaacgaaaaataatccgccgcgcgtagaaaatcttcctcatccccacatttataaagttctcttgcatacatgcgcgtgattttctccgagaggacatgattttcacgaaatgctttttcaaacatggcaaaatcccgcttggcatgcatggtatgtgggtggtgcagaatatcaatatcactgtcatagatgacgggatcaatgcggatcgtttcgtgaaccggatcgacccatgaaaacgtgcgcaggcgtttaaaaagttttggacgtggctcttttttacagttctgcacggtgttgaaatccggtggggtgatatagttcatctgaacaatttcaatttccggaagaagagcacattttaaccggagaaaacgtctttgattttccagatcaaggtattcgtccgcatccggacagtagatgtaatccatggttgcaagcgaaaacgcataatttcttgcggcggagaaatcatcaccccaggtaaaatcatagatccggctggtgtattgtgcggcgatttctttggtgcgatctgtggagccggtatcaacgatgatgatttcgtccatcatggaagcaacggaatccaggcatcttgccagaaccggttcttcatttttgacaatcatacataaacttattgtgatcataataacagatggtccttccgaggttttcttttatattacactatcctgcaacagttttacatagaaataaagaaatatacttgtatcttttttgaaccatggctataataaaatttatgtggtgtgaaattataaaacaaattttggcagatatgcgccagccacttcaatatgtgccatgggcactgattattgtggtacttgggctggttgtaacaatcgtgctttctgaaaaaaaggatggaaaaaaagcatccgtccggttttttcgtatactttttgcgatttatatacttgtggtgatacagattacttttttttccagagaacccggttccagaaatgggtgcatgaatctggatctgttttccacgtggggatacagcgtggttacccatgcattttttattgaaaatattcttatgacagtgcctttcggaattctggcaccactttgttttcgccggctgcggccgatgtggaaatgtgttgtactcggaggtgtctgttcggttctgacggaactgagccagtacgtgacgaaacgcgggtattgtgaagtagatgatatgctgaccaacaccataggtgttttatgtggttgcattttgttatggctgattgaactgataataaaacaaaggagaaagaaatgaagtatgattatctggtggtaggagcaggattatatggctccgtatttgctcacgaggcagcaacaagggggaaaagagttctggttgtcgataaacgtccgaatattgccggaaatgtttatacggaggacattgagggaatccatgtgcacaagtatggtgcacatattttccataccaacaataaaaaggtgtgggattacattacaaaatttgcggaatttaaccgctttacgaattcaccggtagcaaattacaaaggggaactatactcgcttccgtttaatatgtacacctttaataagatgtggggtgtggtgacaccggaggaggcagcggcgaaaattgaggagcagaaaaaagccgcaggcattacagaaccgaaaaatctcgaggaacaggcgataagtcttgtgggaaccgatatttacgagaaactgatcaaaggatatacacagaaacagtgggggcgtaagtgtacggatctgcctgcttttattatcaagcgccttccggtgcgcctgacgtttgataacaattattttaatgcgctgtatcagggaattccgatgggcggttacacaaagatggttgagcatctgctggagggaatcgaagtccggcttgggattgattatctggagcagaaagaggaactgaaggctctggctgagaaaacggtatatacgggagcgatagatgcgtattttgattattcgctcggcgcgttggaatatcgttccgtgcggtttgaaacagaacttctggatactccgaatttccagggaaatgcagcagtcaattatacggatgcccagacgccgtggacacgtattattgaacacaaatggtttgaattcggcaaggatgatgagggacatgatttaccgaagactgtaatttcgagggagtacagttcggagtggaaaccgggggatgaaccgtactatccggtaaacgatgaaaagaacggagctctttatcagaaatataaagaacttgcggaaaaggaaaaaaatgtaattttcgggggaagactcggagagtataagtattatgatatggacgctgtgatcgcttctgcactggaaatgtgcgaaaaagaactgggataggcttctagaaagatacaaaaaagagcattcgctgtatggttacagctggaatgctctttttgttatacatatttgtccagcatcattccggagtagatggatgtgatgtatggggttgcaaagttgtgaccgggatttttataggccacaacgatcttgttgacatagttcatcggattgatggagatattttccgcttcttttccgatggaatcccgaaattgggataaagtttcaaaggtattctgatcacgttccggaacaactgcttcacggagtgtttctttatcaatagagatggagccgttctcgtttgtgaccagaccgatgtcctgtaaagaactccggctcgaaccggatatggaaagaatctctgtctgaagtttgtttccggcactggcattggtgtctgcatacacggctgcggtggaaagtatggaattataggcatccaccagagactggatattgtccgcaattgcatccgcatctgttttaaatccaatgtttactttctcactatcggttggctgatgtaaggtcagttcaaatacctgattgatggaaaatgtgttggtcagggaagagtggcttgtgccattcagtgtaaaggcggaactctgtgcaggggaagtgatgcggtcaattcccagctgatccatgatttccgtggaacctgtgctggcatccggtgcaatggaaaaaagttcggtttcgttatctgccagaccggtctgtatggaagtcagtttcagcgcactcgaaccgtttccatcggacagtatttcggcggtaattccgagactagaggagttgacaagcctggccagcttgtccagcacatccagattggtttcgtcggaattgatattatattgaaattcatatgcagcaccagacgtattcagatcaaaagaatatgcgccgggacgcatcgacagtgtattgtcttttaaaaaacgtccctgattgatctggggtgtggcaagccgctgcacttcaatgtcaaagttattggttttactttcttcacttccgtcgccgatataggtcacactgactttttcgtcatcggaagacatggcaactctcttcttaaaagaatcctcaaatgaaccgtactggtcggaaagagatgccacaacgttctgaatggagcgcgcgttttccttgatgtctatggcatattttttcgcatcggtgagattcggaattttataaagaggcgaatctttatttattttgacaattttattataaactttgcgcagttcacttttcttgtgtgaatcataacgtgaaaccgttttctgggcatacgtcgagatataataagcgtaagcattatcaatccttgccattgagattcccctcctttcttccctgaattgaggattgagagcaggacagtaacagacctgttctcctgtgaggtgcatatcctttgcaccaaaaagattctacttgaatagtatatcggcatcataccgcattttccatacccttgtatatggtaaaattttactaaaaattcacaatttggcgtaaaagctgcaaaaaatcataaaaaccattgtaaaagatgttgacggacatggaaaatcatgatatagtatgaaggcttggaagtaggtcttttttttatgcctttttttaggcgggacaaaacacgaaaattaataacggaggtggaagttgtgcgtacaaagattacattagcctgcacagaatgtcagcgtcgtaattacaacatgacaaaggacaagaagactcatccggacagaatggaaaccaagaagtactgtagattctgcaagactcatacagttcataaggaaaccaaatagtccgtacagagcaaaggagttatgaaatgggacagacagaaaacgttgaaaaggctccaaagacaagctggtttgacggtgtaaaggcagagttcaaaaagatcatctggccggaacagaaatcagttgtcagacagaccattgcagtgattgttacatccgttgtagtcggtcttattattgcactgctggattgggcaattcagcacggtgtgaatttccttgttggtttgaaattttaacggaggcatagtgatttatggcagaggcgaactggtatgtagttcatacctattcaggttatgagaacaaagtcaaagcgaatattgacaagacaattgagaacagacatctggaagaccagattttggaggtccgtgttcctcttgaggaagtgacggaagttaaaaacggagtgaaaaaacaggtttccaagaaaatgttcccgggctatgtgctgattcatatgattatgaatgacgatacatggtatgttgtccgcaatacccgtggtgtgacagggttcgttggaccgggaagcaaaccggtgccactcacagatgctgaaatgagaccgctcggaatcaaggctgaaaacgttgtggtggatttcgcggaaggcgacatgatcgttgttatcggcggtgtctggaaagatacctgcggtgtgattacagcgatgaaccataacaaacagacggttacgatcaatgtggatctgttcggtcgcgaaacaccggtagaagtaagtttcgcagatgtaaagaagatgaattaaggaggcaattccaatggcaaagaaagttgaaggatacattaagctgcagattcctgctggaaaggcaacacctgctcctccagtcggaccggcacttggacagcacggtgtaaacatcgttgagtttacaaagcagtttaatgcaaagacagccgatcagggcgacttaattatccctgtagttattacagtatatgcagacagaagctttagctttattactaaaactcctcctgcaccggtactgatcaagaaagcctgcaagatcaagtctggttctggtgaaccaaacaagacaaaggttgcaaagattacaaaggcacaggttcaggaaatcgctgagctgaagatgcctgacttaaacgctgcaaatatcgaagctgccatgagcatgatcgctggtacagcaagatctatgggtgttgaagtagtagactaatctaagtttaagaagaaatgtgggagggtaattgatttcccacccgatattaccaccaggaggtttatatttcatgaaaagaggaaagaaatatcaggacgctgtaaaggcatacgatagaagtgctcagtacgatgttgctgaagcaatcgacctcgtaaagaagaatgccacagcgaaatttgatgagacaatcgaacttcatcttagaacgggctgtgatggacgtcacgcagagcagcagatccgtggtgcggttgtactgccacacggaacaggtaagaccgttaaggtattggttttcgcaaagggaaccaaggtagacgaggcacaggcagcaggagctgacttcgttggaggagaggaattgattccgaagatccagaacgagggatggttagacttcgatgttgtagttgctacaccggatatgatgggcgttgtaggacgtctgggacgtgtccttggaccgaagggcttaatgccaaacccaaaagctggtacagttaccatggatgttaccaaagctgttaatgacatcaaagccggtaagattgagtatcgtttggacaagacaaatattatccacgtgccagttggaaaagcttcatttacaagtgagcagttgaacgacaacttccagtctcttatgggcgcaatcaacaaggctaagccttcaagcttaaagggtcagtacattaagagtgctgtattaacttctacaatgggacctggcgtaaagcttaacgttgtaaagattgctcagtaatagaaaaatcagaagtcgggaaccggaaacggttcctgatgaaatgatgaaatgtatgatcagacttacacaagcaaaatgcggaaaacacttgacatccgcataagaacatattataatagccaagcatattgccgaagacagtaaggtgctatcgcatattgcgacagcgtaaagggaaatccacctaccgagggaatttttgatgataatcgtcataaagaatgatacccctctgctgtaaggcggagggtttttattatacctcacgctatatgcaagaaataaaataaggaggtaaatgaatcgtggcaaaggtagaattaaagcagccgatcgttcaggagatttctgaaacaattaaggacgcacagtcacttgtagtagttgactaccgtggacttacagttgctgaggatacacagcttcgtaaaaatttaagagaagctggcgtaacttacaaagtatacaaaaatactttagtaaaccgcgcaatcgagggaacagagttcgagagcttaaaggatgtcctggaaggacctaacgcatttgcagtatctacagaagatgctacagctccagccagagttctggcagagttcgcaaagaaggctccaagccttgagatcaaggccggcgttgtagaaggaacatactatgacgcagagggaatgaagcagatcgcaagtgtaccaagcagagaagtacttctttccaaattacttggaagcttacagtcacctatcacaaatcttgctcgcgttcttaatcagatcgcagagaagggtggcgcagcagatgcagcagcagacgcagcaccggctgaggaagcaccagcagcagaataattattaaaaataaaattataacggaggaaataatcatggcaaagttaacaacagcagagtttatcgatgctatcaaagagttaagcgtattagagttaaatgaccttgtaaaggcatgtgaagaagagttcggcgtatctgcagcagcaggcgttgtagtagcagcagcaggcggagacgcagcagcagctgaagagaagactgagttcgacgtagagttaacagaagttggaccgaacaaggttaaggttatcaaggttgttcgtgagatcacaggtcttggactgaaggaagctaaggacgctgttgatggcgcacctaaggtaatcaaggagcaggctgataaggcatctgctgaagacgctaaggctaaacttgaggctgaaggagcaaaggttacattaaagtagtctgtgcgtaaacgacgagaaaccaataataacccggcagagatgcttgcatttctgttgggttattttatttagctgtatcccctctttctatctgaaaaagttctcaaaaataattcttgcatttcccttgattttgttgtatagtataagttgcactattgtggtgcactaggcatttccatgctcttttttaggaaaaactagattgaaataaaaacgagaggtgaaacgtcaatggagaaaaacagaatacgtccagtcaaggctggaaaaggcttgcgtatgagttactcaagacagaaagaggttttgcagatgccaaacctgatcgaagtccagaagaattcttatcagtggttcctggatgaaggtttaaaagaagcatttgcagatatctccccgatcacggattacagtggtcatctgagtctggatttcgtcgattttacactgtgcgaagacgatgtgaaatatacaatcccggaatgcaaagagagagatgcgacatatgcagcacctttgaaagtcaaggttagacttcataacaaagagacagatgagattaacgaacatgaaattttcatgggtgatcttcctcttatgacagagacaggtacgttcgttatcaacggtgcagaacgtgtaatcgtcagccagttggttcgttcccctggtatctattacggaattgctcatgataaagtgggtaaaactctttattcatgtactgttatcccgaaccgtggtgcatggctcgagtatgagactgactccaatgacgttttcagtgtaagagtagatagaacccgtaaagtgccgattaccgtattgcttcgtgcacttggtgtaggtaccaaccagcagatcattgacatgttcggcgaggagccaaagattctggcatccctgcagaaggacccggcgatcacagagcgtgagccacagggaagctttgaggctggtttattagagttatataaaaagatccgtccgggtgagccgctttccgtagaaagtgcggagagtctgatcactgccatgttcttcgatccgagaagatatgacctggcaaaagtaggacgttacaaatttaataagaagcttgctttaaagaaccgtatcaacggacaggttctggcagaggatgtactggatccttctaccggagaagtaattgcagaggcaggcacaactgttgaccgtgatctggcagatcagattcagaatgctgcagttccggcgctctggattcagacagagacacgtaacgtaaaagttctttcttctatgatggtagatatcagaagctggattcctgaaattgaggacccgaaggctattggtgttacagaactggtatattatccggctctgcagcagattatggaagaaaacgagacattggaagagcgtatcgctgcaattaagagagatattgcagacctgattccaaagcatattacaaaagaggatatcttcgcatccatcaactataatatgcatctggagtggggcatcggaacagatgacgatattgaccacttaggaaaccgtcgtatccgtgctgtcggtgaattgttacagaaccagtatcgtatcggtctttcccgtctggaaagagtggttcgtgagcgtatgacaactcaggatcttgagggaatttccccacagagtctgatcaacatcaaaccggttacggctgcggtaaaagagttcttcggatcttcccagttgtcacagtttatggatcagaacaacccactgggtgagctgacacataagagacgtctttctgcattgggacctggcggtttgtccagagaccgtgccggattcgaagtacgagatgtccattattcccattatggacgtatgtgcccgattgagacgcctgaaggaccaaacatcggtctgatcaactctctggcatgctacgcaagaattaacgagtacggatttgttgaggctccgtaccgtaagattgataaatcagataaagacaatcctcgtgttacagacgaagttgtatacatgactgcggatgaggaagataattaccatgtagcgcaggcgaacgaaaaactggatgaggatggacattttgttcgtaattccgtatccggtcgttaccgtgaagaaacgcaggagtacgataagactgcattcgattacatggacgtatctccaaagatggtgttttccgttgctacagcactgattccgttcctgcagaacgatgatgcaaaccgagcgctgatgggatctaacatgcagcgtcaggcagtgccgcttcttaccaccgaggcacctgtagtaggaaccggtatggagacaaagacagcggtcgattccggtgtctgtgtacttgcaaaagaagcaggtatcgtggagagttctgagtctaatcgtatcgtagtacgtgaggaggacggaaatcgcagagaatatattctgacaaagtttgcacgaagcaaccagtccaactgctacaaccagagaccaatcgtgttcaagggacagaaagtagcaaagggtgaggtgatcgctgatggaccatctacatccaatggtgagctggcacttggaaagaacccgctgatcggcttcatgacatgggaaggttataactacgaggatgccgttcttttgagtgagcgtctggtagagtatgatgtatatacttctgtccatattgaggaatacgaagtagagtctcgtgatacaaagctcggaccggaagagattacaagagatgtaccgggtgtcggtgatgatgccttaaaggatcttgacgagcgcggaatcatccgtgtcggtgccgaagtccgtgccggagacattctggtaggaaaggttacaccaaagggagagacagagcttaccgcagaagagagactgcttcgcgcaatcttcggtgaaaaagcgcgtgaggttcgtgacacttccctgaaagtgccgcacggtgcatatggtattgttgtagatgccaaagtatttaccagagaagatggcgatgagttatctcctggtgtaaatgagtctgttcgtatttacattgcccagaaacgtaagatttctgttggtgataagatggctggacgtcatggtaacaagggtgtcgtttcccgtgta

SEQ ID NO: 909 - DNA, 32095 bp, unidentified
  source 1..32095: mol_type = unassigned DNA
tgatagacatcctttgccagcagcacaaaagagcctgtcccgatcaggattttcaaaaaataccccgtcaggtacgcccaaaataccggcataaatgtatacaaaatattgtatagattccattcgctgctcaggctgtcccggctgatgccgcccagcatcggaaccgtcgcaccgtgtgcaaaccagctgtttgagtggctcagtacctgaaagtgcgcgacaaacagatcgaggttatcctgcactgtaaaatagctgttctcccgaaaaatcaaaaataccagcagctctgcgccgatacagccgcctgccaaaaacaggtaccaacggcgatccaaccatcctaaaaatcgtttcattccagtctcctaattacaaattctaccagcaatggcactttgaggcttttgtttataattgctcacacttacgcgcttttggcacatttttcacagtatcgtgcctgttcccgctcacttgcactcattatatcgtgagcatagctcactcaataacttcgccgttcgcgatgagcaggcttcgcctgttcccgctcacttgcgctcattatatcacgagcccgcgctgacgcgctttgccgcctgctacgcaggcggctcgttctctaatggcacaagaaaaacaaatgccgccttcggcgtcgcttgtttttctttcgtgctcattatatcacatcttaccttccaggtaaaacaatagaatacatgctcggcaaccatctgcccctgcgccgagtgcgcatcctcgcggagcatttttatcgtatggaaacgaagtttcctatacgataaaaaaactgccacctggcagtttcccgtcagatggcagttttctatcggcactgttttcacagcagaccgaaaatgttccattatttcatttcgttcatcgcttttacaggttcaaagctgtccttcgcggaaattattctccgtcgtaaggaacaacgctgcccttatagttctcgttgatgaagtctttgatctcatcagatttcagaatctttaccagtgcctgtacaccttcgttgttctcgttgccttccttaactgcaaccacgtttacatactgctggattgcttcggaatcagcagactccagagcaactgcatctgcactggtcaggccagcctccatagcgtagttgccgttgataacaccgaagtcaacatcttccagagtacgggctacctgctccgctgcaagaggaacgatcttgatgttatgagggttctcaatgatgtcattctctgttgcagtgataccagcttcgggatccagcttgatcagaccctctgcctccagtaacagcagcgctcttgcacagtttgtcgtatcgttgggaaccgcgatttcagcgccgtctgtgattgcagcgaggtcgctctgctttccgggatacagaccaagaggctcgtaatggatcttgcctgcgatcgcaaggtgcgttcctttttcttcattatagctatttaagtaattcacgtgctggaagtagtttgcatctacatcgccgctctccactacttcgttaggctgtacgtaatcggtaaattctacgatttccagatcccagccttctgcagtcatcagatcttttgctgcctccaggatttctgcatgaggaacaggagttgctgctaccgtaatggtgcctttggattccacttctgctgcagtctcggtgctttctgcctcggtagattctgcttctacagcttcggtgctttcaacagctgctacagtgctctctgcttctgcagcagtatctgtgctgctgccgcagcctgccagcagacctgcgctcagtgccagtgtgcatgccagtgccagtacttttcttttcataatattctcctctctcggccggattttctggtatccggaaccactctatgactaaacagaatatcctgcccctcaatgggtcagtcttctgtccagtttcttggataaacggctgccgacaatctgaataatctgcatcagaataacaagcagtacaaccgtcgccagaaggattttggtatcccatctggaatagccgtaacggatcgccacatcccctaagccgccgccgccgatggcaccggacattgcagtatagccaagcacagtccccagtgcaatcgtggaaccgacgatcagagaaactctcgcctctccgatcagcaccttaaaaacgatctgccagatacttgcacccatactctgagccgcctcaatcacacccttgtccacctcaagaagagaagactccaccagacgggcaataaacggtgctgctgccagtgtcagggaaatgatcgtcgcatttgcgccataggatttgcctgtcaccagacgtgccagcggcgttgcaagcagcatcagaatcaggaacggaatggatctcgtaatatttacgataaaatccaggatcttatacagcacagccttgggcttcaagccacccggtgcgcatacaaccagtaaaattccgatcggaagaccgatcacatatgccatcagggtagaggcaagcgtcatatagacggatgtgccggtagcctcgatcagcatgctaatttccttgctactcaacataatccttcaactcctctactgtaagatttttttctctcagatacgcaatcatcttgtctgcagtctgattttcctccggaagctgaagaatcatctgaccagttgcaattccgccgatatcctgggtatccgccatcagaatattgacgctcgctctgcattccaggaccatgttcgcaatcacaggttcgaaagaagagttcttcgtaaatacgatgcggatgcagcggcggctcttcataatcgccaccttctgatccccctgaaataccagcttctttgcagctctggacttggggcttgcaaaaacatctgccactgtaccattttctgccagctctcctgcatcaatgattgccacatgggtacagatttcctgaacaacttccatggagtgtgttatgatcacaatcgtaatgccgtatttttcgttaatatcctttaacaaagccagaattgactttgtcgtagtaggatccagggcactggtcgcttcatcacacagcaggatcgtcgggttcattgccagcgcccttgcgatcgctactcgctgcttctgtccgccggacagctgtgccggatatgctttctctttgtcggaaagctctactacctttaaaaattcccttgccttttcccgggctgtctttttatccacgcccgcaatttccatcgggaagcatacattatccagaaccgtccgctgcatcagcagattaaaattctgaaagatcattgcaacatgcttgcgcagctgtcgcagctgttttgcatccagggtagaaagatcctgtccctccacataaacagtaccctctgtgggccgttccaggaagtttaagcatcgtaccagcgtgcttttgcctgcgccggacataccgatgatgccgtaaatatcaccctttgcaatgtcaagactgacatttttcagtgcttccaccttattgtctttgacagaaaacgtcttactgacgccttcaatccgtatcattggttccacttttatcactctgccttcccagcatcctctcagatgcctggtttttcaggattaggttcggatttccgaaccatcacacatcagtccttatcatatcacaaatcgtttggttctgtaaatatccgatgctgccgaaactgtgcatatatgcgccgtttctttaaacctatttgttcgatatgtttatatgcatgataatcagtttctcctgttttgtcaactataaattgcgatttttgttacagttcactcgtacccttctgcgttccgattccgtgcttgcacgaaaatcggaacgcagaagggtacgaagggagcgccattttatgaacaaaaagagctgcaaagcagcggaaagcatcgaagatgcgcttttgcgaatggcgcgtgtgcacagtaacaatttttacggcttcctcacgtacccagcaccaccgccatcgtgccgatcaggatgcaaagatccgccagattgaataccacgcgatcgatcgctgcgattcctgttttcaggctgacgtaatccacgacatattcccgcatcacgcggtcgtaggtattagaaaaagcgccgcccagtaaaagcgataacccggccttcaaaagctttttcccgcgcattccaagcgtcagcacaaacaccaccagcactgccaccgtcagaagaacggacagcaatgtcaccagctttcgtttttgttctccgaaatttaaaaatgcgcccttgttgtgatagcgccgcagaagcgcctttccatctaaaatttccttcggcgtatccagcacgtcgtattcttctacgtaatttttcattccctcgtcaatcaggaaggatgctgcagcgattcctgcaaatttgtagttattccggataatttcctgcaatttcatcaaatgtcctcctcatgtccagttgtccgtagccccatcttctgctcgggtattcttcctgtgtctgttcccgcgcaccgcggcttagaaacgtctggattccccttccggaaatcctcgagtaattgttctccgcaacgcaccactgcatcagctgcgcacaggctcctgccgtaagtgcagccgccatagagctgccgctgtaggggccgtttaccgtgctgatctccacgcccggcgccgccagatccggcttgatctccccggttctgccaaagcccctgccgctgcggtaataaaagcttccgttttcactattataaaaagtgaccgtcaccgcatctgtcgtataggagggaactgtgagcgtcacatccgggtctggaaccagaaaaaacagctcgccgcttcgaaactgctgcggtgcaagccaaatatcaaaaatactttccggaaatacccgtgctccacggattaaaaatgtccagacgccaggagacggtgctgtaaagcggatcagcatcaactgatctccggtattacgttcgtttgcagtatctgtaatctgtatccgcgtcttttcatagacaaacgtgtattccactgtgctgcccagaccaaattccacctccggcagctgctccccgccgggtgatcgaaccgcaagccggaacactgacggcttacttccccataactccgccgtaaatcctgtgacgccttctccgacccgaagctccacctgctgctgattttcggtcagcctcccccgaaaatggcccgccgtgtttccttcatttccacccccgatcaccaccgcctgtgaaacgctgcgcgcgatcctctgcaaatactccgaaaacaacgaaacgccgctgtggcttccaaaggacgtccccagccccaggcagatcacaatcggacggtacagcgggatcacaaactgttgcacatatttcacagcgagcagaatatcgtctgtactgtatgccggttctttgtccgcgatccgataataatcccggagatattgttttgccgggcgaagcttgactgctacaatctcgcaatccggcgctgcaccggtaaacaggctgccctcttccagacggcttcccgccgcgacgctcgccactgcggttccatgtccaatttcatctttttccggcaccaggctgtgcggatcttccagctccaacgcccggtcgatctgttcccggacgtattccgttccatataaaaaaccctccggcgactgtccgctctgatctgtctgatcccaaatcgccagaatcctgctgctgccatcagaatagcgaaataccgggttttcataagaaatcccggtatcgataaacgccatcactaccctgcgccccgtcaactccagcgggggccgctgctgtgccagaatcccggagccctccaacggttctgtccgaaacgtccgacttcccgccgctggaaacgcaccgaggcaaaacagctgtggaaggtagcgatacaggtaattgaccggagaaagcggcagcaccgcagaccgatccagataataaattcccagagttccatccacctgctgatagcagaaggcttcgtcctcctgatttgcttcctccggcacatagtccagcaaaatactcatataatcttcagaaagaattttttcccgacagttcatctgtctcctttggacacagaattttccctctgtgccctgcggattttatatcagcatatgcgcagtattgctgatatgttcctgtagtattccgttgaactctcagctttcgaacattttcttcatgcagttcaaagttcaagcttctttcgtttccgccgctgcgatctgtttcatctgatcccgctcttccagcgaataaccgttactgcggatatcaatcagcggtccaccggttccccggatataatctccggtaatcgtcacgcgtccgatattgtcatccttcggaatttcatacatgatatccaacataaattcttcaataatcgaacgaagcgcacgagcaccggtatctttttccatcgccttgtctgcaatcgcttccagtgcatcgtcggtgaactccagcttcacctcgtccagctccagaagcttctgatactgtttcaaaatcgcgtttttcggctctttcaaaatccgtaccagcatatcccggttcaagccctccagcgtgcaaatcacagggagacggcccaagaactccggaatcatgccgaatgtccgcagatcttccacttttaccatggaaaggatatccttttccttatcccagcgatcctttaactccgcgtcaaagccgatcgaggtctttttgcgcagccgctgtttgataatctcttccagatccgggaacgcgccgccgcagataaagagaatatttctcgtattgactgttgtgagcggaaccatcgcgtttttgctgttcgcaccgaccggaacctccacgtctgctccctccaacagcttcagcatgccctgctgcaccgattccccggaaacatcccgggaagtcgtgttgtgcttgcgtgcgattttatcgatctcatcgataaagatgatgccctgctccgccttatccacatcgttgtccgctgcagcgagaagcttgctcacaacgctttcgatgtcgtcaccaatatatcccgcctctgtcagggaggttgcatccgcaatcgccagcggaacgtccagaagcttcgccagcgtctttaccagataggtcttaccactgccggtaggtccgatcatcaggatattggacttttcgatttcaatctcatccattgtgccggtggcaaccctcttataatggttgtaaaccgctacagaaatgacttttttggcatattcctgaccgatcacatactgatcaagctgctctttaatcttatgtggtgcgggaatggactttaaatcgatcaacggctttgtgccggttccttttttcttgatcttctgtttctgcggcatcccgtcgttcatgaaatccgcaagattgatgaagctgatgttcgggaagcctcttctgttgcccgaggattcgtcggagtcattcttggaatcgtcgtccgcatcggatgcctccagaatgtcagcggcagtgttgtcggatgcgttgtttccatcctgtgcgtcagctgtttctgcgtcgcttttttcgtttccgccgcctgcagatttctgtcctgacgttccattcgactttgtcggatctccatacggattgaacggattattcaacatgttcatgaacatcggattattcatcatctgctgataatcaaactgacttaccgcatccatcgtcttgtgcatacagtcgtcgcagatacagatgttattcggcaggtggaacattcttcccgccttgctttccggtctgcggcaaatataacaaatatcttcaaattctttttcatccatagtcggttacctcatcttccgctttctgctatcaaaagtataatgcaggatcgttcctgagacaagtaaactttctctaaacaactgtctcctgtacagaaatggctactgttcacacgcgctattcgcaaaaccgggatgactgcagctctcgcccagccatcccggttccgttttttatctctgtttgctttcctgtgcagccttgctcgccgcattgatctggtcataggaagaaagcgtgactgtcacgtttttctgctgataaccgtttgctgaatttaccataatcgtaatttcaacgctctccccagctttataatactgcatctgcttcgtcagctcttcctgattctgaacggttacgccgtcaaacgccaccacaatgttgccgcgcaccaatccggcagtttctgcaccggttccggaataaacctgcgccacaaaaattccctgcggcatactgaagttctcggacaaatcgctcgtcacattgatgcaggaaattccaagatatccgcgctcttcctcggaatatttcgtccgcgtctggcgttccatcagatcttcaataatcggtcttgccgtcgaaatcggaatcgcgtaacccattccctcgattgacgagccgccgatcttattggagttaattccaatcacctctccccgcatgttcagcagcgcgccgccggagttaccggggttgatcgctgcatccgtctgaatcagggaagttccttcttcggaattgctgctatctatcttacggttcagtgcactgataacgcctgtcgtcacagactgtccatagcccagtgcattaccgatcgcaatggccggttcaccgattttcaggctgtccgaatctcccatccttgcaatgcagatttcctgttttgtgctgttcgcaatggtatccagttttactgcaacgactgcaaggtctgcggaagcatcggtaccctttacctgcgcttctacggtttccccgtcgataaactgaacatacagctgctctgtgctgtccactacatgattgttggtaacgatcaaaagctcctgctcgttttccccgatgataatcccggaaccgcttgccgtctcatcctgggaataagtctgtccccagaaatcctgtaccgtctgtgtaaaattattcgtaatcgaaacgcacgccggcattaccgcttctacgacctgcgttacatccgttacaactgcagatgcgctctgctgctgtgcaatttccgatgctgcagcaacctgtccgtctcccgttgttgtatcctctgtcagggacgaatctccggatcgtcctgcctcagagcgttcgggactgtctgttgctgcatggtttccgtcatcttcctgtttttttgcatcatctcctgcatccggagctacctccaaaacgccgaccgacgcggaatccagctgatttgccgatcggatcgaataaactccgatcaagccgattccaatgcagacgcaaacaaaaatgacgacaagtgcgctaacagcaatccatttgcccgcagaatctccttttttgggagcaggcgtctgctgtacgcctggctgatagccatatttctgttttgaatcatcgccccggtatctgtcgttataataattttgatattcgtaacggctgcgcgagggctgcgcgccctggtcagcgtccgatgcactgttgaatgtgtcctgcgtgttgtcggatgcgttctgtgcgttatccgccgcacccgtgcttccgctgctatatgccgatgtgtcatcggacacgccactgtacgccgacgtatccgacgcatccgttttctgtgcactgtccgtgtattcctgcccaccgctctccggcgctgtgccgtccatatgctcctgtccggttgtttcttccgggtcgtatccgtaacccatgtcgtgacctcttttctcattcgcttccatatccggtgcgtctgctgctctgcagacagtataccgaatagttgtgtccattctgtgaaaaaagccgcttccggagtttttcggaaacgactttttatgtcttattctttctcctgcttccagtagcctttctgcaaactgcagaagcgaaccagcccaggcggaagcttctggtattttttaccgaaacggtagcccagccatttcatgccgctctgccagatcagcttcggcagaagccacggtgcggtttttgcaagataaacggcggtctttttgaccagcttcatgccctcgccctccggcggcacaccgtcaaacacagccggatactgcacatgggatacaccgaggtcaaagtttcttgtaaactgctgccagccggaataattgtgggaatgaatcaccttcgcatccgctgcataggcgatcgcatagcccgcctgaatcactccggcagcataaatcatatcctcgttaaaaatcgtatgattcacgaatccgccgagctgttcaaatatatcgcgcttataggcggcgcagacgttcgagcaaaaatatgtcttgattccgagcctcaaaagatccgcctttgttttgaccgacggctgctccgggtaattgaactgcctcgtatagcgttccattcggctgcaattttcttccggaagttgtcttgcataggcggctgcgattttttcatcggaaaacaaggccttgcacagctcctgcgtcagatattcatccgccggaagcgcatcctgcgtcatgcagacaaacacctccgcatccgaattggaaacagcgaggttccgtgtttttccatgatcgaactcatcctgagagatatggaatagcatcgcttttggatgctcttttaaaaatgtgtcgcaatccatcagcgcttcaaacgcttttttttcggtatttacaattacaatccggttcaccgcaagcacctgcttctccagctgctccatcagcgccagaaaacgttccttcgggtgaaatgtcggaataataacatctacttttacagaatccatattttactttttcatatactggctggtgtctgcctgtaccttctggctgtattgttttacctgatcggaaggttcgtactcggttacgtcgaacagcagctcatggagcttgacaacgtttgtttccagatccagcggaataacacaggaacccttcttgccaattgtgccggttgcacggctatcttcaaatggcacaccgtcctgtgctacgatctgatagtttgcaacatcggacaggatggaagccatttccgtcacatccaggttggtgtatacattttccatcaccttgttcaggatcgataccagagtagtcggactcatggtctttgccttatccatacatgccatcagcactttccgctgacgctctgcacggccgaagtcatcgccgacatagcggatacggcaatatgcggttgcctgcagaccgttcagcgtctgcataccggaatgcgtaacctttacgatgttctcgttcagcgcatcattttcattttctacgaacatgcttcgctgatagttgttcagatggtcgatttcgttatcgtgcacgtcaatgtctatgccgcccagctcgtcaatggtctcgatcagcgcatcaaagcccactgtcacatattctgtgatatccaggtcaaagttcatattcagcatgttgatcgcctgctccggaccgccctgcgcatatgccgcattcgctttattgtagctgtccgttccaagatttaagtaggtatcgcggtaaacggaaaccagcttgacgtctccggtgtcctgattgatagatgcgatcatgactgtgtcggaacgggagcccttgcccagcttgccctttctggaatccacaccaaacagtgcgatattacggtagcctttcatttccttattattttctacctgcgggtttaccacaatatcttcttcattgatcttgatcttgtcaatcttcgttaccatattgacaccgacaatcgcaatcagtaaaacgatcagcgctacgatttccactgcaaagaagatgattcttcttctctgttttgccttacgcttctttgcagacatcttttttctgctgctggaactgccacttctctgcggtgctctcttagagctatttgtacctgttgacatgttttcctctccttgtgtttttttcgcgcattcaaatcaatacgcgttttcgttgataaatcctctaaaaatagttaaaaacataattttgaaatcaaagctcatgctccagttttcaatataataaatgtcatactcaattcgtttgcgaatcgacgtatctccccggtagccgttgatctgcgcccagccggtcagccccggacgaacctggtgcttgatcatatagcgcggaatctcttccttaaacttctcaacatactgcgggcgctccggtctgggacctaccagactcatatccccgatcaggatattaaacagctgcggcagctcatcaatgctggtcttgcgcagaatccgccccacctttgtgacgcggggatcgtttttcgtcgtccagcccttcttttcttccgtggtgtcctgaacatacattgtacggaatttgtacattttaaacgcatgattgtgctgtccgattctttcctgactgaaaataatcggtcccttactcgtcgcacggatcaaaattgctacgatcaaaagaagcggcgacgtcactatcaatccgcaaagcgaaccgaaaatatccacagcgcgctttgcaaccgcatttaatgtgttgctcagcgggacataacggatgttgatgaccggcagtccgccaagatcctccgtataaggcttgcccggaatcaggctgttatagtccggaataaacttcgtatgcacgccggatttttcacagagattgacaatctcttccagacgatcgtagtcctgcagcgcaagggtcacagcgatctcatccagtttgttttccggcaggataaagggcaggttatcgatggaaccaagcaccttgactcccttgtaaaccgcgcctctcggcacattatcgtccagaatgccccgcaccatatagccccactggggattggcgataatccggtcgatataggcttccgccgcacgagaataccccaccagcaaaatgtgcttcaaattataaccgcgtttgcgcatcagatgcaggattctacggatcagcgcacgcaccagaattcccgaaatcgtattgatgatagcaaataatgccagcatgccgcgggaaaaatgctgcagctcgcggtcgatggagttggcaaggtataaccctgcaagaaacaggataattccgatcagattcgccctgataatattcagtatttcattttccgggcgttgtacacgcttcggcgtatacaatttgttccagtaataaaggatcagataaccgggcacaacaaaataaagggcggaaaaatatatgcccatgtccagtacacctatttctttatctgcaaagcggctcccgaacatcagccaccaggccaacagataggaagctgctgtaaccacggcatctacaacaacatgaagccggttcaaataacgttgattatcctttatcattacggctcgtccccatattcaaaatgtagtatacaataccttccagcaaagcacaaggatttttacgaatcgcgcaggtgaaccgtaacacttgtgtacacccacagtcaccgcttacacacgccgaaacaggttgacccacagctgtaactgcaaactgcaataatgcagcaaatttcgtcctgcaaaggggaccttatgcgcgcgtccctctttcgaagcagacagacagattcccgcccggattccttttgcgtaagtcgctccaaatccttttttcataaaaaacagctgtttcatcaaaaatcccgccagcaaaaaaggcagattcaggatcagctgcagcagcggcatatttttatagatcagataaatattgtttctcgaagaatgcgtcaccttaaacgcattgtaccgcgaaccggtagaaccgctccctgcgtgatagacgactgcagccggctctgtgacatttttcagcccgaaaatctgtgcccggtatccgatatccacatcttccaggtatgcaaaatgaagctcgtcaaaccctccgatctgctccaggtgtgccttgcggtagagcgccgcccctgcgcaattggaaaaaacacgctttggcgctgtgtaattggaagaaggccttcctttgccaatcgcatacgcccagccaaatgccgagtacagatcccccgccgtatcgacaagctccggttccttcatcgaaagcatcttcgccccgactgaaaaaatcttctcatccgcttccattgccctttccagacgttccagacagaagcgatcagtttttgtatcgttatttaaaagaaaaacatacggtgtagcagcagcttcaattccggtattgactgccgtacaaaaacccttattttccgaaaaacagatcagcttcacctgcggaaaatgctcctgtatccacgaaacacttccatccgtcgacccgttatccacaacgatcacggcgatttccactgtgctctgaagcaggctgtccagacagtcctgcagaaaatgttttccgttatagttcggtattaccacggtcgtcttcatccaccgattttgctcctcatgtttcctgtgtttggcgtccgcgcgagggagagtctcagagcgcggatcgcctgcctacgcagcaacaaagccgcctgccgcggtgcgctctatctgcggcttacgcctgcggatcccataaaatcccataccctgccgctgtcgcttctttacaaaattccatactcttttgaaggatctttgtttcctgcgctgccgtcggaagcccctggcaggcttcttttaattccgctatcgtctgcgcgtaacgctcctttaatgcgttgcaaacctccatgctgcgcaggtctgctgccggtgcgctctgctgcagcgctgcacggtgcatcggtccggaatatcctttccgaagccctgcataccgcatcgaaccgtcgttttcatacagcccgctcaccaggaagcctttcggatgccggatgccaaaaacatccctgccccccggcagaggctttgcccaaattccgatttccgggcgctggcaaaatacactgtcttcatagtcttcccgataaaagccaagatgtttcagcccgctcactgtcgccttccagccttttcgaagacaataatcttccagcgcacgctgccccgcctcgtaagcgtagcgcttgctctgcgggttcgacgccgtagacgcttcatggcagcgccagtggtacagcaccttcggcacatgcacaaactgtccgcctgccgcatacgcccgcagcatcagatcgtaatcctgcgccccgtcaaatccgctgcgcagctttaattctttcaaaaatgccgtttcgatcaccgtaaaatgacagatataattgttggtcaaaagcatttccccgtcaaaatccggcttgaaattcggctcatagaagcggctcgccgctttgtcgcatttatcttcatcggaaaacagcacaagcttttgttttccgcgctttttttctttttccagacaatccgccatctcccagagtgcattcgcagtcagcagatcgtcgtgatccagcagaccgaccgcgtctcccgctgcaagttcaattcctgcgttcgtattggcggaaattcctttgttttcggaaagggtgcagagcacgatgctctgatccttccattctgcaagatttgatgcatctgccgcttcccgcagacagattccgttcttttttgcccaggcctgtacagactctgccgtgcctcccgcatccgctacaatcagctcccagtgcggatacgactgcctcgacacgctattaagcatcgcctccagatgctcttttttcgtccggtatgccggaacgacgatactgatgcgcaaggaagcagaatgctcccgttggaacgaaagtgtcttttcgtccggctcctgccaggtatagacctcctgttcctgcccaatccgctctaacaccgcccacacggcatttctgattccgtttttctgcagataataccaggtttttttcagattggatagggaaaaaacagacatccgtcgaactccttttcctgctacagacgcctgcgcgtgcccaagtgccggaaaactccgacaccgggcacgcgccgtgtccttttgattcgtgatataaaccctatgccagagcgcatgctgcatttttgctgcaaaatacgctgctggtgctccggctttttcttttacagaattgccttcaggtcagcggtcagcttgtcaacctttgcctgtgcatcctccaggctggttccctttacgcccatatagaatttaatcttaggctcggttccggaaggacgtgcacagcaccaggaattgttggtcagttcaaagtacagaacgttggacttgggaagtccggtcggacgaacctcgccggttgccatatctttaacctgatccttatcgtagtcgcgcatctctacaacctgcaggtcgccgaaattcttcggaggattgctgcgaagcttatccatcattgcggaaatctgggctgcgccgtcgattcccttcagagtaatagcatactgagtttctttgtagtagccatatttctcatacagcgcaagcatctgatcccagcaggtcatgccgtgcttcttgcaccatgcagcggtctcgcacagacacattactgcaacgatcgcgtccttatctcttgcatgggtgcctgccagacagccgtaggactcttccagaccgaatacatagtggccttttccagcctgttccatccatttgatctgctcgccgatatacttaaagccggtcaggacttctcttaattctacgttataatctgctgcaatcgctgctgccatattggtcgtaacgatggtggataccataacaggatcaaccggcatccggttggtagcggtgcgctcgcgcaggatgtactctgcaatcagcatgccggacatgttgccggtgaagggcatgtactcgccggtcttggaatcctttgcataaatgccgagacggtctgcatccgggtcagtagccagaacgatgtctgcgtccaccttctttgcaagctttaatgccagggtaaatgccttgggatcttcagggttcgggtaatccagcgtcgtaaatgcaggatcgggacgttcctgttcgggaacaacataaacgtgcttgaagcccagctcagccagaattcttctgacgggcttgttgccggtaccatggaacggtgtgtacacgattttcagttcatccgctacttctttgatgatttcgggatgaatgatctgtttctttaactcttccatgtaggcaacgtcgatttcttcgccgatgtactgatacagaccagcttcgatggcatcgtccttggacatggtttttaccgtatggaaatcggttacatgctctacctcgtcgatgatctcatgatccttgggggcagttacctgtgcaccgtcctcccagtaaaccttgtagccgttgtattccggaggattgtggctcgccgttacaacgataccggaaatacagcctaaggtacgcagtgcaaaggacagctcaggtgtcggacggagttcatcgaatacatacgccttaatgccgtttgcagccatgcacagtgcagcctcatctgcaaattcaggagaataataacggctgtcgtatgcaattgcaacgcccttttcagcgccgccctgctttaaaatgtagtttgccagaccctgtgttgcttttctgacagtataaatattcatccggttggttccggctccgatcacaccgcgcagaccgccggtaccaaacgccagatccttgtaaaaacgatcttcaatctccgcctgattatctgcaattttgcggagctcttccttggttccttcatcaaagtaggaatcctccagccagaatttgtactgatccatgtaattcatcgcttttgctacctccatcttttctgatgcctgccgtctcttacgtccctgcctgtcagtcttcccttggctgcagtgcatcttctttaagttagtatacactattttttcagacccgtaaagaaaagtcagatttatctaacgaaaaattcgggttgaaataaggatctccggcttccagctcagctttccatttgttgcggaagcgttcggactcttcgttataccgttttgctttttctccctgatcgtctaatcctctcgaaatcgattcgaaatgatacagctcggcaaagggcgtaaagacgttcagataaccagccttgcgcagcttcaaacagaagtccacatcgtttaatgaaatttcaaagctctcgtccagaccgccgacctgctcatagagcgattttttcaccaaaagacatgctccggttactgccgtcatgtcctgcgcatagcacagacgtcccatgtatcctaaattttcccgcttctggcggtaatgcacatgtcccgccgtccgatgcgcgccaagtccgatcacgacgcccgcatgctggatcgttttatccccatagtaaagctttccgccgactgcgccgacgtccgggcgctgcgcatacatcagaagctcttccatccagttgatcgtaattacctgcgtatcgttgtttaacaacagcacatagtctccggtcgcaagagagacgccgaaattgttgattttcgaataattaaatttaccctcgaaggtcaccacgcggatctgcggattattctgcagctcgtcatagtaggaaaaaatctccttcgtctcgctgttgttctccacgacaatgatctcgtaattttcccaggtcgatttttccacaatggagctgatacagcggcgcaggtcttccacatgatccttgttcggaataatgatagaaatcttcggttccccaataatttcataactgattttaaaaatcgtctcaaacgcgcgagtgctcgtaattgtaaagtttttaaagccgtgtctgcgcaaatgatccgcaaccgcgcctctcgccgcttcgaccacgtaaggctttgcctcgatattgcccgcaacactgcctgcatgggagcgccaataatacagaagcttcggcacatggacgatatgcttcgcattgtccgtcaggcgcagaatcatatcatgatcctggctgccgtcaaattttgtccgaaacagctccgtgccatccaacagctctctggaaaatacgctgaaatgacaaatatagttgttcgcgcgcaggttgtcgatcgcataatccggcttgaagtgcatcgtgatcatcttgttgatgtccgggctcttaaacgtcgcctcatcacagtaaataaagtccgcatccttttcgttgatcgcctttacatactcgtaaagtgcgcagggatgcagaatatcgtcgtggtcaaacagcccgataaactcgccggatgcaagcttatagcattcgttcgtgttgcccgaaatgccctcgtttttggcaagcttctgataaacgattctcgaatcctgcgccgccagccttttgcagtattcaccgacataggcgtgcgcatcgtccgaaccgtccgccagacacagctcccagtttttgtaggtctgccactggacggagccgatcatctcggttaaaaagctttccggcgtgttccacaacggaacaagaatactgatctttggcatccgttcaaagacagccgcctcctgcttctgtctttcctctgcggacgggaagctctgggtgccgtaatgggtcatcgccttcttttcccaggatttatagcgcacctttgcaatcacacccgacaggctgccgcaatttttcaaacggtccttctggcggatcacaaaatgcatgcactttctggcagggccggacgctttccagatcggattgtttttgatgcggttcaatttgaactgcagatcgtccacctgatcctccagctcagcgacccggtttgccaaataaacggctttataatgttctttctcgtaagcgtcctgatagtcctttttttcttccatgattttattatttcctcactgtaagcatttccggactgaagcggtaaagcttctgccgcgagcaggtatcttcccacaaaaagccgatcaggtagtctccctccggcaggctgtcccgatcgaaggtcacgcacacgcccggcagctcggtatggacaattccgtgcagattttcgtcgatatccgggcggaactgcctcgtacagggaatcctccagacctcgccccgatcctcgggaagtgcttccgtactggagccgggcgcaatatagccggtctccaccttctttaacaacagggaaaaatcgtaccgacagttgtcaacctgcagtgcccatgtccagccctggatcatccagtcgcctgttcctgctcctgcagtgcccctttgccagcgccccatgtccccggcgaactccacaccgatgcgcagcacctcgttatgccactgtggttccagaacaccctcgatcttctcaggggaaactttttccactcttttgtcaaaatcataacggcagcccgtataaaattccgcatccagcacatcctttaccagatatctgtgatagaacgggtcggttccgtatagggacgggtgcagttcatagagcaaattcagttcctgatgcaggcggcgcagcttttccgtgctgtcgtccgcaccgcggcttaaggattcatgatgcgtcagcgtcacgtcgttgcgtaccacgttgtaatagcccatttcatatacatgatagcagaattccacgtcgttgaacgcgacacgcaggttctcggacagtccttgcgcctgatcgtaaatgctttttttcaccagcaggcaggctccggttacacccaggacatccatcgccatgcggttgcgcccgaaataaaattccagcgcatcggagcggaactgcagcttgtgtgcaggtcccagatgaatattggtgatgcccgcgtgctgaatgatctccgtgcccggatagatcagctttgcgcccaccgcgccgacgtgcggcagaaccgccttttccatcagcttttccagccagttgtcctgcgtaatttcgatatcgtcattcaataacaggatgtaatcgccggtcgccagggacacgccaaggttgcacattttggaaaaattaaactccatcggttcatagtgataaacgaaccggaaatcctccttcaacatgtcgcgcatccgttcaattcttgcacggttttgttcattgcttccgttatccacaacgatgatctcaaaatcccggtagtttccactttccaggacagaatgaatgcaattcgataaaatatggggatgatccttggtcgggatgatgattgaaaccttcccggagggcgtaagaggccagcctcttcttacatatgccgcctttttcagatcatcatacgtctcttccataccccagacttcgattttttcatgatgaaacagcacgctgtcgatatgtgccgttccattctcgatttccgtcaggcgcagcaccaggtcataaaggttgcgcagtgggttctcatctgccagccacggacagttctccatcgcctgtctgcgcaccgcaaagaatccgccgaaataaaagcaggacatcagcgtatccggcgaccagtccggcttcagccagggatttttgcgcttaccggcttcgtcgatttcatcctcgtccgcgtaggcgatcaccgtttcgggatgggcttcaaaccagctgagcacatgtgaaatgcctctcgtgtccgggcttgcgtccggcgcgtggaaaatcaggacgtccgcgggcgttgcgccatttccataccgccgcacatcaaaatccgcgcggcactcatcgtaggagatcacctctgcgtgctctgccctgtgctctgcgcgcagtgcctcgtcctcctgggcttccttttcccgaatccactcgtcataggtgagggtctgtttctgaatctgctcctgataccagcggtatcttttctttaccagattattctgaattgcttcttttatctttgaaaccaaaaacctttcctccttgccgctgccgccaggcgcgcctgaatatcctgcagcatttccgccgacagccatgcgatctgtgcccggatgatcagtgcttcgccatccgtcgcctcgttgtccagacaatccagccgaacgctgatgttcggatctcctgtttcaaacagtaccgtcggaacatgggacggggtatctgcaagcacctgtccgttcgtcgacaggcactgatccagctgtgcccgcgtcagcgcttttccgcgccattcgattccatgaatctgtaccagacacggcagctccgcaggatctaagcgaatcgcttttgtacctgctttgcagatgatcctggcgttgatcagatcgtccgcctcatatgcatcatattgataataagaatgctccggtgtatatcctgcgccgaagtcttcaaatacctgcacctttttgcggtccgcccgggcaaaaaattcctgatacggcacagcacggttgccgatcagatgccgaagctgcccaagagccgtccggctccgcccgtccttttcctgcaggacaaagtgctggaacgccagctctttgtccgaaagctcccgcatctgctctttgccgatgccgagggcttccagatgctttttcacaatcggatgctccatccgaaccggatcctcctgaccatagcagttcaatgcccggctgatgatctgctgcggcgtcagcttatctgtcgtccactcgtaatcgatcatcgtccagatatcaccctgtacgcagatattcgggaaggtcaggtcataatcctgcttcgtcccctccgctttccacgctgcgattttgcagtaacggtcaaacagcttatcaaaaccggcttcgtcattgttctgtaagcactcatccagcagttcttccaatgtccggctattttcgagatattcgatttccgcaaagggcaatccatccggattccgtttcagctccagacggttgactgagagggtgctgcctttaaaccgttctgtgaagacgcattcattttctgccagggcttcaatatgtgccgcagcagctgaggctgccggatatttccggacagtgtgttttccgtccttttccagaatatccgtgcggatgctcaggtgctctgccctgtcgttggaaaaacggctgtatacaatatccgtcatgggtcctgtcatcacgaggaacgaattgctgtactgtccaaacagtccctcgcggatgagcatgtcgaacacctttttttcatcgaacagcagcatccggtcgcggtcgaaatttcgtaggttattagatagttctccgactttcggcagataccgatcggagtacagcgtcgtcataaatttataatccggataagggtagtagaaatgatattccgtctcaccgcattctttcaggattttttccagaccgctccgggaaaaggtgcgagccgcaccgccctgagggtaatcctccaggcctgaaaaaaacgtgccgacgtggtcttcccggcaccccgcccaatattttaaaccaagtttattctctatcgcaatcacgatatgtccatcggatttcacatgttttttgataatccggtagaaatcatgaaagggggtttttccgccgatatagctctgcccgtattcgaacacgccgatcagacagacaaaatcataatccgtcggcagatccggctcgatgtccgaaaagttgcccacatggatcgtcacgttgttacagtcctgatggcggtaagcgttgatcaagctgcgttttttcgaaaggtcgacgcaggttacgctgcctgccttctgtgcgaggcttcccgtaatcgcgccgcagccggaaccgatttccagcaccttcatgcttttgtcaacaggcagccatccgacgatattttcccgcaggtcggaaaggtggtaaagcacctcccagctcgccgctttatagatttcctggggatattcccggggcgggattgtttttaccagctccaaaagtgcatcctccgacgctccgtcgcagtaaaaatcctgttccggataatgggaataatccagcacaacattcccgatcttctctgtcctgcctgtctgcatacgttaaatctccttcacctcaacctgagattccatatcaaaatagcccactgtatccttgtcggacacgaccgtaatattcagcacgtcataaagacgatgatacactttaaacgtatctttttcataccctgtcacacccagggatatgagatagtcaccgccctgcaggcgcatcttctggcggaatgtaatttccagcacctgacccgcctttacgctctccagaaacgtcttttcaaacatcgtgttcgttcccgtgatctccacgcccttgatgtttttgatggaaaaagcaaagatcggcgccggaagatcctgaccgattttcaccttcatatgcatcgtgaattcgtcgccctttaaaattgcggtcgtctgcacgtcgtttttgtccgtaatgtaatacgaaacaatttccgcctgcttcgtgccgtattccagtgtctccgggttgacgcccatgcgcgccgcttcctgcttctttttctgtttgtcaagcgccgcccgaacatccccgtccgccgtcaggtcaggtacatccacgccagccttaggcgtttcgtactgtcccaccagcacctgcttgtaggcgtcgatcatgtctttgggcgaaccttctccgagctttacgccctgatttaacagaatcgcacggtcgcagtatttgctgatcgcgctcagatcatggctgacgaacaggatcgtcttgccttttttcttgaattcctcgaattttcgatagcattttgcctggaaaaatacgtcaccaaccgaaagcgcctcatcgacgatcaggatttccgggtcgatattgatggcaactgcaaatgccagtcggacaaacataccgctggaataggtctttaccggctggtacacatagtccccgatatccgcaaaatccaggatatcctgcagtttttcatcaatttctttttcagaaaaaccgatcatcgttccattcagataaatattttcgatgccgttgtattccatgttaaagcctgcgcccagctccagcaaggcggaaattctgccgtttacctgcacagtgccgctcgtctcatgtaatacgccggtgataatctttaaaatcgtcgatttgccggagccgttcgtgccaataatgccgacagtctctcctttataaatgtccagactgacatcctttaatgcgtaatgcggcgtggaaagtttcttttttgtcagtcccagggattcgatcagacgatcccggtttctgcggtacagcttgtatactttgctcaccctgtccacatgaattgccagttctttttgttccataaccagttttcctttacatgatatccgcaaaatgaatcttgagtttcttgaaaatcagcgcaccaatgccaaacagcaccaccgtgataatccagaaataaaccgtggagtaaaagtcttcccagaaccactgttttccgtatacagcgcttctgtagccctccacaatgtatacaagcggattgattttcacgatcatctgaagcttcatcggaaaatcattgatattccacagcaccggagttgcccacataccgacctgcagaaagatattgacaatggactgcagatccctgaaaaagatgacaaccgagcaggtcgtataactgagtgccagtacaaaaacgaacatgcagaagctgtaataaaatacctgcagtgtatacaggctcggataatagccgttcaatgctgccacgatcagtaaaaccagcacgaaaaacgcatgaataaatgtcgctgcaataatcttgataatcggcaggatactgattttgaatacgactttttttaccaggtaattatattccagcagcgataccattgcgctggtcagggcttcggaaaaataaaaccagggcaccagtcccgctgtcagaaacaggatatacggaacaccttctacgcctccggaggcataacctgtccggttcgggaaaataatcacgaaaacaacccagtacatcgcaactgtgatgaccggctgcaccatcgcccagaacgctcccatataagagcctgcgtagcgctttttgaaatcgctctttgccagtttccagatcagcctgcggttctggtataattccaccggcagcaccgtgatcttatcgtataatcggataaaggcaatgaccgccgccacgatcagcacgcaggcaatcacttttttcagaagctcatcctgcggattggcaaggggattatgataaacaaggataataacggcaagaatcgccatcaccgcagtgaatatggcgattcctgtttttttattcagtctcttcatttatttctgctttctgtaaattcggcaaaagagccccactttttatctttgtcagacaaggtcagttccattccttccggaatcggccattctacgccgatctggggatcgttccatgccagaccgccttcgtcgttgggatgatagaagtcggtgcacttataggcaaattccgcataatccgacagcactacaaagccgtgtgcgaaattcttggggataaagaactgctttttgttctcttcggaaagcagcacaccgtaccactgaccataggttttggagccgggacgtaagtcaaccgcaacgtcaaacacttcgccgcgaatcgctctcaccagtttgtcctgggggtaattgatctggaaatgaagcccccgcagaacgccttttttggatgcggactggttgtcctgtacgaaaacctgatcgatgccggcttccttgtaatcgttgtagttataagtctccatgaagtaaccgcgggcgtcgccgaacacctggggagtgatcaccttaagaccttcgatatgacatgtttctactgaaatttttcccatttttctattctcctgttccgtttttaaagtccgtttgcgacctctacgagatattttccatagttggtcttcatcagcggctccgcaagctttaagagctgctgtttatcgataaaacctctgcggaacgcgatttcctcaatgcaggaaatgtacatgccctgacgcttctgtaccgctgcgacgaaatctgccgcatccagcagtgcatcgtggttgccggtatcgagccatgcaaagcctctgcccagcgtctccaccatcagcgtccctctgcgcagatattcgttgttgatcgaagtgatttcgatctcacctcttgcagacggctttacgttgcgggcgatttccacaacgtcgttatcataaaaatacagtccgggaactgcgtagttgctcttgggatgctccggcttttcctcgatggaaagcgctttgccgttttcatcgaattccaccacgccgtattctctgggatcgcggacaaaatagccgaaaatcgtcgcacccttttcccgctccgctgcctgacgcagcactctggaaaagctctgtccatagaaaatattgtcgcccagaacgagggcaacgctgtcgtttccgatgaaatccgcgccgatcaaaaatgcgtctgccagtccgcggggcgcctcctgaaccgcataggacatcgaaagtcccagctgctcgcctgtaccgaacagttctttaaaagcaggcagatccctgggcgtggaaataatcagaatctcccggatgcccgccagcatcagtgtggagagcggataataaatcatcggtttgtcgtaaaccggcataatctgtttggataccgccttggtcagcggataaaggcgggttccggagccgcctgcaagaatgatacctttcatagattcctccattcctatgcgttcattcgcctgtatgaaaaacattttgctttacaggatcgctccggcggcactgttctactgcccggcagcactgttctactgccctgcagcactgttctactgccctgcgctcctgcccagatgcgccaaaaggggaacggtgtcgcgcgccgtccccattctggtatacaaagccctgttttcttcggtctgtccggcattttcctcccggcagtccggaaatttctcaggctttgtacatttcgttataatatttctggtagtcgccgctggttacgcgcgccatccagtcttcatgctcgaagtaccatgcaatggtctttttgatgccttctttgaacatcgtctccggataccagccgatctcttccttgatcttatcgggagcgatcgcgtatcttctgtcgtgtcccttacggtctgctacataggtaatcagatccttgctgacaagcgccttgcgcgggtcgtcgtctgcaagcatctcctgcagggtctcgataatgatttcgatgatctgaatgttctgtttttcgttatgaccgcctacattgtaggtttcgaacagtctgccctgctcctgcaccatgtcgatggcctttgcgtggtcttcgacatacagccagtcgcggacgttcttgccgtcgccgtataccggaagcttcttgccgtgcagcgcattgttgatgatcagcggaatcagcttttccggaaactggtaagggccgtagttattagagcagtttgtgatatttgcagggaaatgataggtatccatatacgcttttacaagcatatcagatcctgccttgctggcagaatacggactgtggggtgcatagggggttgtctcatagaaatagccgccgtcttcgctcaaagagccgtatacttcatccgtcgaaacatgcaggaatttcttgcccggcttaaaggtgccgtccggaagctcccacgcgttctttgcgcagtttaacatcacggcagtacccagcacgttggtctgtacgaatacctcgggattcctgatgcttctgtctacatggctttccgctgcaaaatgcactacgcggtcaatatcgttttctgcaaagatctttgcaatcgcttctttatcgcagatatttgcttttacgaaggtatagttatcgcggttttcaacatcctttaagttctcgagattgcccgcataggtcagcgcatccacattgatgatacggatttcgttgtcatacttgcggaacatatagtgaatgtaattggaaccgataaaccccgctcctccggtaacaagataggttctcatgcctcttctccttttcgattctgcgcaaaaggacgcaaaatcccataatcctgatttttttccagtgtaccatattttccgtgtttttccaacaggaaaatacggcattgccgccattcccggcaaagcggcgctgcagcttgcggatatcctgcagactgcagcgccctgtccgtatcaaattttgtcacaatatcagtaacccatatagcttacgtttaagtcaacatttcctttgattcctgcaatcgaccctctcgacgaatactgccacatctcgtaacgtcctccataggtcggtgcagcaacatactgcgccagccagatcttgcagccgccaagggcgcctgtattgatcttttccgtcagccagtttttgttcgcatacagtcccggcgtgtagccgctgttacggatcgtctggcagaatgcgttgatgacagacgttcgcgccgctttggaaattccgtctgcgcgcccattcgcgctctccacgtcaatatagacaggataagtgattctgtaatttttaatcagagaaagcgtcatggaggcctcttcgaccgcttccacttcattcaccgcctggctgaagaaataaataccgaccttcagacctgccgccgtcgcgccctgaatatttctcttaaacttctgatcctcgaccagcacgcccgaagccgagccacgatagccgcagcgcaggatgacatactgcacaccggaatttttgactgcgttccagtcgatattgccgttgtgtttggaaatgtcaattcccatcacagttcccgtatttaagctgccgtccccattgaacgtgtatttcacgccctggatcacctgttcgccggtaacagcagttccgtttttgtcatagaaaaagcgttttccgtcgatcgtctgccatccggtataccgatattccacattcgcttttttgcggtaaaatttgtctttggtataataatccgccgtcgttgcctcacgataggtatccccgtccttgcagtacagctggttgccgtttttatctttcaataaggtctttgtatcgccgcggtttgtctttttctccgtcaccttcacggtgctgattccgctctctacgttgctgccgtcctgcgcgaccgctttgatcttcgcttctccggcttttacgccttttaccgttcccttatcatccaccgagataaactcttttccggaaacgatttcccagcgaacggacttgttcgctgcattgtccggcgataccgttacagaaagggaaacagtctgtccaacctcaaccgttgcagagcctgagatcgtgatcttcttgacctttacctcctccggcttggtttccggcgtttttgtcggctctgtcgctgcagtgctgctttcggttgcagattcgctttccgaaggctttgtactttcactctcggacggcttcgtgctctcgctttccgtcggcttgctgcttccggattccgattcgctctccgaaggctttgtaccttcactctcggacggctttgtgctttcgctctcggaggaagattcactctccgaaggcggcgtgttctcgccctctgcaggggattcctccctgggctgattgaaaacggcgatctgcgtttcctttgcaaaatatgcgtattttatctccggctccagaagtcttgcctgggcaggctccgggatatcggacttgccgacctcttcatattcctgtccgtttcctgccggtgttttggtggactcaacccattccacagtatcctgcagaaccgattccactgccggtgcaatcgcggtatcctctttcgccacgttgatctccgactcctttttgatctcgtccgtcacgtcgacctttttatactcaatcttgtcctttaccgtcactcgcccggaaattccggctgcttttctgccgctgatttcatccggtccggtcacggtaacgacgtaatcgcctgcttttaagtcttttaaataaattatgccgtccttgtcgtcatcctttgcgttctggctcgacgcgccctccagctttacggtaaagggttgatttcctatcagcttaccggagtttttgtccgcgaatttaattttcatatccttctgcatcgaagacagctttaaaataacgtcgacattggcttccagatccttttcctcatatccggtttccgtctccgtcgtctcttcttcagaaacctcctccgagacgttctgcgctgcgacagcgaccgccgacaggacctcttccccggacatcccgatcgcttccagatttttcccgactgcagccaccgcctccatctgcttattctgctcgtttcgtcccagatacatcgatgtcgtaaacgctgccgccgccaaaaccagcacgcccgtcagagcaatcgcgatatccagcgccgccatcggctcttttctggcagagcggcgttttcggtttctgccggatgctgcggtcgatgcggacgccgagtgctttacagtgcggttctgactgcttttttcatgaaaggtctgactgctttttccggcaggctttttcacgcggcgcttattgctgtgcgctgctgttttgccggatacctcgtcccagtcgtcaagaaattctccatcgtcccagttcgactttttccgctcgggaatacgttctgcgcgctgcgccttttttttctgttctgatacgctctttctatcttttatcccattgggagccgtttttttggcacttcccgtttttttcttcttatgctgttcctccactgattccctcctgccagctt

SEQ ID NO: 910 - DNA, 21236 bp, unidentified
  source 1..21236: mol_type = unassigned DNA
tctttgcaaagttaataaacatagtttagcacctttttgggtaaattacaattgcttgacacagagaatgtggattcatacaatagaagtgaaaaaagtttacacagagcaaggaggaattgacaatgagtgttttgggagcattagaaccggcacgtgtgatgcattattttgaagaaatctgtggcataccgcatggttcgggaaatacgaaaaaaatcagtgattattgtgtttcttttgcaaaagagcatcaccttacttatttgcaggatgaatataacaatgtgataatatggaaagacggcataaaaggatatgagaattcggctccggttatgctgcaggggcatttggatatggtctgtgaaaaagaagagggctgtgacattgattttgagacggatggactttgtctgcaggtggaagatggcattgtgacagcagaaaaaacaacgcttggcggagatgacggtattgccgttgcgtatgctcttgctttattggagacggatgaatatccacacccgccgttggagattgtgcttacggtagatgaagaaatcggaatgttaggtgccacagctttggatacttcacctcttcgtgcaaaaacgatgttgaatttggattccgaagatgaggggcatttgttagtcagctgtgccggcggtgtgacagcgcaggtggaacttccactttcctttgagacaggcgatggggagaaatacgttatttctgtcagtggtttaatgggaggccattccggtgttgaaattgataaggggcgcgccaatgcctgccagataatgggaagggttctctatgaactgcataaagaaattccattttctctgtgctccttaaatggtggattgaaagataatgccattccgagacaggcagaagcagttattgtatgtccggaaaaacggcagtcagaaatcaatacaaagattgcggagatttccgccgaaataaaacgtgagtttttggaaacagaccctatgattttggtggaagtaaagaaaactacaatcgtagaaaaagaattggcaatgacgaaagattctgcggataaggtgattaccgcccttctttgtctgccgggaggaattcagaagatgagttttcaaatgaaaggacttgttcagacttcgttaaatttaggaattatgaagacggagagagaccatgtttcactgtcattttcggtgcgaagcagtgtggagtcggaaaagcgggcgctgcttgaccagattgcctgtctgacaaaaacattaggcggcacggttaccacaaatggagattatccggcatgggagtatctggaaaattcaccgctgcgtgatttgatgtgccggatatttgaagagcaatatggtagaaaacctattgtggaggcacttcacgcaggtgtagaatgtggtatttttgccggaaagataccggaacttgactgtgtctcgtttggaccggatatgaaagatatccacacgccgaaagagagtatggatgtggaaagtgtgaaacgaacgtgggaatatttgcttgaaatattgaaacagttgaaatagcaaaaaaacggtaaatcatcgaaaccatacagttccgttgatttaccgttttttattatgtacgatttacaattcggaatatccgaatccatttacaatcgcatcaattttttctttgtttttgcagtgtggacattcacttggtgtaaaggtgttatagtccggcaaatcctctgttgagaagatgcagtggacaggttcaccgtaaatttcttttgctgcgctgaaaattgctgaaatgtcttgaatgataccgccgtagtactgaatacactccaggcttctggcaatggtacgtccggttgttgcggatgctaaaagaagaagtatgttctttcctcttaccatcggctgtaagttgtcgcggaaaatcatctgtccgtttccgtcaaactccggtgtaatgacatacagactgtcatgctggtttaatgacataataccgtttttgttcagttcttctgctaagcaggcaccgatgatttcacagccgtccatacatacgatggtgtcaatcggtttgctgtactggtattcttttgccatttctcttgctacttcataagcttccttttggcgaacttttaaggtagtcatatccatataaaaattaatgtgtgaagatgtcgttgcaaaatgtcccggaacgacttttaaattaattttgctgttcgttttggaaggtactttgtattctctgtctaataacataaaaaatctcctttcccaaatttgtagattatttgtgtcgacttctattttatcatatttttcttgttacttccactctttttcggtataataaaagaaaagttcttgaattggacgaattgttttagaaattatggaggaaggattgcatgacattattcgagatgataaagacaagaccatatgagatgcagcaggagttttcatgcggtgtcagaaaacagaatgaaaatgaggttttggtttctgtctggcggccgaaagcgaagaaatgtcagttggcagtcatagcagaggggaagcggaaactgtttccgatgtatccggcgaaaatatgcgggatggaagattattttacagttgtcttacaagcggagaatttggcagacaggcttcagggaatgccttatttttttgtggcagatggtgaaactttttgcgattcttatgccagaatgattaccggaagagagtactttggcagacgtcagggaaaagtgagagcttgttttgattttcaggattttgactggacaggagaaaattggaaaaagattccggcgcgtgatatgattttatatcaatgccacgtccgtggatttacgaaacataagtcgtcaaatgtaaaaaatccgggtacattttccggtatggaggaaaagctttcttatttgaaagatttaggggtaaatacgctgttactcatgccggcatatgattttaatgaatgtatgcatgatgaaaatggcgtggatttaaagaaagttaattactggggctatacagaggatgcgttttattttgctccgaaggccggttatgcagcaaaaaagggtgaacaggcaaaggagtttcagaagctgattaaagcagttcattcacaggggatgaacgtggtgatggatttttattttaaggatgtgtcgcctgaatttatgctgacttgtatgcggtattatgcactgcgttttcatatcgatggttttcggtttaatcaggagtgtgtgtctgttgaatggctgcgacaggacccggttctatctcatttgaaattatttggttatcactgggatgaatgtggctatgaagccggtcaggaaatgttctgcgagatgaatgaccgttttttggtgacggcaagacgttttctaaaaagtgatgaaggacaggttgaggatttttattatcaattccgcgagcagaaaaaaggagttgctatggttcactcgattaccgggcataacggatttactctgcgggatttggtgtcttatgatgtgaagcataacgaggcaaacggagaaaagaatctcgatggaacagagtataattacagctggaattgtggggcagaaggaccttcgagaaaaaaagaagtccgtgaaaagcgctccagtcaggaacgaaatgcatttcttatgcttatgcttggtatggcatcaccgagaattctttcgggagatgaatttggaaatacacaaaaaggaaataataatgcatattgtcaggataatgcgattacatggcttgactggagtttgctagagaaaaataaagaattattttcctatgtaaaaaagttgattgagtttcgtaggaatcatcctctctatcagagcagacggtatctgaccggtatggattctgaggggcttggtgcgccggatgtatcctgtcacggagtagagccgtggaatgcgaggttttcttattatagcagggaacttggtgttttgtttttcggtggctattatggcggaaattccttgtattttgcatttaattttcactgggagccacatgtattttatctcccggaaattgaaaaaaataaagaatggaaacgggtatttgatacttcaaatactatggaaatggcagtggatggaaagaaatatgagctggcgccgcgctcaattgctgtttttgagaatgtaccggttaaaaaaactgccgggacttccgataagaagaaaatcccggcaaaagggcataaaaatgcctaaagattgtggttttccacgattggatcgaacaagtccaaagaacaatgtttgtcagacgtaaaatgtttacatgttacgcaggaaacattgacattgccggatttgttgctgcagctacagcagtccttgacttcataggcactacagtttttggctacatcgcggtaagtttgctcatctgcacgcataatctgcctccattctttcaccatatcggtgaatttaggttactttgtaacaatgctagtatgagcagttaggaaggataatatacgaaatgattgtattggaaattgacagcgtaaaagaatttatgcagcatatgtttcagggcagtatgtttgaccggtttcatctgcgttcctgcgaggtgacaacatttgccacgtttcatattgacggcagatgttttgatgattggtttgacagtgatgaaaaacggacagatgaaaccggtctggttacatggaatatgacgaaaacatttgttttttcgtggataaaaggaaataaagtgccacagaagatgttgtttgatttttgtcattacatgccaaatggagatgtcggatcgattcaaatccgctatgaaaaggaaaaacttcagtttgtgaccggatatatgcaaaaggagttttctctggataaaaaagggcagcaggcgtgggatgacaattgtctgcaatttataaagaaacatgaaattgttagcactcaatttgaatgagtgctaaatttttcttgacattcgattgtgacagcgttatcatatctgttagaacaagattgaattactaattggaggttgataacatgacgaatgaacaaggaaatttagcgattaattcagaaaacatattcccgattattaagaaatggttgtattcagaccatgatatttttatccgtgaagttgtaagtaatgcttgtgatgcgattacgaaattgaaaaaattagaccttatgagtgaggcatctctgccggatgattacaaagctaaaattgaggtggaagtaaatccggaagataaaacaattacgtttaccgataatggacttggtatgacggcagacgaagtgaaagagtatattaaccagattgctttttccggtgctgctgatttcttggaaaaatataaagataaagcaaatgaagagcagattattggacattttggtcttggcttttactctgtatttatggtagcggactctgcagaaattcataccctttcttataaagaaggttcggaagcggttcattgggagtctgacggtggtttgacgttcgagatgggaccatccgataaagatacagtaggtacccggattatcctgcatttaaatgaggacagttacgagtttgccaacgaataccgtgttcgtgaggtgcttgataaatattgttcttttatgccggttgaaattttccttacaaaggcaaatgctgagccggagtatgagacaattccgagcgaggaagtgacagaggaagatacggttattgaggaaattgtggaagagccaaaagaggatgacaaaaaagagggcgaagaagcaaaagagccggttaaaaagaccaaaattttgaaacgtccggtatccattagtgatacgcacccactttgggcaaaacatccaaatgagtgtaccgaagaggaatacaagacattttaccgtaaagtatttaatgattaccgtgagccgttattctggattcatttgaatatggattatccgtttaacttaaaaggtatcttgtacttcccgaaagtaaacttggagtatgagaatgttgaaggtatgattaagttatacaacaatcaggtatttattgcggataatattaaggaagtaattccggaatttctgatgttgttgaagggcgttattgactgcccggatttgccattgaacgtaagccgaagtgctttgcagaatgatggttttgtgaagaagatttcggattatattacgaaaaaagtggcagataaactttccggtatgtgcaaaacagaccgcgagaattacgagaaatattgggatgatatcagcccgtttatcaaatttggctgcttgaaagatgagaagttcaaagagaaaattaaagattatgttttgttcaaggatttggacgacaaatacagcacattaaaagagtatttggagacaattccggagccggaagtagaggcagaagtggtcgaagagggcaaagaggatgagaaatcttcagaagagacagaggcaccaaagaagattgtttactatgttaccgatttgcagcagcagagccagtatgtgaagatgttccgtgagcaggatatgaatgcggttgttcttcttcataatattgaccagccgtttgtatcggcattggaagccggcgatgacgatgtgaaattccagagaattgatgcagatttgacggatgctttcaaagaagaaggcgatgaggaaaaactgaaagaagataccgagactttgaaagaattgttccgtaaagcaaccggaaaagaccaattagaggttaaagtggagaaattgaaaaatgataaagtttcttctatgattaccttgtctgaagaggccagaaggatgcaggatatgatgaagatgtattccgcaaatggcatgggcggtatggaactgccggatgtcggacagacgcttgttctgaatgcaaacaatgatttggttcagtatctgctggcgaacaaagacggcgagcacagcgatatgttctgcaaacagctttatgatctggcaatgattagccatcagccactgcaggcagataagatgacagagtttattaatcgaagcaatgagattatgatgctgcttactaagtaatgtaaggtattatgattaggagagcaccaccggtgcatgagaggcaggacttgctttttatgtgccggtgggtgtttttgcttatttgaaaaaaaatgaccaaaagtatgaatgaattacttgacaaaaaaattaggaatgtgtattatatattctgtcggttatacaccgtgtgcttcgatagctcagtcggtagagcacttcactcgtaatgaaggggtcgagggttcaagtccctttcgaagcttcctttattttgtttacaatatactattttgtatactattttcgaactgcctgcatttacagtaaagtagatgcaggcagtttcaataagaaaggagaaataaatggcagatagaaaactttcgcaggatatggcaggcgcgtgggggcttatgagacagaaagaaaaagtgctcatgattttacaaagtatactgactgccatattgttaatctttatcattatcgatgtgggcatggggatgaataagggctggattttaaaaacggagcttggaattgttattgtgctgtttgttttaaatgccctgaaagcctatccggagaggaagaaagcaatcgttttttatgtgctgcttaccttggcggcagtggtttgttttacactccagtttatataaatggaaaaatcttgacaaacgtatgtggatacgctacaatacatggtgattcaaagtataattttgaacgaataaaaagaatttaagtaaaaaggagaaatcgtattatgttagaaaaaatgcaggaacttatcgcagatcagttgagcgtagatgcagacagcatcacagaagcatcttctttcaaagatgatttgggagcagattctcttgatctctatgaattgatcatggctcttgaagaggagtatgatgttgagattcctacggatgatttggaaagcatcaacacagtaggcgacgtaattaatttcttaaagagcaaaggtgtagagtaaaacaattgcacataacctgataaacaggtcaagattgacaccaagaaagtttgacatagtccgcttctcttggtgtcaatgttttagagtgcaatgtatatgcaccaatgatgagaaaatgacgaaagaaaggctaggatagaactatgggtaaaattgcatttgtcttccccggacagggagcacaggtggtaggaatgggacaaaatgtttatgaaaattcagcagtggcaaaagatgtgtttgaacaagcatctaaggcagttgatttggacttgaaagcactttgctttgaagaaaataacgacattaatattacagaatttacgcaggtatgtcttcttacaaccagtgtggcaattatggaagaattgaaaaccagaggtgtaaaggcggatgtggcagccggacttagccttggtgaatactgtgcgttagtagcagcaggttctatgaattttgtagatgctgcaaaagcagttcgtaaacgtggtattttcatgcaggaagaagtgcctgccggaaaaggcggtatggcagcaattcttggtatggatgccgcagagattgataaaaatattgaagagtttgataaagttcaggttgcaaactataactgtccgggacagattgtaatttccggagagactgaacaggtaaaacaggcagcagacaaattaaaagaagccggagcaaaaagagctgttcttttaaacgtaagcggaccatttcactcaagccttcttacaggagccggtgaaaaattagaggctgtattaaaagaacttacgattgaaaaaccgcagattccttatgtggcaaatgtagacgcttcctatattacagagcaggcagacattatgcctcgtcttgtaagtcaggtcagccattcggtacgctggcagcagtcggtggaaaagatggtagaaaacggtgttgatacctttatcgagattggaccgggaagaacattggcaggatttaataaaaaaattgccaaggccattggcaaggaactgactacatataatgtggcaacaatggaagatattgacaaggttgtagaagcgctcaaatagtgctttatgaaagagaggcagtatgttattacaggacaaaatagcagtcgttaccggtgctagcagaggaatcggaagagcaactgcaaaagcgcttgcccgcgaaggtgcaatggtaattgttaattataatggttccaaagagcgtgccgacgaggtcgtttctgagattgaaaaagatggcggtaaagcgaaggccattcagtgcaatgtcagcgattttgagcaggcgaaagaatttttcggcggtgtggtaaaagaatatggaagaattgatattttggtaaataatgccggaattacaagagacaatctgattatgaagatgtctgaggaagaatttcaggatgttattcagacaaatcttgccggagtctttaatggaattaaatttgtgacgcgtccgatgatgaaacagcgtcaggggcatattatcaatatggcatcggtttctggaattatcggaaatatgggacaggcaaattattccgcttccaaagccggtgtaattggtcttaccaaagcgacggcaaaagaattgtcatcccgtggtatcacagtaaatgcagtagcacctggatttattgcaacagagatgacggacaagctttcggatgcggtaaaagaagaagcatgtaaaacgattccacttggtgcctttggtacggtagaagatgtagcggaagcagttgtatttttagcatctgaccgtgcgaaatacattaccggacaggtattgtgtgtcgatggcggtattgcgatgtaacagaatgaatggaggaaagaatgagtagacgagttgtagttaccggtatgggtgcagtaaccccaatcggaaataatgtaaaagatttttgggaaaatgtaaaaaaaggaaccgttggaatcggaccaattacgaagtttgacacaaccgattacaaagcacatttggctgcagaggttaaagattttgatccgacgattgcgatggataaaaaatccgcacgacgtatggaagattttgcacagtatgcggttgtagctgcaaaagaggcacttgaagacagtggactggatatggaaaaggaagatccatttatggtaggatgcagcgtcggctgtggaattggaagtcttcagtgtatgcagaaaaattatgagaaaattttgacaaaaggaccaaaccgtgtagctccgcttatgattccgatgctcatttccaatatggcagccggaaatatttcaattcagtttggattaaaaggtaaaaatatcaacgtggtaacagcttgtgcaacaggtactcactgtatcggtgagggattccgctccatccagtatggtgaggcagatgttatggttgccggtggatcagaaggtgcgattaccgagcttggtgttgccggatttaccggattgaatgcattgaatacaacagatgacccgaaaagagcttcgattccgtttgatgtagaccgtggtggatttgttatgggtgaaggtgctggtattttagttcttgaagaattagagcatgccaaagcacgtggtgctcatatttacgcagaagttgttggttatggtgcaacgagtgatgcacaccatctgacagcgccgattgacgacggaagcggcgatgcaaaagcaattgagtttgcaatcaaagatgcgggcatcaaaccggaagatattgattatatcaatgcacacggaaccagcacacacatgaatgatgcattcgagaccaaggcaattaaacttgcgatgggagatgcggcttaccagtgtaaagttaattcaacaaaatccatggtaggacatctgcttggtgctgccggtggtgttgaggcaattacttgtgtaaaatctattatggaaaactatgtacatgccaatattggtcttgtaaatcaggatccggaatgtgatttggattgtccgaaagaggcagttgaaacaaaagttgatgtagcactgagtaactctcttggatttggtggacataatgctgtattgattttcaaggcatttgcagaataaaaaacggaagggaagaacgaaatgttattagatatcaacgatattcaaaagattatcccacaccgttatccgttcctcttagttgactgcgtcgaagagatggagccgggagtaagagcggtaggatataaaaatgtaacgatgaacgagccattttttcagggccattttccacagcagccggtaatgccgggtgtgttaatcattgaggcattggctcaggttggcgcgattgcagtattaagccttccggaaaacaaagggaaacttgccttctttggcggaatcaaaaatgccaaattcagaaagcaggtaattccgggcgaccgtctgcgcttagagacagaaattattaaatgcaaagggccaatgggcattggcaaagcagttgcaacagtagatggtaaattagcagcagaagcagaaatcagctttatgtgtacagatgcgaagtaaaaggcgtcggaataatatagtttaaaaatagaaaaaagaaattcatttgtcttgagacaattgaacttctttttttctattttaactgtattgttcgactgtgcttctgtaagagagaggggagtaattggctggatatgggaacgggaactggtgtaatacctcgtggaatggcacagtatggtgctaatattatagctacggatatttctcataatcagatcaatgaagcaattgaattatcaaaaggaatggaaaatataaaatataaggtaattgctgcagaagatatagattatgaggagaatacttttgatgcaattactgcatgtcaatgtttttggtattttgattctaaaatagttgttcctaaaataaaaaggattttaagacctggtgggatttttttgaaagtttatatgagttatatgaaggaagaggatattactcaagattcaaatgaaatagtgaaacaaattaataactcatgggaaggtgcatcaccttcaattcaagatttgaaaacccattattttgaaaatccacaaatggatactattattgttgatataccagttacccgggaatcatggcatggtagaatgctggcaagtcgtggagtaatggcagcaatgaatgaaaagcagattagcgagtttggtaaaaggcacatggatatgttatgtaaaaaatatccaaaacaatttacagtaaaacataaagtgtttttgacgtggtataccatgaaataaaaatttttgaaaaaagaggcagaaaactattttttggaattccggtaatacagaagaaaacctttgtgactcgtggggtttgagtacgtcggtagaaggcactggtagtttcagtgcctctaccgttacgcactcaattagcgagagcgcaccatgagacacaaaggttttcttctgtattacggaaattggaaaaagtagcttatcaaaaagaaatcaaaaaaaatcttacgataacagcaaaaaagtggtatactaatagtgtagacaaaaaatataagcgcctcttatagtcgcggcgcagtcggcagaaaggatggatagacttgtttgaaataggagactatgtagtgcatgggaatagtggagtctgccgggtagaatcgattcaaaatatggatggcataggtggtgccccacagcgcacgtattatacgctggttccgatttatacttcgggcagtaaactatttgtaccaacggatggaaagagagtagtaacgcgtccggttatgacgaaaaaagaagcagagacattattaaaagagtgggatgaaattgagacactctgggtagagaacgataagaagcgggaagaagtgtacaaagaggcactccgttcctgtgacagcagacagtgggttaaactgattaagacgtcttatcagagaaatcaggccagattacaaaaaggaaaaaaagcaacaacaagtgatgagcgttatctgcatatggcagaggataatttgtttggtgaattagcaattccttttgaaatgacaaagggagaagcagaggagtattttgtggcgcagattcgtggtgagtaaatgaatttattatgaaaaaagccggcctgttttacgtagaccggcttttttttaaattattttgattcgatttcttttatcatcttagcaatcaaatcttttacggttggtacgacagcatcgagtgctactttatcctgtacagacttatcacggctggaaagctctacaactgcatctttcatatttcttggactgactacaagacggattggaacaccaagtaaatcagcgtcagagaacataacacccggacggacgtttcggtcgtcataaataacttcaatatgttctttttgcagacttgcatataattcatcagcaaaagcttttgcttcggcatcgtctgcacgcagacaacacaggtgaacctgccatggggcaatggtaatcggccataccggaccgtagtcatcgtgatgtgcttcacagacagaagcagcaagacgtccaacgccaataccataacagcccataattggataatgggattcgccatccgcatccaaatactgcatgttcatggattttgtatatttcgttccgagctggaagatgtttcctacttcaataccacgggaaatgtggatggtctttttgccacagtgtgggcagatgccgccatctacaattttagctaaatccacatattcggcatcgacaacatcacgctccatgcagagtcccgtgtaatgatattcttcttcgttggcaccacaggataaattatttgttccctgaagtgatttatcataaagtacggtgtaattgccatttacggtaagatttaccggaccgatatagccggcattcagaccacagtcacttgtaataatggccggatgaacttcttcgccgagatagttcgtcagtttggtttcatttacatctaaatcaccgcggatgaaaataacaacaaaatcgtctgtcatatttttctggtaaacaacagctttacacgatttctccaatggagaatgaagaaaatcacaaatttcttcaatagtgtgaatgttaggtgtgtgaacttttctcagtggttcatcgactgcatctttcgtattttcaataactgattcagcagcttccatatttgcacggtaatcacaatcggaacagatggcaatcgaatcctctccaattggtgttaagagcatatattcatgggaaagacttccacccatcataccggagtcggaggcaacggtaactacttccgggataccggcacgtgcaaaaatgcggttataagcattataacaaatttgataataacgctctaagtcttcctgtgaagtgtggaaagaataagcatctttcatagtaaattcgcggacacggattaaaccggcacgtggacgtgcttcatcacggaatttagtctgaatctgataaatcataaaaggataactgttataactttttgcataatcgcggacaagctgaacggcagcttcctcgtgagtcattcctaagaccatttttgagccgttgcggtcggtaaaacgtaaaagctcactgccgacactttcgtaacgtccggactcatcccacaaagatgccggaagagcaaccgggaacaaaacttcctgtccgtcaatggcatccatttcctcacggataatcgcctctattttctggcaaatgtgctttaatggggtaaattgtgagtaaattcccttggctacatctttcatatagccgccgcgcatcatcagtgcatgactttcaacgacgcaatcgcttggtttttctttgaagcgttcgcctactaatttgtctagtttcataattgtcatttcctccaaaaataaattcgtacatcaaatgtaagtgctcaaaatcgattttgaacaattacatttatgttagcatttagccgggcaaatgtcaacttgcacaaaccaaaagagagtggtacaatgtgcgtaatttggagcgaatgcagaaaggatgaaagaatatgacatatcagacagcagtttttgatttggatggaacgttattaaatacattagaagatttagcggacgccgtgaattattcacttaaaaaaaataaaatgccactttgtacaattacgcaggtgtgtcagtatgtgggaaatggaattgtaaagttaatggagcgtgcggttccatccggtaagaataatccggtgtttgagcaggcactttctgattttaaagaatattatgcagaacactgccatgacaaaacagcactgtatccgggggttcttgcgcttcttcaaaatttaaagaaaaagggtgtgaaaatggcggttgtatcaaataaggcggattttgcggttaaagaattgatgccggtttattttccgaatctgctggatgtggcactcggagaaatggaagaaatggggatccgaaaaaagccggcaccggatatggtttataaggcattggcagagttacggtgtgataagaaaaatgctgtttatattggtgattcggatgttgacttggcgacagcaaaagccagtgaaatggactgcattggtgtgagctggggatttcggggaagaacttttttagaagagcatggtgccgattacattgtcgataaaccggaagaaattgaaaaatttttcaaataaaaacaaacgaataaaaacaataaaatgggtcacaatagcattgtaagaaacgatttatttgtagaaagtgaggatatttcaatgaaaaaaatagtagtttttgcaatgcttgttgtttgtttgtccgctatggtaactgggtgcggcaataaaaataacagcgcaacggacccatctgcttctccggaagcaacaaatgaagcgacacagacgccaacgaatgaaaataataacacagcaacgccaaatgcgacggatgacaacaaaaacgatgataacgatttatcggatgatgtaaaagacggcgtggatgatgctgctgacggtgtaaacgacgtaattgacggtgtggatgacgccgttgatgatgtgacgggaaacgataaaaattaataatgggatgaaaaagaagcagcaacgggattgaccgaaactgcttcttttttgtatatatatatttttatgcgaaatagttaaggtaaatgaaaaaaatgtaaaatatgtagtttttttgtcaaaatttttattgcttggaatatattggtatggtggaatataaattgttatagggagttttatgggataaataattgaggaaggaggatatttttatggaacagaaaaacggagcagcaacagcttctaccattcttggtattgtgagcttagtaatcgctgtcatcggaggaattacctttggtgtaattggtgccgcaattgctttgattttaggtatcgtagcagttgttctcggtattaatgcaaaaaaacagacaggaggcacaaaaggtcaggctggttttgtctgtggtttgattggtattatctttgctgttatttttgcagtaggatgttcaatctgtggtgctgttgagtccagcagtaccaaaacaagttatacttgttatggatgcgttggtggttcctgtttagtaagcagtgatgttaatgatgcagcagatagtttaaatgacttgagcaatgcattgaacgacttgtcagatgcttacaactaagagaacaatataaccaaaataaagaaggttgctgcttaggcagcagcctttttttctaaggaggagaaaatgtttccatcaattcatttaggatttgcagatattccaacttatagcacaatttttttggcaggtttttttatagccattgttatagcaagaaaaatagcaggccgctatcgtctggccaaggaggatgttttatatggtgccatctatgcggcgattggtattcttatcggctctaaactgttgtattgcttgacaaggcttccgagcctgatacagaaatgggatgcagttgcggctggttttgataaaaatttcatgcagacactgttatttttaatgaattatttgtttggtgggcttgttttttatggtggcctgattggtgcctttttggggatcttttgttactgtaagcagtatcatttatcctatgttccgtatatggatgtgtttgcaccattgattccatttgttcacggtatcggaagaattggatgcttttgttccgggtgctgttatggcattgaatactatggcccttttgccatacagtttccgtataatgaggctgttccgcaattaagtcaggtgccgcgtttccccgtgcagcttttagaggcgcttatgaattttcttttgtgtggtattttattttgccttatgaagaaaaagaatttgagaaatggacggttgatgggaatttatttgatttattattccattgccagatttttgttagagatgcttcgcggggataaaatcagaggaagtatcagtgttttttccacctcgcagttaattagtttgattttgctgccggttggaattgttttggtgcgtggaaaatgggtggaaaagcattgcaaggaagaaaaaagtggtgtataattttccatagaaaaaattccggcgggacaggatgaccggtgagaaagatatggaaggaagaaaattatgttagatatcaaatttgtaagagaaaatcctgatgttgtaaaacaaaacattaaaaataaatttcaggagcacaaactgccactcgtggatgaagtgattgcgcttgataaagagcgtcgcgagacacagcagaaagcagatgaccttcgtgctcttcgtaagaaaaattcaaagatgattggtgcgctgatgggtcagggcaaaaaagaagaagccgaggcaatgaaggaagaggttgccggttatgccaaagaactttctgatttagaagcacgagaggtagaaattgcagaggaattgaataagcgcatgatggtaattccaaacatcattgacccgagtgttccaattggtaaaaatgatactgaaaatgtagaaattgagaagtttggtgatccggtggttccggattttgaaatcccatatcatgcacagattatggaatcatttgatggactggatttggattcggcacgtgacgttgcaggaaatggattctattatctgatgggcgatattgcaagacttcattctgcagttatttcctatgcaagagactttatgattgaccgcggatttacctattgtgtgccgccgtttatgattcgttcaaatgttgtaacaggtgttatgtcgtttgatgaaatggatgcgatgatgtacaaaatcgagggtgaagatttgtatctgattggtacgagtgaacattctatgattggtaagtttatcgataaaattattccggaggagcagttgccaaaaactttgaccagttattctccatgtttccgtaaggagaagggtgctcatggaattgaggaacgtggtgtttaccggatccatcagtttgaaaagcaggagatgattgttgtctgcaaaccggaagacagtaaaatgtggtttgataaattgtggcagaacaccgttgatttattccgtacattggatattccggtacgtacgttagagtgttgttccggtgacttggccgatttgaaagtgaaatcgattgatgtagaggcatggtctccacgccagaagaaatattttgaagtgggaagctgctcgaatttaggagatgcgcaggctcgccgtttgaagattcgtgttgtcggtgaaggtggtaagtattttgcccacaccttaaataatacggttgttgcaccaccacgtatgttgattgcgttcttagaaaacaacttatgtgaggatggttcagttaagattccgaaagcattacagccatatatgggcggtaaagaaaaaattgaagtgaaataaaaatgacacagtgtggttttatagtgagactgcacgatgacagaagattctgctatcgtgtagtctttgttctgtgatttgaggaaagataaatataaaaatttacaaagaaaggtgagaggaaatgcgaagcagcaaaagatattttgcactgttatttcttctgtttgccctagcatttgccggagtgaatcagacgaattatgtgcaggcaaaggagacgacacaaaagatttgtctctacttaggacaaaagattactcttgcggatttgccggaaggggaagtggttttaagtaaagagcatgtggttgaggtgtcggcaaacaaagttgttacgacgattggtgcaggtacggttacgatttccgtgaaaacgaaggcggagacagttgactatgcagaaattgaagtaaagaaaaatgagattctttcggatttgagttttaacagacagtcgtttacggcacatcctttgggtggtggctcttttcagctgccgataccgcagtttgaatcgatgacgtgtgtgtggcaggcaagaacgccggaaacagccacagttacacaggagggaattattacgccggttcgcgcaggctttgcagaattttctgttacggttacggattcatatggcggtgtgtactcttttgtgcttggtgttgaaattttgcagccccaatttacaatccaaaagcagaatttagcgaagggctgtcagacaacacttttgttagaatctgttgcaggaaatccggttgtttatcagacaagggatacttccattgtttcgattgtttcctataatcaggcaggcgttgtagttaaggcgaaaaaagttggttctactactgtagtggcacaggtagatggcgttcagacagaatgtgtgattacggttacaaacccgcaaataaaaaaggcatatggtttttatcagaaaaagaaaaaactggcggtcaaggtgactgggttaaatgcagaaagccgtccggtctttcgttcgtccgatgtaaaggttgctgttgtgacagcttcaggaaaggtgacaacgaaaaagtatggaagtgctgtgatttcctgcgaggtcgatggaaagacagtaaagtattatctggcagtaagtacgaaaacggctgtccgggcgatgcggtatggttataaaaagataggaaagaaaaagtacagtcaggcaaggcggatggataaaaactattatgactgctcctcttttgtttaccgaacctatcgtgcggtaggaagatatcttgtctgcaaaacaagctgggcgccggtggcggcggacatcggccactattatgtgagaaaaggaaagtccattaaggcaaagaaaacctattctgaaaagaaaatgagaccgggagatttgatttgctttggcggctcgaaggcaagaagaaacggacggtataagcgaatataccacattgcagtttacattggaaatggtaagacaatggagagtagttcaacctataataatgttgtaataagagacagaggcgtttttaaaaagagcgaaatcccggtcgttgtacgcccataatttgtaaaaaaagtaattgacgagtaaaatatcacgtgatacaataaagttcctttcggaaggaacagcaaaaagcagtgtttctcatgcgcaggggaaacactgcttttgctttatcagacagcgtggtgtttgtctggtgaatctaatttcattttatctgtttatctggtaaatgagaatcgcagctatttacatgatataaaaagacaagagggaggactgtctatgaatttaaaaatgaaaaaagtaattgcatgggtgcttgtgtgcctgtgtgtatatggttcgatgccaaaggaaatggtgaaagcagcttcaagcagtacgatttattttgtgccgaaggggcagcaggggcggtatacaagcaatctcgatgaagcgttacagagttgttcatcacgaggtggagaaattgttttggaaaaagatgtacattatgatttcccggattttatttattatgatacgataaataaggatactactcttgtagtgtcaaatgg

SEQ ID NO: 911 - DNA, 67764 bp, unidentified
  source 1..67764: mol_type = unassigned DNA
ggagaatgttctgaagtaggaatgtaccttgcaatggcaagagtagctcacagagaaggatatccagagatcggattatactgggagaaagcagcatacgaagaagcagaacatgcagcaaaatttgctgagttattaggtgaagttgtaacagacagcacaaagaagaacttagagatgcgtgtagatgcagaacatggagcaacagaaggtaaatttgaccttgcaaaacgtgcgaaagcagcaaacttagatgcaatccatgatacagttcatgagatggcaagagacgaagcacgtcatggtaaagcatttgaaggattattaaagagatacttcggataagaagaattgatttaggaggtatgagttttcatacctcctttttttttgctatattccatgctataatgaaaataagactgaaaaagcaggtgaaagcatatgatttcagaagagaaagtaaagattatggctgagatggccaagtatgagaagaattatggaaaaggtgatttccgtatttacaaatataccaagaaagattatgtcagatcggagaagatcaagacaagcattgccttgttgatctcatttctgatcatgacaggattgttgtgtatcatgcagttagatattgtgatcatgaagctgagagaaggtaaagttatagtatctgcggctgtgatcataggaatttatgttgcggtattttttgtctacctgcattttacgaagatgcgagcatccaggcagtatgatgaggtaagggcaagggtactgatctatgacaagcatttagaagaactagaaacattatataaagaaaaagagaatgaagacattagtccaacgatagtcgaggaggaagacgaagatggaaaaattattgatatatagagaacgatttttgaaattcctcacggcgagaggaagatatattcaatcagggatgagattccttggaggaactgttttattttatgtattagggaaattgtttggatatacagagaccttttcacagccattttttatctttatgatgggagtgatcagtgtttttattccaatatcagcattatcgctgatcttttatgtcgttatattcttagagttacttcatgtatcgttagaagtgacattattttttgcactggtagttgtattatattttcttgtatatcagagagtttttccagagacaaggatttatctaatgatggtgccaatcttcttttattttcaactgcctgcatgtttaccgatttttgctgggatgttttgtggaattgcaggacttccagcgatcttaatgggaacagtgatctattatctgtccaatatccttcagcagacaatgaaccagctggcatcaggatcagcacatgggaaggtctacagtctgatcgcggcaagagcgatcgataataaggatctgcttttgtattttgtggtattctgtctggtgacagcactcgtaacagcaattcgcaagcggggagcagcgcatggatggaatatttcaatccttgcaggaggagttgtatatctgatctgcatgttcataggaggatatctggttaacaatgagatcaatatcacatcacagatcggaacgatcataggaagcattgcgatcgccctgatcatacagtttttatacaatgtgatcgactataccagagaagaaacatttgaatttgaagatgaagaatattattattatgtaagagcgataccgaaagtgactgtggaagaagaagaatttaatgttacacagatcacggtaccatcacatagatttagtttaaaaagaaaagaacataaacaagaacataaagaacaggacaaagaaaagggagaggaaatttgagtaaattttttgatggacttgaaaaatatatatattggacatcgattccgaagatcggtctgaatgacattgtagatattctgatcgtcagtgttatgatctatctgatcgtcaaatggataaaaacaacgagagcctgggtattattaaaagggatcattatcttgctttgtattgcatttgcggcatatttactgcaattacatacggtttcatggattctttccaatacaatgagtgtgggaatcacagcgattttgatcgtcttccagccagaactccgaagcgcattggaacagcttggaagaaagaactgggtgactgatattttctctacagatagccgtcaggaagaactggaatatacagcaagaactctgcaagagatatcaagagcagcgattgagatgggaaaggtaaagacaggagcactgatcgtactgcaaagagaagtagcacttggggagtatgagcgtacaggaattccaattgatgcgaaggtcagcagccagcttctgatcaatatctttgaacacaatacaccactccatgatggcgcggtgatcattcacaacaacaggatcgtgtcagcaacctgctatcttccattaagcgatagtgtagagattggaaaggaaatgggtaccagacacagagcagcagtagggatcagtgaagtttcagacagtatcactgtgatcgtatccgaagaaactggtggtatttctatcgcaagggatggaaagatcatcagacatctggatccacagagattgagagatgaactggctgtcctgagagaagaaaaaggacagaataagaaattcaaactatggaaggggcggaatcgaaatgaaaaaaagaatggaaagtgatctgcttttaaaaataatttctgttgtttttgcctttctactttggatgtttgttatcaacaccgataacccggtcatcaagaagactttcagcgatgtaccggttgatatgctgaatgaacaggttttagacgatcttaatcagacttataagattgaatctggagataccgtaagctttactgtgaagggaaagaaagatgttgtagatcgtttgacaaagtcagatttccgtgcaacggcagatgtatcttctatgtcagatgttcatgcgatccagattgaagttgaggctttacgatacaagagtcagttagatatcgatacaggtggtgcaacggtcaaagtcgtattggaagatgtgaagagtgaccagataccagtcaatgttgtggtgaaagggacaccagcgagtggatatacggtaagcacgcagacagcaacgccgaatctgatctctgtatctgggccaaagagtgtggtaagcaggatcaaacagatcgtagcgaaagtagatgtatccggattgaagaaagatgtgacaatggctcagaatgtcaagtgttatgatgaagacggagatgaagtaagtcaggaccgcatcaaacttgatacgaccaagattaaagtaaagattggattatcaagaacgaagacaatatcatttaccgtggaaacaaaaggaacgccgggcaagggatatgtacttggaagcattgattatgaaccaaaacatatagaaattactggagctgaagatgatctggagaagatcagcagtatcaaactggcgaatttagatatcagtgatagtacaaagagtattgaaaaaacgatcaaagcgtccgatattaaactgccagatggtattacatttgtaaaatctgtagataagatcaagaatatcgtgatccgtgcgaacatcgagaagaagacgaaacgtacattgacgattccgacagaacagatcgcattgatcaataatacgaagaattatgatgtcaaatttgatgactcagagttaaaggtgaagattagcggattgcgctctgtagtagataaagttgtagtgaaggatttaaatccaaagattgacatgcagctgtacgaaccaggaacgcatacggtacaggttcagctgacaaagatcaagaatatgtcgattgagaagaacgtcagtgcaaagattacggtagaataaaatataaggagagatatttacaatggataagatgttatcggttgttcttccagcttataacgaagaacagatgatcaagaaaacagcacaggtggtaggagacctgcttgagaaagaacagatcccatatgaattagtattcgtaaatgacggatctaaagatcatacatgggagaagatcttagaactcaaggaagaaagagcacatatcaaaggagtctgcttttccagaaattttggaaaagaaggagccgtttttgcagggatcacacaggcagaaggagactgtattgcagtaatggactgtgatcttcagcatccgccagaaacacttataaagatgtatcgtttatgggaagacggatatcaggtgatcgagggagtgaaagcatccagaggaagagaaagttttattcacaagatgtttgcaaaaacattttacagtattatcagtgatgcaacaggaatcgatatgtccagagcatccgatttcaagttgatggatcgacaagcagcagaagaatttctaaaacttccagaacgtaatgtgtttttccgtgcattgtcatcctgggtaggattcaagacaacatacgtagaatttgatgtgcaggaacgagaagcaggagaatccaaatggtcattcaaatcattagtacgatatgcagtgaataatatcacatcatttagcgccgcaccaatgcagatcgtcacattttttggcgttgtattcttcgtatttgcagtactacttggaatacaatcgctttatatgtatttttctggacatgcagttgcaggattcacaacagtaatcttgttgttactgttggttggaagcattttgatgttcagcttaggtgtgatcggatattatattgcgaagatttatgatgaagtgaagatgcgtccgagatacattatctcagaagtgatcaaatccaaagaataacaatacaaatccctgagatcggatgagatgaatatctgatctcagggattttatgtgatacagggaatcattttttttgagatttgaaaacaagaaatttactgataaaataattgacgattgtaacaataacttgtgtttctaacttggcgatcatctgtggctgatgaaggatctcaacacagaaagggactccgcccacttcgacagccatggttacaagacgaccgagaacaaacttgatgaattcatgaatcgtatctgcgaaggattcagatttagactgaaatacatatagcttatttacaacaaatgcaaaacagatcgcgatcgcaacagagaaaaagttgctgatcttataatcaattccacatggtccttttaataaagcaaacattccaagattaacgagggttgtcaatccaccaaaaaacaaataacgaattcgcgaatcattatataatttctttatcaaatttaacatatcatattacctccgatagatataaaatattctaaaatgtacatacatccaatatcttaagacatttttcaggaattttcaatccaaaatgtggtatactaagcgtgataatgaacaaaaaagggtaaagggtaaaggaaaagtataatgataaaagaacaaagaaagtattgctatggagtctatacactgatgtttttactgatgtgtatcgtggcatttctgccattttttaccgaaggaaaaagctttgtatggggagcaggagtagaagacggattaagccagcatttttcagcattagcatattatggggaagcactaagagaatttttccgtaatcttctggcgggacacccaaaacttgtgatgtgggatatgagtcttgggtatggtgcagatatcctctcaacattgaattactatgcgatcggtgatccgttaaacctcctctacggatttgtttcgccaaagaatacagaaactatgtataatttcatgatcgtgttacgaatgtatctggcagggatcacgtttatcatgtatgcaagaaaaatgaaaaaacgaagttatggaactgtgattggggcactggtctatgtatttagcggattttgctttcgactaggactgcgccatccattcttcatcaatccgatgatttattttccgctgttatgtcttgggattgagaagatctatcagagagaaagaccgtatgtatttattttcgcagtctgcgtatcagcaatgagcaattattattttttatatatgctgacgatatttgcggtaatctatgcgtggatccgtttttataaatacaccgaagaaaacaagatgaaaaacttttgcctgacaatcttgaagtttggaatgtattatacacttggaattgcaatggcagcagtgatcttactgccatccgtcataggattcctaggaaatggccgttacggcaatggagttgactggaaatcattgatcgtatatccagggaaatattatctactgtttattgaaaactttattggatacggaaatatgggcagcaatacgaacgcaggatatctgccgatcgttgggatcgttgtattatttacattgttttcacagcgaatgaaacataaaaaatacagagcggcatttatagcaagtatcattgctttgattctcccaatctttggatatgcatttaatgggttttcctatgcaaacaaccggtgggcatttgcactgagctttattgtggcattgttgacagcagaaatgtatccacgtctgtttgtgatgtcaaaacgacagcagatcgggatcggagcaggaatcattatatatactgtattttgtatcatcgtaaatgcatcaggagaagaaatcctgaagaataaagggatcatggcagcctgtggattaattgcagtattttatattctattgttgatctttcaaagacttggctatgatacacagaagaggattgtgcgagtgagcatggcaatcttgctcctgatatcagtgggagtgcatggatattacagattcgatccaaaaggatatgcttatacacaggaatttatggatcagggacaagcatatcgaacattgaaggaagataatatccgtatgctgagtaaggtaaatgatccatctgtttatcgagtacatgcagagggatatcgatataaaaattatggactgatcaaccatttgaatacgatcagcggatattacagtatcacagcaaaatgtgtgacagatacgatcaaaggatatgatacgttgggaatgcagtatgcagataaatataaaggagtcgatcaaagacttggactcctgtcattagctggcgtaaaatacataacagtagcacataacagtcaggttgcaaaagacgtaagttccatgggggatgtaccatatggagttgagaaactaagaaaaaaaggaaatattacattatataagaacaaatatgcactgccatttgcatatgcatatgattcttatatgacagagcagcaatacgagcagttaaatggaatcggcaaggaacaggcaatgcttgcacagatcatattgaatcagcatccggcagacaaagagattcaacacaacgaacaaagaaacggtcctgatatacagacgatctcattgccagagacaaggatctcatctccaaaagggaagaaatatgcggatattacggtgccagtagagaaagacaaggaaacttatctctattttaaaaatctcgtttaccatgggaagaaaaatggagacgacaaattcatattgactggaagaaagggaacaaaaggaatccttgtgacacaaaacgatgtacaacagaaaattcatattcaaagcaccttcaatccatactattttggaagaaaagattacattgtaaagatcaatcatcagacaagcaaggcaaaagaaaaagtaagattaaatttcttgtctccaggtgaatatgaatttgatgatatcagtttgatcacagttcctaaaaaagatgttcttgccagattaaaggaacgcaaggagaactcaatgaaacagatccaatacgaaggaaatcatttcagaggagtctatcatgcgaaaaaagaccagattctgtgtgtaacgattccatactccaaaggatggaaagcaacagtcaatggaaatcgcacaaagatttataaggcaaacgggatgtttatggggatcataatgaaaaaaggaacacaaagtgtcaaattagattatgaaacaccaggattaaaaataggggcatggatcagtctggtggcatggatcggactgggaatatatggattgtactttgaaaagtacagaaaaaagctgttaaatcaatgttaaaataagaagagatactggtaaaaatacaaaaaacatgataaaatggtccttagacaaatgttacaaaaatgttaaatgagtgggaggaactatgaaaaacgtaaaaaaaatgatacaggaaggattaaagagattcacagtgatcactatcttaggtgtatttcttatgacaagcttgattccagtatccgcagcaacgaaagtatcaaagatcaaatggtcagcatatagaaagacaatgtatgttggaaatgcacagagatttgcagtgaagatcacaccagcaaaagcatccaaagcgaagcttggatggaaaacaagtaataagaagattgccaaagtcagtgcaaaaggagttgtcacacctgtcaaagcaggaaaagcaacgatcacatgttacgtgaaatcacaaaaatcaaagaaagtaacatgtaaagtcacagtaaagaaacagaaagtgacagcgatcacatttgcaaaagcaagcgtagccgtacagaaagggaaaaaggtcagcaatctagcgatcgtaacaccaacttacgcagcaaataaaaaggtaacatacaaatcttctagcacaagcgtggcaacagtcagcacaagtggagttgtaacaggaaagaaagtcggaacagcaacgattacagcaacagcagccgatggatcaaagaagaaaaacagttacaaagtaactgttgtagcaccgatcacaaaaaacagtgccaagtttatcgcgcaccgcggattaagtgccgaagcaccagagaatacgatcaaagcctatgaattagcaggtggagcaggattctggggagcagaaacagatgtccgaatgacaaaagacaagaaattcattctgcagcatgacctgacattcaagagattatgcggagttgataagaaaccagaagatatgacattatcagagatccagaaactgacgatcaaatctggaaataacatttcaaaatataagaatgtaaaatcagcaacaaccgttgcaactttagaagattatttaacaacatgcaagaagtacaatatggtaccagttatcgagatcaagatggaattcgtagaatacggaaataaaacaactaatgactctcgaatgcaggcagtgacaaagaacaacatggaagatttgtatgcattaacaaatcagatcatggggaataaagaatacatgtttattgcctatgactttgaaacaatggtacagatgagaaaagtcttagacgataacgcaacaacatccacaaatgtaaaattacagcatgtaacaaataatccagatcagggaatgatcaattattacaagaaacgtaagattgaattggatgcaaattgtgataagatttcactctcagacatcaaggcattcaaagatggtggagtgaatgtaggactttggactgtggacgatacagaaagagtcgcagattatattgcacagaaagtggattatattacaacgaatacaaagttctggtaagaatagaaaacacaagaaaagagacagcagatgaagatgtttgttgtctcttttttggtgttataaatttgtggcgaaaacccacacgcttgcgtgtgggatgaaagctacattttacttgacatatacatagatcaaatatataatctatatattaaaatatagaaagaaaacagaccatgagtaagaacaactatgatataaacacgcatacaacacaaaataatgctgcacaatagcattcaagtcgtggaggaaaaaataatggcacgaactaaaagtgacaatgtacaaataaatatttccattcctactggatggaaaacagaacttgaaaatcttgctcgtatctattctgttgaagaaggaaaaaccatcacttttcttgacttaatgcgtagaggtattcaggaaaaatatcaattaggagaaaaagacagtgagtgaggaacaatatcatagcgcttcacattgtaaatatttgatacagtatcatatcatttggtgtccaaagttcagattttcagcattacaaggaaatgtcgatatcattcttaaacagatattacagaaaatttgtaatgattataaatacaagatcaaagcactcgaagtgatgccagatcatatacatattttcatagatgttccgcagacagttgctccttgtgatgttgtaagaaccctaaaaagtatcagtgctatcgaattatttaaagtatttccaaaattaaaacagttctatgcgaaatgtggagtattatggtcaagaggatactttgtatctactgtcggacatataagcgaagctacagtaattaagtatattgaggagcagaaaaatgataagtgataaagaatataaaaaacttttaaaacaatttcataaactttctgacaggcatatcttggttgtagaaaccgatatgccatcttctgatgtacaaaaggttgtaattctttctgataagatcagaaaagcaggtaatgagcttgttggtcttatgagaaagaattatgaccaacttatgcgtactaaaaaatatcgcaagttgctaaaactctatggttctaccaaagataaaaagaaacacagagatctagcaaatcagctcaatgaaatacaaaaacaatacaatgtcacatgggatcattgtagaaacgctatgatacatataggtaagaaatatagtattgatgccgtatttgcccttacaaaagctgaagatatatggcgtggtattgaaaaatgtctttataacaatggtaaaactattcatttttctaaatatggtgagttgccttgtatcagggcaaaacagataaatcgtggcatttcaatgtctgttaaagataatgaattaaaattcaaattaaagggaaatgtatttgggatacaggttaaagatagatttcaaacagatgaagtttgtgcggttttagaatatttatcaagatcagagatcataaatgataaagcaataaataaatttttagataaagcatactgtattgatacatacagaccttgctatgctactcttgtacctaaatttattcgtggaaaatatagggtgtatttgcatcttactattgaaggtaaggcgaaacctaaatatgataggtttggtaatccaagacataagtttggcaaaggtattataggtgcagatattggtacacagactgttgcgtatacatcaaatactgaggtgggcttgaaaaatctttcagagcgtggtaacagtattcagacttctgaaagaagagaacgcctgctttaccgtgcgatggacaggtcaagacgtgcaattgatccgcaaaactataatgatgatggtactgttaaaaaaggccgcaaaacttggaaatattctaatcattataaaaagctaaaagctaaacactctgaactatgtcgtatcaatgctataaacagacagcttgcaataaatgaagacgctaaccatttaagaagtcttggagatgtatttatcacggaacctaaaaatgcaagtaaacttatgaaacgaactaaagatactacggtcaatagtaaaggtaagtttcataagaaaaagcgttttggaaaatccataaagaacagatgtccttctgggtttcaaactactgtagagcggaaatttaaggtatcaggtggtatatatattgaagtacctaataattacagagcaagtcaatatgaccatacagcagatgattatatcaagaaaaagctgtctgatagaatatataaacttactgacggaacattggtacaaagagattggtattcatcattcttattatactgttacgattacagaactaaagatatagataaaaacaaatgtatttctgaatttgataagtgttacaacaaagaaaaagctctgatcgaatggatcaaggctaacaagatcaaaatattaaatagcggaattaagatagcgtaaaacatatttagggagattgactatacttccttacgaaagtagaaatttaccgtcaatgtggtcgttggactgcttggtaatgaaagttctgattcaaatagacttacacttgtaactccaaagtctgaaaatgatgtacgattacaagctacacttgataatcagaaccccacgggcttgcccgtgggagtagtcagggtttgtggtataataaaaggaaaactgtgcctgtaaatatcatctgtaacagagacagacattataataactttgggatgatccgtaatgtaaatacactgcagatagaaaaagcagcaccaatctttgactcaggaacatcagcatttgcaggaattagcgaaaacaagatcaaaacattgccactcaacgaatcaaaaccattctgcaaatatcatgaagaacagatcgctttgatccagaatatagagcgatatgagtttcaaaatctgataggacttgatgaagaatttaatgaattattacaacgattaccatttatcacagtatcaagaagagataaattagtcacatggctaggagaacggatcagaatgctctgcgaaagcaaaatggacaacagaaagagtcttctagatcgtgaagacagcaaaagaataccagagaagaaagtaagatgaaaagaaaagttacagaaatgtagtaattatgttatatatatgttaaaataaaggatatatgacaaggagtcaggcagaaaatacagagaaaaagaatcaaaaggagagaagggttatgagccagaaggaaagagtcgatttgatcgaggtagatttattggatatgtgtaaatatattctgtcaaagtgggtgtttattttgataggaatggtagtattcgctggagctggatttggatatgcaaaggtgaagagcgtgacagagtatagttctaagatgcaggtatatgttactgtgcctaaaacatctgataaggtgttgatcagggacaatgctggggatttggcgtatgattatcagaaattaattaaaactgatctgattgtgaatgaaattgcgaagaaaacgaaaattgcaaaagatgatgtgaaagatgcaatttcagcagaagttgtggatggaacaagattgcttgagattaaggtaaaatcagatgataaagatgatgtgaagaagatttcaaaagaagttttgccagtatttcagaaagtagtacagaaagatttaggaagaaataaacttgtgatcgcagatcagccatctaagatagaggcagaacagacagttagcacaaagaaatttttagcggtaggtgcagttggtggatttgtaattgtagcaggagtattttttgtgctctatcttgtagatttaacaaagaaagcaaaaagaaattaggattaataaaacaaaggaacaaagagtatgggagtaaaacgttcacagatacaaaatctgatcatatatataggtgatgtgtttggaattacaattggatattttttaatgtcacatattaggttttatccggatatctatggggtatgggcgcaagacaatcgagtgatttatcgttggttagttgctatttttgtattaacgatcgtgtatttggtaattgatccaaatcagaatttttttaaaagaaaattttggaaagaattttgggcaaatttcaaaacaaacttgatcacagctgcattgatggcgacggttgcatatttgattgatgatgcaagagattattcgagatttatctatcttacaacgatgatatttagtttttggtggatgcagatatcacatatgatttatcggtggtatattttaaagtatcgagaatataattcaatcacaagaaagatgttgattgtaacaacgtcagatcgaatggatgaagtggtaagaagtatcattaaggaaaagacatggaatctatgggtaacagggattatcattacagacaaagatttgacaggacagcaagttatggatattccaattgttgcaaataggaatacaatgcttcaatatgcaatcagagaggtagtagacgaagtgtttattctgattccagaagagccagatgaacagattcagaaattagtgcaacaatttgaggagatgggaattacagttgatttaaatatcaatttatatgaattagatgtagaaagtggaagtaagtatcttaatcgaatcggtaaatatccaacaatcacatttgcacaaagagagattccattacacatgattgtactgaaacgtttgatggatattctgggaggaatcgttggattactgattacagcagttgtaacgattgtcttaggaccaatgattaaattagaatcgccagggccactattcttttcacagaagagagttgggcgaaatgggcgcatttttaagatttataaattccggtctatgtacgcagatgcagaagaaagaaaaaaagaattgatggaacaaaatgagatggatggtctgatgtttaagatgacagatgatccaagaattacaaagattgggaagtttattcgtaagacaagcttggatgaattgccgcagttttggaatgtactaaaaggcgatatgagtcttgttgggacaagaccaccaacagtggacgaatttgagcagtatgaaggatatcacaaacgcagattaagtatgactcctggattaactggagtatggcaggtaagtggacgtagtgatattacggattttgaagaaattgtttctatggatgtagaatatattaagaactggtcgttgaagagagatattgagattatattgaagacggttcaggttgtgttacatagtgatggagcaagataagattataatataagatgaggttaggtagaagatgagttctgaaaaaaaacaggtatttataataggatctaagggaattcctgctcagtatggtggatttgaaacatttgttgagaaattaactgagtatcagaaagataatgcaatacaatattatgtagcatgtatgaatgcagaaaaaaaacgatttgtacacaatggagcgaaatgctttaatgttgcagtgcctaatattggagcagcaaaggctgtttattatgatattgcagcattaaaatggtgtattggatatattaaaaaacaccatattaagaatgcgattatttatgtattggcgtgtagaataggtccgttcatagggcattataaaaagcaaatggacaaattaggaattgaactatacattaatccggatggtcatgaatggttaagagcaaaatggaatggactaataaaaaaatattggaaaatttcagaaaaacttatggttaaatatgcagatttattagtatgtgattcagtaaatattgaaaaatatattcagaaagaatataaacaatatcatcctaatacaacttttattgcatatggtgcagacgtaacgaaatcaaaattaaaggatgaagatgaaaagcttattaattggtatcagaagtttaatgtaaggccaaaagaattttatttagtagttggacgttttgttcctgaaaacaattatgaaacgatgatacgcgaatttatgaactcagatacaaaaaaagactttgtattgatcacaaatgtagaagaaaataaattttacgaagaattacgtgaaaaaacaggttttgaaaaagataagagaattaaatttgttggtactgtttatgatcaggaattgttaaagaaaatcagagaggatgcatatggatatcttcatggacatgaagtgggtggaactaatcctagtttattagaggcattaggaagtacacaactaaatttactgttagatgttggatttaatagggaagttgcagaagatggagctatgtattggaaaaaagataagaattcattatcaaccactctatcaaatgcagatcacatgacacaagagcaacttaaagaatttgaagaaaaagctaaaaagtgcattatagaaagatatacatgggaaaacatcagagataaatatgaaaaaatatttttgtaaataggtgatgaaataaaagaaggagtttttagcaatggtgattatgcattatttcttaggatttcctccgtatagaagtggaggattaactagatattgtgtggatttgatggatatacaaaggaaaaaaggagatagtgtaatagcactgtggccaggagaaatttcatttatatcaaaaaaaactcaaataaagaagcgaaaaaatataaagggtattattaattatgaattgagcaatccattgccagtgcccttagatgaagggattgaagatatcaaggcatataccagatgctgtgattttagtgtatatgaaacttttctgaaaaagataaagccagatgttgtacatattcatacattaatgggaatacacaaagaattttttgatgtgacaaaaaaattaaaaattaaaacgatgtttacatcgcatgattattttggaatttgtcctaaagttactttgtataaacaaggaaatgtatgtacagaagatcacgggtgtatggattgtatacaatgtaatagtacagcactgtctttgaaaaagattcaaattatgcaatctggattatatagaaatttaaaagactcatttctactaaaaaaaataagaaaaaatcatagaaaaaatttttttgatgaggaaatagtgaatataaattccgcaagtacagaagatgaacagaagaaggcaaacgagtataaaaaattaagaaattattacatcaaaatgtttcaaaaaatagatcttattcactttaattcttcgattacaaaatcaatatacgaagactactttgaattgcctgaaaacaaagtggtaacaatatctcataaaaatattagaaccagacataaaagcgtggagaacaaaaaaagtaataaattaagaattacctgtttagcaccggcccgtccatttaaaggttataatgtattgataaaagctttggatgaattgtgggattcagggaaatgcaattttatgctgaagatgtttaatacggtgccagatgaacgaaaatatctaaaagtagtagaaaatggatttacacaatctgatttaccagaaataatgtctaatacagatgtattggtagcaacgagcatatggtatgaaacatttggttttacagtactagaggcattaagctttggaattccggttattgtaagcgaccatgttggagcaaaagatatagttgggaatgctggaatcattgtgaaagcaggagacataagtgaattgaaaaatgtgatagaagcattgataaatgatccagataacctttctaaattgaaagataatgccaaaaaaaaagaagtaaagacatggaagcagtttgtggatgaaaattatgaattatatcataaattgataggataaatattatgaaattaattgataaattactggttattgcaggaaaaaaagattttaaaatagatgataaaataagtacaggctatatattaagaatgtgttggaagtatggctggatgatgattcgaggaaaaatattttcttttggacgtcataatataagtaacagtgtttttgttggaaagcgtgtaaaaacattagaaaaaagatatttgcatatgggaaatcaatgtaaactacatgataatgtttatgttgatgctctttcacgagatggagtaagattaggtgatagagtgatattaggacgtggaacaagaattgaatgtactggaagtttaaagtatgttggaaaaggagtcatgataggaaatgatactacatttggaaatgactgctttttcggtgcggctggaggaattaagataggaaatgatgtagtagctggacagtttatcagatttcattccgaaaatcataattatgaagatatggatactttaataaaagatcagggtgtaaaccataagggaataatagtaggagacaattgttggattggatccggtgttgtttttttagatggtgctagtattgcaaatggatgtgtagtagctgcaaatgcagtgattacgaaacagtttccagaaaacagtattgttggaggagttccagcaaagataattgggtatagagataaaaagtaggagctagagatttatggttagtattattgttccagtatacaatacagaaaaatatttgaaagactgtttggagtcattagttaagcaaacatatgataagatagaaattattttagtagatgacggatctactgattcatcaggtaaaatctgtgataagtgggctaaaatagatgacaggattcatgtttatcataaaaaaaatgaaggggtatcaagagcaagaaattatggaattcagcgagcaaaaggagaaaaattagtatttattgattcggacgatatgttaactcttaatgctatagagtgtatggtagaggtattattaaaacaaaatgtagagcttgtagcatgtcaatatcagagtgataaatataataaaaaagttgaaaaagaaactctcaaaattgaaaaagtttccagacagtcatatttggaagaattgatgatacctaataaaaatatagcagcatttgtatataataggttgtatttaaaaagaataatactggaaaatgatattagatttaatgaaaatgtaaaggtttgtgaagataccttgtttaattatgaatatgcaaatgcaatcaatagcatagcatttataaataatccattatattattatcggattaattcggatagtacgatgtttcaaaagaagatgaatccagggaaattaacagcgaatatagtatttgataagatgttaaaggaaacagtgaatgacgatgaaaaaaagataatatcaatagggtgtattgcatataatgtaattttgttgatgcaaatgtacaagtacaaatggaaagatagagatgattatgtgatcatcaaaaatcatttgaaactgtatccaatagagtttatgaaatccaggattagattaaaatataagataggatatcttattttgagaattatgccaaaaccaagagggtaagatatgggaaaaaagattacagttatcgtgccagtatataatacaaaaaaatttttgacacgatgtgttaacagtattttaaagcaaagttatgaaaatttagaagtgataattatagatgatggatctacagatgggtcagcacaggtgtgtgatgaattatcaaagtcagataaaagggtgagagtaattcatcaaaaaaataaaggaattgcaactacaagaaatattggaatagaaaatgcaacgggatattatatttcgtttgtcgattcagatgattatctggaaaaagatttatataaaaatcttatagagaataatgaatcagaaagcaatatattaatatttgattatgaaatttgtgatgtgaatgggaaattggttcacaatccattattagctaatgagaataatttagaaaaaagacggcaattttattcaaacgaaaaacttcttcatttaatatggaatgaaaaattgttttgttatttgtggagtatgttaattcctaaaaaattatttgaaaatgttcgttttccagatggtagattatatgaagatgaagctgttttttataaaatatttatgctaagtgatggtgcagaatatattccatacaaaggatatcattatgttcaacataacagctcaattacaaagacattgagaaataaagacatgtgggatcgagtagaaacatatcaagaggcagaagattatattgcacaattaccagatgaattgaaagtcgattttaaaaaacacaaagaaagtatcttattaatgtgttattgtacattggcaaaattagaaaaaaattcaaaaaaaatgaaaaaattgaggcaagaaatattaaaagataaagattatttaacatcggatgaaaaagtgaaaagaatactattagagttaaattttctacatataatatttaatttaaaagggaaaatggagaaaaaaagatgattacatgtattaatgaaatcgttatggatgagaataataattttacagccttaggtaaggcaagggcagatatacagacgactttggataaagcaaattataatatcttggatttaaatgtacatcgtttaaaaagtgaaaaaaatattttaaaaaaattatcaaatcattataacatgtcaaaagaatggataaaaaaatgtagtgtattatctgaaaatcagttcgcattagtacaatttcctccaatagtcaattatttctttttgaagcatacatttaaagttttaaaaagaaagaaaataaaattagtggcggtgattcatgatctggaaacaatgagatatgcattggtagatgatattccgaccagaatgaaattaatgtatcaaatgcaagaaataccagcattaaaacaatttgattttatcatagtgcataatgagaaaatgaaatcttttctaaaaacgaagggaattgatgagtctaaaatgatatcacttggaatttttgattatttaattcctagttttgacgaaaataagacaataccagttgaggatcataaaaatagtgttattattgcaggaaatctttcaagagagaaatcagaatatatataccatttaccaacagatgtaaaatttgagttatacggaatgcattatgaagatgagggattagataatatcttttatcatggagcttttccagcggatgaattacctttaaaattaaatggtaaatttggtctggtatgggatggttattcggcagatggatgtcagggaacatttggacaatatttgaaattaaataatccacataaaacatcactatatttagcatcaggtataccggtaattatatggaaggaagcggcattagcctcatttattgttgaaaataatttgggatttgcagtagataagctatcagagataaatgaaaaattatcgcagatttcagatgaacagtataaaattatggcaaataatgtaaaagggatttctgcgaagcttagaaatggagaatatataaagacagctttaaagtgcattgaaagataaagagagaagaaatgaaggtaaaattttcagaagttttgttttttataggaatgatagcaattatgcttggaaatctgtttatgataacagaatatccatttgtttatcctggaattgctacaattttaaaattaattagatatttaggttatatggttatagtagttaagatactatatgatatattttatttggaagatattataaaaacagtgttgtttattatttttatggtattgagcgtatgtgtatccaaagataaagaattattgtttattggattgatgattgtaggagcacgtggtattgaattagagaagatattaaaatgtttatgtactttgcaagtaatcgttgttgtttgtactttgttgggatgtgctgttcatattattccggatgttgtttttgatttagacaatagaattcgtcatactgtcggattttattatgtttcgtatctaccacatatatatacaatgtttgtgattgagtggttatatttaaagagatatactataaaatattatgaatatataatgatcattgtagggaatttactgatttataaaatatcagcaacgagagtagattttggtataatctttttaataatattacttcattttatggtttcaaaaggaattgttgtaaagcaattgaaatcagttattaagtttatattaaaaaatagtacattattgtgtgcaggatgtatgttaatattgacggttgtatataatgatgcattaagaattttggacaaactattatctaatcgattacatttgggacatcatgcaatcaaaaaatatggtatacatattttaggtcaaaaaataacgtggttaggatataattttgaaaatgcaggaaaattaaagggcgattatcaagtggtggattcatcatatattcatgcaattattaattatggactaattgtgtttgtgatttttattatattattaacgctagtggagcataaggcagttatagaaaaaaattattttttagcggtttcattaatggtgtgttctttggcatggatgattgatccattatggttggatttagcgtttaatccgtttatatttttaactgcggattgttttgaaaaaaattttacaggttattttagaaagagtatatgtaaatcatgaaaattaaatcagtaaaattcaattttataatgaatttcatactaacagcatcaaattttatttttccattgatcacatttccatatgtttcaagggttttgggagcgtctggaacaggaaaggtttcatttgccatttctgtggtaagctattttaccatggttgcagcattaggagttccgacctatggaattcgtgcggcagcgaaagcacgagatgatcaggaaaaacttaatagaacaacacaggaaattttaatcattcatttatttatgatgattcttgtttctattgcgtatattatggcaattttattcgttccaagatttcagtctgatagaatactatttcttgtggtaggggtatctattctgttagatcctttaggagttaattggttatatcaaggattggaacaatatggatatattgcaaaacgctcaatttttctgaaatttgtgggtgttattttgatgtttatgtttatacatagtccagatgattatgttttttacggtgtgacatcaattttggcgtctgcaggatccaatgttttgaactttataaatctaagaaaatatgtatcattaaaaccagttggagattacaacataaaacagcatttgaaaccaatattaattctatttgcacaggtagtagcagttaatatttatacaaatcttgataatgtaatgcttggatttatgaaaacagatttagatgtagggttatatgcagcagcggtaaaggtaaaaacaattttgacaagtctggtaacatcattaggtgcagttttattgccaagactttcttattacattatggaaggaagaaaagaagagtttcaggcacttataaaaaaagcgtataattttgttattgtaattgcatttccattaatgctatttacaattttttatgcaaaagactgtttgatctttctttcaggaaatgaatttattggagcaacacttgcgatgcagatcatagcacctacaattgtattgattgggttatctaacttattagggattcaagtgctgacgccattgaatagagaaaagcaattggtttattctgttgtagcaggtgcagtggcagatttgattttaaatatggtttttatacctgaaatgggagcagcgggtgcggcacttggtacattagtagcggaagcagtcgtgttgatggtacagattttatacttgaaagatctgttttttaaaattgctaagcaagttcaatatgggaaaattgtgttagcattgatattggcaagtgttatttctataagatgtagcaatattgtagatatggtatttttaaaattgctcattgcaggaatgagcttttttggaatttatggactaatcttgctattaacaaaagagaattttattaatagttatgtactagaggggatactaaagaataaagtttttcataggaaaggaaagtaagaaatgaaaaaatatgattacctgattgtaggttctggattatatggagccgtatttgcacagcaggcacaaaaaaaaggaaagaaagtcttagtaattgacaagagacctaatattgcaggaaatgtctatacagaagacatcgaaaagattcatgttcataaatacggagcacatatcttccatacaaataataaaaaagtatggaattatatcacacagtttgccgagtttaatcgatttacaaactcaccagtagcaaattacaagggagaattatattctctaccatttaatatgtatacatttaacaagatgtggggagttgtgacaccacaggaagcagcagataagattgaacagcagaaaaaagaagcagggatcatagagccaaagaatctggaagagcaggcaatcagtttagtaggaacagatatttacgagaaactgatcaagggatatacagaaaaacaatggggaagaccttgtacagaacttccatcttttattattaagcgattaccagtacgtttaacgtttgataataactattttaatgcactttatcagggaatcccaattggtggatatacaaagatggtagcaaatatgttaggggatgtggaagttcgtttaaatacagattattttgaacacaaagaagaactagatgcattagcagagaaagtcatctatacaggtccgattgatgcttactttgattataagttaggtacattggaatatcgttctgtaagatttgaaacagaattacttgatcagccaaacttccagggaaatgcagcagtgaattatacagatgccaagactccatggacaagaattattgaacataaatggttcgaatttggaaaagatgaagaaggaaatgatctggaaaagacagtgatcagccgtgaatatagttcagagtggaaattaggagatgaaccatattatccagtcaatgacgagaaaaatggaaaattatatgaaaaatacaagaaattagcaaagaaggaagaaaatgttatctttggtggaagacttggagaatacaaatattatgatatggattcagtgattgctgcggcattagagatgtgtgagaaagaattagtgtagattatgaaagcatgaaaaagcagctaataaagtatgcagaatatacttaatgggagattctacagtatcgtgaagagataacgattatataaatggatgtggaaaaagggaaaatagatttgctccgagcaatggagatagaatttcatcagatttatggatagaaatgattcagaatggaaataaagaacattcacttgttaagtcttatattgaaaagtcgagattttattgatatgatgaagttttttgaaaataaatgattagggtgtcaaaagacacgttaattaatatatgattttatttgtaccttgaaaatttaacacgaattgcgtttgagttttgccttagacttgtggactaacgatattgcagatgacttccttggttgtttttatgccgtttcgatttttggagcacaattatccaagctattgatataacccaatagcttttgaaaatccaatgctgctattttaaatccaaaatgaaatctggttcgatttttaccatgtgttggaattttatctacatgatatcttcttcgcagaagagaaggaattgcttccactccgtttctaaaacgagcgtacttactgaattcctcagttttcatgtattgtagttgtttggctcttcctacagatttctaagatacttccttgagaacccttgttttcagaaagcgtggttgacaccagtctttatacggacatgaactgcatttttctgttttgaagtatgctacggaacggtcatttccagcgttatagttacactccgattataatatcaaaggtcagtgaccttttgacaccctaattaaataaattaaaaaatctgaatataacggtattcaaaagaaagttgagaattcattttacacgagtgatgttcaagagtttcttcagtgcatgtgtgaattaatagttatttattatcttttgagaagatattctgggaataattctaattacgaacctaagttatgtggtggggataatccggaatgcaattttatcatagataatatttgcgttaatgtagaagttaaaactcctaattattcaaagaggatagtacaagagcaagcggaaagtttaaaaatttttccagcggaaagaattaaaaaacataaagaaattgttcaagagcttggtaacataataaatgaatgattacaggagatgatattttagaattattaaagtatggtgaaagaatatctttagaatgtaaagattcacgcaatgaaatttcaaaatttgtagggaaaatatattcagcatttgctaatacatgtggaggagttatactgttagggatagaagaacacatgtcagaattaaatatggaaaaaagattttcatttacagatataaagaaacctgaaaccagattaaaagagttttgggatactattaatagcaataaagttagtgcaaatattttattagatgataatgtgggatattgtgatgtgaatggtcacattgtgatttggatagaagtaccccaagcagattataagtataagcctgtgtatattaatgaaaacccattaaaaggaagttataaacgaaatcatgaaagagattatcattgtacagaggaagaagtaaaggcaatgtttatagatgcttcagattctggaatagatggtagtcttttagaagggtttacaatggaagatgttgatttaaatacattgaaagcgtaccgtattgaatatgaacatcataaccctgaacatgtatggaataatatagaagataaagaatttttgagaaatttaggagcgtatacagtagatagatcaaccaaacgagaaggattaactgcagcaggattattaatgtttggaaaagagttagcaattagggaacgttttgataatattcgcatggattacttagataaaaccaatgttacacccaatacacgttggagtgatagattaacttatgatggaagttgggaaaataatctatataagtttattaaacgaattcttccaaagttagtaagtgatttaaaacgaccgtttcaattagatggtatggttcgtgttgatgatacagcagttcataaggctgttagagaagcagcagttaatatgattatacatgcagattatcatagtacaggagttttaaaggttgaaaaaaatgatgatggttttttgttttctaatccaggaaatttaaaattaccagtccaagcgatatacgagggtggacattacgtagcacgaaatcctaagattcaaaatatgtttagaatgattggattgggagacaacattggttcaggatttccaacaattttaagagcatggggtgaggaaaattggagacagccggatttatatgatgatcaagaattgcatcaagtggaactaaggttatggatggtatccttaatgcctgttgaatgtactgattatttaaataatacttatggagttgaatatcatcatttgagttcagaagaacaaataattctttcaacagcatatttagaagaaaaaattttgaattcaagaatacaatttgttttaggaatgcattccacagatgtgggacatttattatatgatttagtgcaaaggaatatgttgattactgaacgaagaggtagatggacaacatattcgataaataaagattatgttgatcaactagaacaacttgatttatcagatattccatcatacgaagttgaattaaataagacggatcaacaaatatatcaatttgtaaaagcaaataaaataattacaactcaacaagtggttgatttagttgataaaatatctacagtacagggagcatcagttgctataaataggcttattgataaagatttattgaagaaaatgagacagggacggcatgttttttattgtttaaagtaattattcaataaaatagaacaaaaaattgaaataaaaattgatatattacaaaaaattgaaataacttaagtattcctgtaaaaagcgaggtgaacaaacatgaacagtatccaaattccagtaggaatttccgattttgaaagaatatcagcaaactgttaagaatgacaacaagttatcacgattataaacaaggtttttatcatgcatttcttgcagggatttttgcaggtgttggatacaatgtacaatccaataaagagcatggagaaggaagaagtgacatcgtaattatcaatgaatatgaaggaaaggttgcagttttgaggtaaaatgttcaaaaaaagcaaaagaattagaacaagactgcgaataagaagtttacaagaaaggaaacaaaacaaatgaaacaatatgattacctgatcgtaggttccggtttatacggagccgtctttgcacagcaggcaacagcaaaaggaaagaaggtcttagtcatcgacaaacgaccaaacattgcaggaaatgtatacacagaagatattgagaagatccatgtacataaatatggagcccatatcttccatacaaacaataaaaaagtatggaattacattacaaagtttgcggagtttaatcgattcacaaattcaccagttgcaaattacaaaggagaattatattctctgccatttaatatgtacacattcaataagatgtggggtgtgatcacaccgcaggaagctgcagataagattgaacagcagaagaaagaagcagggatcacagagccaaagaatctggaagaacaggcgatcagcctggttggaacagatatttacgagaaactgatcaaaggatacacagaaaaacagtggggaagaccatgtacagagcttccatcctttatcattaagagattaccagtacgtttaacatttgataacaactattttaatgccttatatcagggaatcccagtgggcggatacacaaagatgattgcaaatatgctaggagatgtagcagttcgtttaaatacagactactttgaacacaaagaagaactggatgaactagcagagaaagtaatctatacaggtccgatcgacgcatactatgattacaaattaggagaattagaatatcgttccgtaagatttgagacagaagtattagatcagccaaacttccagggaaatgcagctgtgaactacacagatgccgagacaccatggacaaggatcattgaacacaaatggtttgaattcggaaaagacgaagaaggaaacgaccttccaaagactgttatcagtcgtgaatacagctccgagtggaaattaggagatgaaccatattatccagtcaatgatgaaaagaatggaaaattatatgaagagtataagaaattagccgagaaagaagaaaatatcatctttggaggaagactcggagaatataaatattacgatatggatgcggttattgcagcagcgttagatatgtgtgaaaaagagttataaagatttatgtcacataagaaaagaggaacaataaacatgagcgaaacatttttaccagcaaatattttaatgccacaggtagattctatgaagaaatgggccgtgatcgcttgtgaccagttttcatcccagccagaatactgggatgaagtaaaagagtatgtaggaaatacgccttcaacgttacatctaatgcttccagaaacatatcttggaagtgaggaagaagatgaaaagatccgaaagattcaatccacaatgaagaattatgcagatgatcatctgttgaaaacttatgaaaattctctggtttatgtggaaagaaccttgcagaatggaaagattcgaagaggaatcgtaggtgcgatcgatctggaacaatatagttatacgccagaacacgaagcaaaaatccgttctacagagaaaacagtcatggagcgaatcccaccaagaatgaagattcgttatcaggcaccgattgaattgccacacgtgatcttgctatgcgatgattggaaaaatgaagtattagaaatcgtaacagagcagaaggcaaatcttgagaaattatatgaatttgatctgatgcaggaaggtggacatatcgcaggatggctggtagacggagaggtcaaagaacaatttttagaaaaactacgatcatatgaagaacaaatgacagaaaaatataaagatttaagtgatgatccaatggtctatgcagtcggagatggaaaccattctcttgcaacggcaaaagcctgctacgagaagttaaagaaaaatcatcgatgggaacatatcaaggaccatccagcgagatatgcattggtagaactcgaaaatctgcatgatgattcccagcagtttgaaccaattcacagagtcattactggaacagatcctgaagaattaatacatgcattaaaaacagaatgttgcagcgaagaaggacaaacaattcgctgctattatggaaagaaggaagaagttctccatttgaatttacataaacatcaattagcagttgataaaatacagacatttttagataaatatctcaaagacaattcaggatgtattgattatatccacggagaagatgtcttaaaagaactgtcaaaagaagagcagacgataggaattgaacttccagcaatggagaaagatcagctgtttccaagtgtgatgacagacggaacactgccaagaaagacattttccatgggacatgcttgtgaaaaacgttattatattgaaggacgaaagatccagagatagacgagtgcccaataattactttacaagaaaaactttaatgatatcgtgaaatgtggtatgataaaaaatagtgtaaataaataatatatacaataatggaggagagatcatggctattttagtagcaggtggtgctggatatatcggcagccatacatgtgtggaacttttaaatgcaggatatgaagttgtcgtagtagacaatttatataattctagtgaagaagctttaaagagagtagagcagatcacagggaaaacagtaaaattttatgaggcagatgttttagaccgtgaagcattagagaagatttttgatgcagaagatattgattctgtgatcaactttgcaggattaaaagcagttggagaatctgtacagaaaccattagaatattatcataacaatatcacaggaacattgatcctttgtgatgtgatgagaaatcatggagtgaagaatattatctttagttcttcagcaacagtctatggagatccagctttcattccaattacagaggaatgcccaaaaggacagatcacaaacccatatggacagacaaaggggatgttagagcagatcttaacagatttccatgtcgcagatccagaatggaatgtcgtattacttcgttactttaaccctatcggagcacatgaaagtggactgatcggagaagatccaaagggaattccaaataacttagtaccatatattgcacaggtagcagttggtaaacttgagaaattaggagtctttggtgatgattatgacacaccagacggaacaggtgtccgtgattatatccatgttgtagaccttgccaaaggacatgtgaaggcattaaagaaatttgaagaaaaaccagaagtacgtatctacaaccttggaacaggaatcggatatagcgtattagatgtcttacatgcatatgaagaggcttgtggaaagacacttccatacgagatcaaaccacgaagagctggagacattgcaacatgctattgtgatgcgacaaaagcaaaagaagaattaggatgggctgcagaaaaaggaatcaaagaaatgtgtgcagattcctggaaatggcagtctatgaatccggatggatatagaacagaagattaattatttcattatcatagcattagacaaaagctgtcgtagaatatacgatggcttttttgaaaaataaataggagcaatagagatgaaaattgaaaataaaagacaatgggtcggagagttgttctttttattaggaacaatactctatattacatactactttttttatatagcttactattggtatgtagagaaagatccgacaagacaaattccagtgcaaagactattttatattggattaatctgttttgtggtcaaaataatattaacaaaatatcaatggaaagaagtgattattggagcagcaggagctgttttgatgtatttatgttggaaaagctctggaggaattgattaccccgcaaattatctgatcattctggcgatgaaagacgtagatcttaagaaagtgatgaaagcagtatttgcatgtggatttgttgggttaagctatggttttacatggttctttatgaatgcaccagataaattaacaacagtaaaagattatgggcgaggaatgatagaagtacgatataagttttgcacatggcatgcgaacacgattcatcttatgatcatggttttgattgttagttttttatatgcttattataagaaaatgaaatggtgggcatttgcgatcatgttctatttcaactatgagttttatcaactatcaaaatcaagaacagcattttattgtggatcagcagcgatcattgcctattttattttaagatatgcaagaaaaatttatgagtttaagatttcactgatcttattagaaatcggaaatcttgtagggattttcttatctatatattatggactttattctcaattgacagatccaacatttatgagattagatcaattgatcacaggacgattgacagttgcacggaactgttttcttggagctggaattcctctgtttggaagtaacattggtggaaaggtttgtggatatggaatttatacacaggccaatgatggatacgtaacagaattaggaattgtaagaacattgttggaatatgggccaattgtgtttggacttttttgtgcttttatgcttatagctgtatgggtactttataaaaagggatattttggggctatggtgcttttagaaattggatttatcgcatgcggagtagaagcatattttccagccgcttacaatttaaaggcatttgtatttggtctggcattttatcagttgatgggattatttaagggaaaagaaaaagaagagaaacgaggaaaggcagtcaatgcatcagaataatcgaatcatttcatggattatatcatttttattttcaatatgcatggttatatctataagttatgatcagagagataactggtcactgatcatatgcgataaaaaacatatgatcagtgcattgatcatgacgatgattcttacaatgatcgtacatatgatcatgaatgtattatattcaaaagcggggaagtcttttataaggttaaagactcaagtaaacagtgggataggagaaaaaatatttgatcatcatcctatagcagttccttggagcattctgattgttttatggcttccaaattatattttgtattttccgggttgtttaacttatgatattatacgacagtatgagcagtttttcagtggaaatctgacgaatcatcatcctgtattgacgacattgtttgaagggatgtttgtcaaatttggaagaaacattggatgtcaaaatgtaggaatcgcagtgtatctgttatttacattgttatttacaagtggtgttttcgcaatatgtttttattggatgcataagaagaatacaaagtattggattcgctttacaggattggcattttatggattgtttcctatctggtcggcatatgcaaggacagcagtaaaagacacattattttatccaatatttgttttatttgtgttatttatatttgatatagtattagaaccagagaagatatttgattcaaaagttaagagtattttgtttttaatagtctctttattattatgtttggtcagacacaacgggttttatatattaatttttacgatgccgttttgtattgtaggtgtaaaaaaatatcgaagacaattgatagttttatttataataatggtggcgttttgggagctttaccaaaaagcaattcttcccatggcaggtgtgaagcctggcggaaagcaggagatgctctccatcccttttcaacagacagcgagatatgtaaaatattatggaaatgatgtttcgacggaagaggaaaaagtgattcgaaaagtattagattacgatacgatcggaaagaattatgatccagatctttctgacccagtaaagaatacttacaaacagaaagacgaatatttaaaagattattttaacatatggtttgaaatgcttaagaagcatccgacggcttatattcaggcaacgttaaatgggacatatggatattggggttatatgacagaaataagatatccatatggatattatgtacagccagaaagtatggatatataccaaaaagaatatgaaatatattattcggaaaaaacaaaatatatcagagatatatatcatggggttttagatacaatatatcagaaaactccattgacattatttacaaaaccgatgatatatttatggattttgattggattgcttggcatggtatgttcttttaaaaagacgatcagatattggattgcatttttgccagtagtgatatcattccttatatgtctggcatcacctgtaaatggcgacatgcgatatatgcttccgattacagcgagtacgattttatatgttgcatttgtaaatgaaataatatataaagaatataatgaattttaacaaaggagaatgcgtaatggaaaaaattgcagtattgattccgtgttacaatgaagaaaagacaattaaaaaagtagtggaggattggaagaaagaacttccagaggcaacaatctatgtatataacaataattccacagatcgtacagtagagattgcaaaagaagcaggagctattgtaagaaatgaatatcaacagggaaaaggaaatgtgatccgaaggatgtttcgagaaattgatgcgcaatgttatatcatgattgatggagatgatacatatcctgcccaatttggacgagaaatggcagaaaaagttttagaatacaaggtggatatggttgtaggggacagattatcatctacctattttgaggaaaataaaagaccttttcataatcttggaaatagcatggtgagagctgcaattaatcatctttttaaaagtaatatccgggatattatgactggatatagagcttttagctatcagtttgttaaaacatttccagtgttatccaggggatttgaaatcgaaactgaaatgagcattcatgcagtagataaaaatatgctggttgataatgtgatcatcgaatatcgagatagaccagatggaagcgaatctaaattaaatacttatacagatggtatgaaggtattatttacgatcataaaactgtttaaaggttatagaccatttcagttttttggaagtatggcattcttgcttatgattattgcggcaggattatttatacccgtatttatgacatatcttcatacaggtctggtaccgaatttcccaactttgatcgtaagtggatttatagcacttgcagcgttgcaggcattcttttctggattgattttaagtacgattgtacaaaaaaataggcaagatttcgaatttaaattacagttgatcacaaacaaaatagataatgagaaagataattaaatatgcaggaaagatcaagaaaagagaagaatatattatatattgtagtgccttgctataatgaggaacaagtattagctgaaacatccaaacgattaaaggaaaaatgtgaaatgctgatccatgatggtaaaatagcgaaagaaagcagaattgtttttgtggatgatggatcaaaagatcatacgtggaatatgatcgatgaatttcataaaatggattttatattttcaggagtgaaattatccagaaatcgtgggcatcaaaatgcattgctggctggtttgacaatggcatcagagaaagcagatattgtaatatcaatggatgcggaccttcaggatgatattaatgcagttgatcagatgatcgaaaaatattatgaaggatgcgatattgtatatggtgttcgaagtgccagagatacagatacattttttaaacgttttacggcagaagcattttataaattgatcaataaaatgggcggagagcttgtttacaatcacgcagattacagactgatgagtaagcgggcattaaaaggattattagaatttgacgaagttaatatctttcttagagggatggtgccgatggttggttatcagagtgatattgtcacgtatgagagagctgagagatttgcaggagaaagcaaatacccattgaagaaaatgctttcttttgcatttgaaggaattacatcgttgagtgtaaaaccaatcaaaatgatttttaatgttggaattttaatttgtgtaattagtgttttggcaatcatttattgtctagtacggcattttacaaacaacacggtaagtggctggaccagtcttgtcatgtcgatatggtttttaggtggtttacagctgattgcgattgggatggttggacaatatattggaaaaatatatttggagacaaaggccagacctaaatttattattgaacaggtattaaatgactaggagaatggagatgaagataaaagattttatatacaaatattcgatcagattgtttattttgatcgtagcatatttgatcgtaagttttccatttcaatatacacaagaaaagatgaatgacgtttctcagccggttaggtggctggggacgttgttattttttatcatagcttgttttatcgtaagatacagaaagaaattagaagctgtttttgcaaaaaaatcgttattttttatcatctttgtgatgatttttgcattgcaattgatgacaatctatgtatttaagatacagccagtgaatgatttgttatatttgcatgatgaagcaatccgaatgattcaaaatcctatgatttcgttacagcgttttggtgggtattttgcacattatccgaataattatggatatttactaatcttatattgctattataaattgttggtgtcttgcggtatttctgtcggaagtctggttcttgcgggaaattttttgaatttattagtaattgatattggaattttatgtggatatattgcaatacgcatagttaaaaatataaaactggctaacatatggatgttgttgtttttactgaatccgtggacgtatttctggattgcttattattatacacacacgatatcatttggtatgatcatggtgttgctgttgttgtttgcgctaatacataaagaaaaagacaattggaagggcattttgtacagtgcttttttaggaattgtaatttatataggaattaagatcaggatcaccaatttgattttctgtattgcagtggggatcacgttgtttatcttttggaagcagtataagtttaaagtaagacatatgtgtctgattcttggaatggtagcaggaattgcagtttctgtttttggatatcagtacaaatttcagaatatgataccaaaacaaaacacacaagaatttccagcaacacattggttaatgatgtcttctcatggagttgggcgatatgatagtggtgatgtgtggtttacttcacaactttcaacgcaaaaacaaaaaaaagaaaagacaattgaaaaaacaattcataattataaagagcttgggataaagggaactttacagttatctggagtgaagttaagagaagtctggctgacaggagatgatgattttacaaaaatgtcttatgtttcaacagattatggaacagcaaacgagttcttaaatggaaagcacaatggatggatcttaatgtacagctatctgatgcggatggcggtttggtgctttgcattagtggcagcgattggaatgctcagaaaaagaaacccatggaattatgttgtgatgcttacattacttggaggaatgatcttccatgtattctgggaagcaaatccaaagtatagcatatgctttatgggtgtaatgatgtttatgatggtaacaggaattgaaaatctttgtgaagaagaaaagaaagaacaaaaacaaaagatttcaatggggaatgttatgttatgtttggtcggaatcggattgattgtatgtttgcagccaatgcataattatttaaaacaaaatccagaggcgttagatcaatcttatgtagctagtcagtttgcacaaagtcagacgttgaatctgtcattgaagaagaatgaagcaataaaacaaagttttcttacaaaaatcaggtttcagaatattacattcagtttattaaataatgagaatgattttactgtgcgtctgcttgatgaaacaggaaaagtaatggaaagcgcacgacaagatcaattatcttatgcgcaaaatcaatatgagtggaagttaaacaaagttaagaattctgggacatatgtaatagagattgtaaatcagaaaaaagatcaaaaatacaaacttccggtatactggactggaaattatgatgcatacccaaatggatgtatgtataggagtaacaagaagattgggaaagcagatctggtatttcgtgtatatcaataaaaatttagaaagaaaaatgcaggtgtataattgaaatacagctgcattttttataccatattgtattattgccaatccgtagcttttacccaattttcataatcattaaaatattcatacattcgaatcgcaccacggtcaaaatagtttttaaagatcagagcatgcttcttctgagcaacatcagaagggagttttgcaagaccttctggaatagcatcctgtgtgtagaatttttcaaagtaatataatttatcgtaatgctcagcattttcatgacttacagcagtgactaattcatctgtttttttatgatgctgatgtccgtattcgccatcaggattgtgtgttacgatcttgctccagttacgataattcatgacacgccggatatcctgtgtgatatagttagtataaggatcccatgcaacctgatgtctgcgatagaggtcaggatagcggagaatcacatgttttgccccgatatcattcatcgcagagtcaaaatccctagctcgactatcataagagccattggttaggcaaacaacaaaatagttatttccagtttcttttaattctttaatttcctgaatcatatttccaccaccccataagaggtcatcatctggatgggcaatgatcatcagacggtccccatcttttaagtcaaaataatccaaagcttcagtagataataaaccatttttagcagtgacagtgatcgtgatattgcactttctgcttggattttttatagaagttgcggtgatcacagcaacaccaactccacgggtagttacatgaccattctcatcgacaacggcaacggtatcattgtttgtgctccaggtaagttttttgtcagatgcattccatggtttgaaattcacagataaagtcctgaaagttccgtaaggcatactaatcttttgatgccttgttgttaatttctttaatggaatcgttacatgaaaacgtcgtttcaagataacttttttatattttgcagtcattgttatgttgccttcttttaaaggtgtgataacaccagatttactgatcgtggcaatggatttattgctgcttcgaaaagtaacggaagcaagagatgcattcgcaggcttgagagaaatattccaacgatatttgtttggatatttgatcagtgtttcagaagccgcatcttcttcacaggaaattgctttgatggcaatttcaggtgttacttttactttaatagatttttttgcaatgaccttaccagattttgttctgaccacatgacggatcactgacttaccggttttctttggtgtcaggatacctttttttgatacttttacaactctaggattagaagattcccatttgattttgtaggaagcttttttcttcttagagtatcgaacagatagtgcctggctggattttaaaggtaacttgatagatttttctgcattggtaaaatagattttaaattttttacctttggcatatgtctggtgaggacataagataacagacatgacaagaaacagattcaggcatgccagttgtaaatatttgcgttgaactttcattgatcacatcccctttttgtttatttgtaaattagctcaaacaggataattatagaccggttggcaaaaaaatacaaggttttgcggtgtatataaagtaaaagtttttacaaaagtattacgttgtgatataatacaggtcagtaaaattaagaggagtaagattgaatgaagtttacaaaggaacatacaatgcagatgaaagggattgcgatcatcatcctgttgtttcatcattgctttttgaatgcacagcgttgggctacggttccatatgagaaacttgcgacgacgaatggatggggatattacccaatttcgtttgcaccattttcttctcatacgatacaatatcttgctagtttttcaaagatatgcgtagccatgtttgtttttatgactggatacggaatgtgggtttcttatgagagtcagaaaaagaaaacaacgatgagtaattatataaagaaacgaatggtcacattaatgacaggatttttgatcatttttgttgtgacagagattcttgcgattccaactggacgctttatagaagtttatggacatgattttcgtagtgtggtctatatgatcattgatgcattaggattagcaaaattacttggaacaccgttattttgtctgacatggtggtatatgagtcttgcgatcgttttgatcatgatctttccatttgtacattcaattatggaaaaatatcaatggatcgtggttgttgcatctattatcgttccaagagcttgcggatttggacaatcaacagatttgttccgatatctattagcatacacactgggaatgtattttgcacaacatgacttgcttgcgagaataaaagagaaatttatggaacagaatgtggcaggaaaactgttgtctctgatagtatcattgataggtttggcagttatcataaaatgccgacaaaatgcatggattggatggaaatatctagatttttgggatggctttgcagcaatgtatgtgatcgtaaattcatatatttatatattaaatggaaaatggatcgtaaaaggattaggcttccttggaaaacattctatgaatattttcttgattcattcattttacagagacgtatttttccatgaatttacatattcattttattatgcatggttagattatatagtacttatggcaatttcattggtgacatcgattgtattagaatggtttaagaaattaattcgatatgagaagtttatagattgggtcaaaagattagtaacaaaagaaggagtaacagtacattgaaaaaagaaaagaaatcatcaatattttggatattgatcatattttttgtattattttccatttggcagttatgggtgccggaagcactggatgattggcgatggggaagtgaagtagggatcatgagattaaaaacgtggtttgaaggatataatggacgttactttggagatattttggtcattgttttaacaagattgccgatcgtattgagaagtatggctatttctgggataatgactgcaatgttatacttgatatatcaattaacagaatataagatattatcatttttaatttgtgttttttttgtagtcaatattccaacaagcttaatgagtcagacgtatggatgggtatcaggattttcaaatttctgtgttagtgcaacgatgattcttggatttttgctatatcatatatctattttcaaagaaaagaaagtgtcgaagttgaaaacagggatttcaatgatcaatgcatttcttggaagcttggttcttgaaaattcaacggtatatctaattgtactaagtatcgcttttttaattatttatggtgtacaatataagaagctgcataaaggaatgttacttcatttgatcatggttggtattggtgcattctggatgttctcgaatagcgcatatcgtatggctgcggcacatacatcacagggaacaggaaaagagatcgcagcgtttgaattaagctttgaatggtttgcctctgcattaaaggtatacgcagacacgatcattaattattggatcatgccgaatcatttattaaatataatgacatgtggattgattttgatattactccaaaagagaaagaagaaaggacaaggattgttcttggttctgttcagtggttttttagcattttatatatttaattttatgaatcttggtacatggaaagattatttggcatggggcaatgcagcgcaggctgtaatagtaacgacgtattgtttagcattggcagcttttagtgcatggtttattacagattttaaggataaggtgatcgttcagatcattttatggtcacaactgattttaatgggaccattgatcgttgcaagtccgattgcaattcgttgtttttatgtaacatatatctttttcgttttatatcttggagtattgttatcgtatagtatacgaagtggatttttaaagataagcaaaggatatttaaacacagggatcatgatgtgtattttctttgtgatgatcggaaatattggtgtatattattttgttcatggacaagtgaatgacagacttcaatatatacaaacacagataaaacaaggagagaagaagattgaattaaaggaaataccgcttggagatacatactgttatggtttagatgtatataatccagcatgggtatggcgttataagatgtattataatatcccaggagatattgaattgaaattcccagagagataggagtaagtgatgagagagataaaagtaagtgttatcataccaatttataacgtagaagaatatttggaagaatgtctgcaatcagttgtagatcagacattagaggatctgcaggtcatcatggttgatgatggttctttagatggaagtacagacattgccaagaaatttgctagtcgatatgatcattttgagtatgtaagacaggtaaatggtggacttggaaatgcgagaaatacaggagtaaagtatgcaaaaggaaaatacattatttttcttgattcagatgatattgttccagatgatgcatacgagaaaatgtatcttgcagcagagaaaaatcatagcgagatggtagttggaagtgttgcgagatttaactcaaagaaagaccatgtgtcgaatctgcatgaaattgcatttagaaaatatatcgataaaacacatattacagacaatacggatctgatttatgatacaacctcatggaataaattaattttgaaagagttttgggatcgtaatcattttgaatttccagagagaattctctatgaagatattccagtaacgattcctatgcattatcttgctaataatgtgacaatggtgcaggatgtctgttatcgttggagaattcgtgatggagctaataagtctattacgcagagagcagatgactttacgaatatgagagatcgtattaccgttttacgtatggtagataaattctttgaggagaatgtcaaagaacaagaattatgggatgcaaaatattataaatggttatatattgatctgatgatctatgtgaacaactgtatttatctttcagataacagaacactcgagatgatgaagatcattaaagattatatagaagaaacaattcctttagaaacgatcgataagttaccagttttatatcgtgaaaaatatgtggctttgatgaatctggatgaaaaacgattagtaaaactgcgtcaatatgaagttgataattataagaatttaaagatcgtgaaaaagggcaacaaatatattggaaaattcccgaaagcgatcgtaactggtgataaggcagatatgacagaggcattagatcagtggagacttactcaattgatttatgatgtggcatggcagaaagagcaatgtgtgatcgaaggatatgtattcttacgaggattatctgtgccaaatgtaaatgtacaaaaattatcagcacatttggtatgcttaagtacaggagagaagattccactggaaatacaaagtattaagtcacaatatgcacagaagaaatttggcttaaaaattgataacgagacaaaacagatccatttagcaaattataaaggttgtggataccggatcatactggatgcagctaagatcagagaattaaagcttgatggagaataccatatattattaacttatgagagagacagatggaagaaagaaactattttaagaggaatcttaaaatctcttggcaataaattggacaagaaaacatattttaaagatcatatgctgatcgaacttagcaagtcttacagatatgattttaaagtaaaaatttcacaaaagaacattgaattaaatgatatgaaattggacggtgatcagttaagattaaaactttctgagaaagttgatgcattatatgaagcgaaagatgcacataatgcggaaatcttaaaagcagctataacacaggaagatgtttctgtggatatttcagatattccagaaaataaacgatatattgcagttaaaaaaggtaatttatttattcctgtatacaaagaaaagaaaaagagaatctttgtagaaaaccagaagaatcagttagtagaagaaacatcaggagatcatagatgttacttgttaaatcgaaaggcagtacctgtgatacgagatgtaaaacagaatgaggaacagttttcatttgagatcataaacaaaaatatcggtaactggcagagagcaacattgtatgtagaagatccattagaagaagaaaagattattcttggaacaggatccgtgaatcaacatggagaagaggagaaagttgtcatttctttaagtttaaaggacgaaaaaatcatcaagaatctttatgcaagacgtcgtcaggtgtttattttatatgaaaataatgaacagcagaaggtatgtgcacttggtggggaacataaagtttttgataaaaaatactacacgaaagaaagaagatatcgatttattattgatccagaagatgattttctgtattttactacgctgagagtcaaggaattcctgacaagaagtgcgaagaaaagagcttttgtcaacagattcttatatccgttattaagacttcttccattaaagaaaaaatggatcgtatttgaatctatgtggggaagtaaatttagctgtaaccctagatatttatatgaatatattgataagaatcatccagattatacgtgtatctggtcattaaaagatgaatgcattccgatcacgggagatggtgttagagtcagaagactatcttggaagtatttatattatatggcaagagcaaaatactttgtgaataatgtaaattttgctgattcttatgagaagagaaaagggcagattgaagtacagacgatgcatggaacaccattaaagacaattggattggatgtaccaggcgatttccctacaaagaaatcagaaaagaagtatattagaaagtgcaaacgttgggattatctgatcgtgcaaagtaagtttgttgcggatcttgcaccatctgcatttaaatttgaaaacacgatcatggatactggatatccaagaacagatattttgtattcttctaataacgaagaagaaatgggtagattaaaagaaaaattaggacttccaaaagataagaaagtcatcatgtatgcaccaacatggagagtgcgtgataagtttgaattaatgctagatcttgagaagatgaaggaaaaattttcagatgaatatgtattgatcttaagattgcatcacttttcagcaaaaggttggaaaggagttccagcagatggatttgtgtatgatcttacggattatgaatctattgaagatttatatatcattacagacatcctgatcacagattattcttctgtaatgtttgattatgcagttctcgacagaccaatgttattctttacatatgatctggatgaatatagagataagcttcgtggatttaatattgatatcgaaaaagaagcaccaggaccattactatatacgtctgatgaggtgttagatgcgattgagcatctggatgaaacgattgaaaattcaaaacagagagtcgatgcattccatgaaacatacattccatatgaatgtgaaaattcatctgaaaaagtatttaatatgatgcagggaaaataaaaaataaacaatgccataaggcagaacaatctttaagaaggtcattgaaaggtttaagaaggaaacatggataaaataagaaaaattattcgatttgtaaaaagattatttccaaaaactccaaagatgaaatttatctatgcctggtattataaacatggcaagatcaatgaaaaacaagcactctttgagtcatttcacggcaaggatgtgtcagattcatccttggcaatcttgcaggagtttttgaaaatgccggaatcgaaagatttcaagatctattttgcgacgaatgataagaaacgtgatcagaaatttattgattctatcggattgaaggtagaacttgtagatattgcagattttaaatatgtaaaagtgcttgcaacatccaagtatctgatcaataacagttcttttccggcgtatttcattcgaagagatgaacaggtgtacctacagacatggcatggaacaccgttaaagacattaggaaaacgaatgcgttttggaattgaatccatgtataatgtgcaacataatttcttacatgcgaactacatcatgttcccaaatgaatttacaagaaaagcgatcatggaagattataatctggaagctttgtatacaggaactgttgtgatgaatggatatccaagaaacagtatttttatggatcatgagaaagctgatcaggtaacaaagaaacttggaaatgaagattatacaacgatggcatatatgccgacatggcgtggacagagtaatcatgatgtgaatacgtctgaatatagcagagagatcaatcagctgttacattatcttgatgagaatttaaaggatgatcagaaattatatgtaaactttcatccaattgtgcagaagttcgtaaagctggataattatgaacatatttatccatttccaagtggtgttgacaagtatgaatttttaaatagtgttgatgcactgatcacggattactcaagtgtattttttgattactcgattacaagaaaaccaattattttatatatgtatgactatgaagaatatatgcacgatagaggaatgtattttgatatcaaagaattgccatttagaaagatctatgacaaggaagcattaagagattgtctggtcaacgagacattccgagaagattcttatgaaaatgataaggaatatacagaaaaatatattcagtatgattctattgatgctgcaaagaatatggcagaacttgtatttcatggaaatatgtgcgatatgccaacgatcgattacagttttaacaaagaaaagaaacgaagagttttgcactatccaaatgtaaaaacagcacagacgatcgatacgatcgcgcagatcgctaagaaagatgaagatgtagtgatctttgaaaaacgttttttcaatccagaattaagcagtcatctacatgataattatcttgatgattttgattatatttttattacacgaacacttccaagaacctatgcagaagaagtgttaaagagaaagagtgccaaggtcagaaaagaacttcataagagggagatcaagagatgctttgcagatcttccagtatattcaaagtttgagacagaatactatcatggagaagcaggagagacattttctttcaataagaaaaaaatgatcaatgcatccatgcgagtaatggaagaccatttggagattaagtttgaggaaagcaagaaaggtcagccaaagaagctgttacttgtaaataagaaaagtcagatcatttatacaagggatctaacagaaaaagaatggaaagatcattgtatcaaggaatattttgatgaatttctttcgcttgaaattgcggatatgaacggaagatatcagttgatgatcgaattagaagatgaaaatggtaacaaactgccatatttctttgtagatcgtaaagaatatgcaaaacgcaaagaagtgatggatgaattagataaatcttctgtatatatgacaggaatcaagaaacatgatattacttatcagaatacattcgaacctgcggatacaagtgtgattccttatatgaatgaagtagatggaagattttctgtatttatgggagatcaggcacagttatctgttcgtaatatgcgtggacaagtattgaaattcaagattaagggttcaaaagttcatgtgaaaatgaaatataaaaacaaagaagctggaatcaaaaatgtcatactatcatatcgaagtaaagtggagacgatcgattatccatttgaatataaagtaacgaggtcaggtgatcattatattattgatgctcagattgatatgtcggtattatcactggaagaactgttttgggatgtatttgctgtaacagagaagaatggagaagaagtaagagtaagtgcatattggagcagatggcagagattaaaattattactgatgaattatcaatgtgatgttgataaagagcatattattttcccttattcgacgatcacatgcaaaatggcatttacttatcgtacaagatcaaaatatgatggatttgatgtaaagatcaaggaattagcagcttttggtgtttatacgttgttattaccatattggaaaaagaaacgagtatggttagtatttgaaaaattctgctctatggcgcaggataatgggtattatttcttcaaatattgtatggagcagcttccaaaagaaaagaagcagcatatttattatattctcgatacagattctgctgattatgataagatgaagcaatatggaaaacatgtgattccatttatgagttttcgacatattttatattcacttgttgccaatttatatatagcttctgattcaaagaaacatttatatacatggagagcaaaaccaaatgtgatctcaaatcgtatttcaaaacataatatcttgtttttacagcatggggtgacagcattaaaacgtgtacatccgatttttggaatgaaaggttcaagtcctatgactcattttacaacgacatcaagatttgagcataagatcattgtagagaattttggatatgaagatggagatgcaccgattcttggatttacgagatgggatgttctggaagatacttcaaaaccagaggaaaagatcattcttgcaatgccgacatggagatcatggctggaagaaaagagtgcagaagagtttaaggcaagtgattattataaaaactatatgaaactgttacagagtcagaaacttgcaagaatcttaaaagaaaatgatgttaaattgattttttacattcatccaaagtttaaagattatttgagcgagtttaatgtcagtggagataatattgagttgattccatttggaacagagccattaaatgagatcatgaagaaatgttctatgctgatcacagattattctagtgtatgctgggatgtatgttatcttgataaacccgtattattctatcagtttgattatgatatgtatatgcaggcgcatggaagttatctggatatggagcatgaactatttggagaacgttatacagaatatgagaaattgatcgatggaattgaagagtatattcacaatggatttaaagaaaaagaagaatatacaaaattaaaagattattattttgaatatcgtgataatgataacagtaaacgtacgtatgaatatatcataagcaaaggatattaaaatggacaaaaagaggagaataaaatatatagatttgtgcaaaggcttaggaatcttgatggtaacatggggacatattaccaagcttgataatccagtcgatacgtgggcggcatcattcaagatggcaattttctttgttgccgccggatatctgatccggtatgcagattcttatcggacacagacattaaagggatattcagtaaagttattgaaatcattgatgctgccatatgtattgtttagtattttgtcgattggctttcgatttgcaacgatgatcatgaaacacagaattgatattccggcgatcaaatcttatattttggcaacgatcacattaagaggaacatttgcactatggtttttaccggtgttatttattgcggagatcctgtttttctgtcttatcaaatatcttccgaaatggatgaggatcgtgatattgatcgtgatacctgtttttggaatttgggagtcttattttatcagacacttgatcgtttcagtggatccattaacatttgaaagaatatcatttttgatcttaccgatcagtaaagcattgatcgcattatggttcttggagataggacatattggatgtatgttattcagtaaagtaacatccagagaaatccgatttatgatcggactggtatttacaattggaaatatcttcttatcacagcaaaatattggagtggatttaaataatatttctttaggtattcacccaccactattttttgttacaggaatcattggatcttttggagcactatttgtctttgaatttcttgaagattatgttccatttacgatactgaattattttggaaagaattctttgatattaatgtgtacacaaagaccgttttatattatttctactgcaactgcaggatggaagatcatatcaggaatgccagggatcatggcatggagatattatattgattgccttggggcaatgattcttgtgatgatcattgaatactcaataataacatttgttaatacaaaagctaaatttttgatcggaagattttagatagttgaataatctgttaagtaatagtataatagcaaggtgtaaattaaaaatatcaaaatggagaagtacagtgaaatcttatattgaaaattttaaaaagtacagattccttttatgggaacttgtaaagaaaggtgttaagttaaaatacagaagatcatatttaggtattttatggacactgttagaaccgttaatgacaatgatcgtactaagtgtagtatttggtacattgtttggaaacaaggatccacatttcccagtatatatcttatgtggacgtttgatgtatagtttcttttcatctgcgacaaatggtgcgatgaaagcgatcaggacgaatgcaggaatgatcaagaaagtatatgtgccaaaatatatttatccattatccagtgtattgtttaattatattatttttgctatctctctgatcgtgttggtagtagtatctattgttttgaaggtatatccaaccatttatctggcacaggcgatcattccattgatcttattactgatcacagcttttggagttggaatgatcctatctacgatggcagtattctttagagacttagaatatttatggtctgtaggattaatgatcattatgtatgcatcagcaattttctacaaaccagggaggttattaaaatcaggttttggatggatcttaaaatgcaatccattatatcttctgatccataattttagacaggctgtttttggtatgccgatgaatatgaagtttttagctgcatccatcgtgtttgcaatcgtaagtgttattgtaggattgattttcttctataagaagcaagatgaattcattctgcatatttaggagggtatcatggcaaagaaagaagtattgaaagttgaacatgttggaatgaagtttaacttaagtcaggaaaaggttgatgatctgaaagattatgtgatcaagttattgaaacatcagatttcatataatgaattctgggcattaaaagatattaattttactcttaacaaaggggatcgacttggaatccttggattgaatggagctggaaagagtacactgttaaaggttattgcaggggtattaaaagcaacggaaggaactgtgacagccaaggggaagatcgctccattgcttgaattaggtgctggatttgaccaacagtatacaggacgtgagaatatttatctttatggagcagttcttggattctcaaagaagttcttagatgagaagttagatgagatcatagagttctcagaactgggcaaatttatagatgtcccagttaagaactattcttcaggtatgaaatcaagacttggattctctgttgcaacattggtggaaccagatatcttgatcctggatgaagtattatctgtcggagatgcgaaattccgaaagaaaagtgaagcaaagatcatgagtatgtttgacaaaggagttacagtattatttgtatctcattctttagatcaggtaaagagattatgtaataaggcaatcctacttgaaaaaggaaagatcatttctcatggatcgattgaagaagtaagtaaagtatacgaagagaaaacaaagtaagatagaagacacggaggtgtgatatgagaaaagtaatcacatatggaacatttgatttactgcatgcgggacatatcaatttattgcgcagagcaaaagaattaggtgattatttaattgtagttgtatcaacagatgagtttaactggaatgaaaaacagaaaaaatgttatttcagttatgaagaaagaaaaaaactggtagaagcagttcgttatgtggatcttgtgattccagaagaaaactgggatcagaagatttccgatgtgaaagaatatcatgtagatacatttgttatgggagatgactggaaaggtaagtttgatttcttaaaagattactgtgaagtcgtatatcttccaagaacagaaggaatttctacaacaaagatcaaacaggatcttggattaaacggaacaacagcgaataaatagcaagagttatgaattaagatataagaggaatttcgttgacaatagaggttatgaacggctagagacggaattcttcttttctgcgttatcaaacaaaaagaatttaagataatgctgtagatgaaaggattagtttttgatgcattttatagaaattagcaatatttttaaaagtgaaaaaaagagatataaagttaccgcagttttaaaattactggtcgtgtttgcattgcttggattctttttatcaaataagccaatgtatcatgtgcagactgatttttacctgaaacgtatgggatttgtatttttggcatgtttttggatggtatttgtaacagtttgcgacattcgtttgagtcagaaggttgacagggcttttgtgatcattcttggagtgatcgcaccagttatgggatggatcttgtcagaatttttgatcaatgaagcagagtgtgcatttccgccgacacagttctatcagaaagagccactttggatcgttctaagtcttgcaatgatcattttggtggatctgctgatcatatttttgacgaacagcatcagagttggatcagtgatcgtaccatttgtattgtttatctttgcggtagttgtatgtgttgtatatgaatttcgcgggattccgatgatggcaccagatattttaacagtacagacggctactagcgtgatgggtaattatacattcaaattgacgtttgaacaatatagtgtgatcttggtatgtatggcatttttctttacatttttaagacttcatgaggtaaaggttacagaaaaaagagtatttcacattgcaggatttattgttgttgcattaggatgcggattgttcacaaatcagatcatactgtctgattttatggatgagcaccagatcaatattcgtatgttccgtccaatggaaagttatcaaaaatatggaggcgtgctgacatttgcaagaagtgttggatatgcggtcgtgaagaagccagaaggatatacaacagcgaaggttgatcagatcattcaggaatatgaaaagaaatcagcgaatgaacagcaaagtacagcaaagcaatatccgaatatcataacagttgtcaatgaaacattcgcagatattaaggtgctgggagattttaagacgaatgaagattatatgccctatttccatagtttgaagaagaattgtgtgacaggatatacgtatgcatcgattgtaggtggtcagacagcgaatacagaatttgaattgttgacaggaaatactcttgggtttttatcagctggaacgacagcatttcagctttatattcatgggcagatgccttcactagttagtaatctaaaggcagaaggatattctggaaataaagcgatgcatccgttcaatccgtataattataatcgaccagctgtatataaagattttggatttacggattttattgataaatttgactttcctaagaatgtaaaaagggttagagagtatatttctgatgaggcaaatgtagatcgcattatttctgaatatgaaaagaatcgtaagaagacagatcagccattttatatgtataatatgacgatccagaatcacagcccttatgataaggatgcagccaactttaaacagccgatcaagattgaaagcagcaaatatgatgctgaggccaacagatatctaaatctgatcaaatattcagataacagtttaaaacagctgacaagttattttgaaaaatgtaaagagccaacgatcattttatttttaggagatcatcagccaagattgacagatgaatttatgaataagatcacaaacggtcaatatcagacttggagcagcgaacagatgatgaagcgttatcaggtaccattcgtgatctgggccaattatgacattaaagaacagcatatagagaagacaagcatgaactatatccaaagtatcctgaccaagacagctggagtaaagatgacaggatatcagagatttttaaatgaggtccgaaaagaagttccaacgatcacatcgcagggatattggggaaagaatggaaaattttatcagattaatgataaaggatcaccatattatggtataatacagaagtatcgtatgattcagtacaatatgatgtttgataagaagaatcgcagagatccattctttgaagtaagtaaataggagtgcacgtatgaagcaactgattaagaatattacgattcagatatataaagtattaacatatctgattccagtaaataaaaagatgattatatttcagagcagcaatggacgtaactatacaggaaatccaagatacatctatgaagagatggtaagagaaggccttgatcaagaatatgaatgtatctggtttttctttgatacaagtatagaagttccaggtaaatgcaagaagatacggaataattatttcccatatttttggtatttaatgagagcaggaatctgggtatttgatagtcgtcagccattatatgtgcgtaagaagaagcatatcacatacattcagacatggcacggaacaccgcttaagaagcttgcgcttgatatggaccgaatggatatgggtggaagtacggatattgagaattatcatgaacagtttagagtaacatgtaaggattgggattatctagtatcacagaataagttttctacagatattttcagatcatgttttgcatttaaagatcgtccgatcttacagatcggatatccaaggaatgatattttgatcaatgataattctcctactaagatcagagaatacaaagaaaaacttggacttccattggataagaagatcatattatatgctccaacttggagagataatgaatatagcgagaaaggaaagtacaaatttgcttcaaaactagattttgataaagcaaaggaggcattatcagatgaatatatattcattgtaaaatatcattatcttgtatcagataagattgattggacaccatataaaggattcgtttatacattcgacgagacaaaagatattgcatggttataccttgtgtcagatatgttgatcacggactattcttctgtaatgtttgattatagtattcttaacaggccgatgttattctttgcatatgatctggaagactacaaggagaatctgagaggattttattttgactttgtcaatgatattccagggccgatttcaagagatacagatcagttgatcaaagatattaaagaatataatgaagatagttggaaagaaaaatataagaattatcatgataaattcaatggcatagatgatggacatgcttcacagaaggtcattgacgtgataaagaaggtaagcagatagagatctgttgaacaataacacagtcaggaggtttgaaaacaatatggtaacgattctgttagcgacattgaatggagaggattatttaaaagcgcagttagaatcaattgcagctcagacctatgaaaactggcagctggtcgtgggtgatgatggttctacggatggtacgatcagcattcttgaagaattcagtaaacaatatccggaacaagtgacgatcattaagaatgacccaccacagggaagtgccaaagacaattttatttcactgatccaaaattcttacggaccgtattttatgttttgtgatcaggatgatgtgtggaaaccagataagatttatctgacattacagaagatggaagcgttagaggcaagatatggagagaaaacaccgatcttggttcattcagatctgtcagttgcagatcataacttagagatggttgcagagtcattctttcagtatgcgaatattccaaagagaattgtattgaatcaattgatggtacaaaattctgtgacagggtgtacgatgatgatcaatcgttgtctgcaacaatattttttacggccgttaccgatgtctaagatcatcatgcatgattattgggcggcattgatcgcgaaagtgtttggcaagattggttttgtaaatgagccaacgatgtattaccgtcagcatggcaataattctgttggtgcgaaagatgcaaagaatccagtctttttgtatcatcgtctcaaagaaggaaagaacagctatcgccgtatgatgatcgaatctatggagcagatgcagggatttgttgagacatatggggaagagattgataatctggatgtttatgaacttcttgagagttatggagaattgtattataaaggaaagatcaaacgattgagtttttataaaaatcatcacgtattaaaggaaggaaatatccgaaagctgatgcagtggctttggggataggaatatttatgaaaaaagcattaggacttgcaggaaaatatgtgatcatgtttctgtcgtgtttatttccaagaagcagaaagatatatatctttggagcatggcttggagaacagtttgcagacaatccaaaatatctgtttttagaagcacaagagcataaagagatccgtccgatatggatcacgaagaatgaatcagtctgcagaaaagtcagggagcttggatatgaagcttatatgtttgacagtttcaaaggaattttaatgcagcttcgggccaaatatgtggtagtctgcaatgggatcagtgatgtaaatcatacatttatgggacgagcagtattcttaaatctttggcatggggttccattaaagaaagttggctatgatgatgataaggtcaagaattgggatagcaagggtcaaaaaatccgaagaatgattcaggaaatcccattaggaaaagagtatgtagtagcaacaagtgatttttatgcaccgatctatgaaagtgcatttcgaagatcaaagagacatatcataacattgggacagccaaggaatgatatattctatgatcaaagtggaaaatttcatgcttctcatcagttgtcaaaagcggcaaaaggaaagaaagtcatcttatatacgccgacacacaggaaagaaggtaaagtggtatttcctttggaagaacattttgattttaaagtgctcaatgattggtgtatccaaaatgatattttgttcgtgatccggcgccatttttatcataaagatgagaaagtagatttctccatgtattctaatataacagatatcacagagagatccatggatattcaggaattattaatggatacggatattctggttacagattattcaagcacatatatagattatctattactggaccggccggtagtcttttataattttgattatcaggattatctggagcatgatcgtggtatgtattgtgattatgagaaggcggctcctggatataaggcagagacatttgaagccttgatggaagaattcgaacgtctggtacaaggcgacgatcattttaaagaggttagaaggcaggcaagggatttcttttactgcaaagaaggccagggaatggttggagaaacattgttaggaatcttgaagaatataaaataaaaagaagcttttgatctatgagtgaatccatagatcgagagcttcttttttgcattttgagttgatattcaggattaatatccagcacgataaatgatcttctgattgatacggctaagctcatcactgacttgataatccgatgtaccaaagaggtatttatgtgcgcggatcgcattctctttcaatgttgtagggaatccataataagtaccataataacggagctctttctggtcccaagggaatccctgctgatctttgatgtcatacttgaaaacagataagaacatatcaaacaattcatcctgactcatatttgtctttacctgaggaagtatctcatccataacagacatcatcttcaaaggatttttcttggctttgtcaaaaatcttctgaaggacttctcgttgtcttccggctctggcaaggtcaccgccagcggtataacggattctggaataagcaacggcttgatttccatccagagtataagtaccggcagaagaaagttttggagaatgtccaccgttgatacgattcatgtcaccgatataagcatttaaattctttaagatgcttttatcgacttttacttcgattccgccaacggcatcaacgatatcagcaagaatcttaaagtttacagttgcgtatttttcaatattcagatcaagattacgattgatcgtgctgatcgcaagctctggaccgccccaggaataagcggcattgatcttactgtattttccattaatacttacatatgtatcacgatagatcgataacagtttgacatctttggttgaattgttgatgctgacaactatgatagaatcagaacggtttccacgatctgacatacttccagtctgagaatcaattccgaaaaaagcatagttggtatagtcagtcatattgctgtctttgtttacagtgacaagctggctgtgatcaagactttttgttgatattttcccaagttttttgtgaactgtggaaagcgtaagtccgactaatacagcgatcacaagaatgagaatgatcaagatccgaagtggagatcttcttcttcgttttcgctttgtgtgtttggcatgttttgtatgctgtgctgtcataatgtatccctccagatttccttaaatagttaagtttgtacagaaaaaaggatgaaaaactccatccttttcttgctgtttaatatgcatttttattgacaaatcccttaaagaatgtaagaaataatatcttgatatcaagtcccaaagaccaattctcaatataatacaggtcatgctcgattctgcttcggatggaagtatcaccacggaatccattgacctgagcccatccagtaatacctggacgaacttgatgcttgatcatataacgaggaatctcttctttaaatttctcgacaaacaaaggtcgttctggacgtggcccgatcagactcatatcgccttttaatacattccagaattgaggaagttcatcaaggcttgtcttacggattacacgtccaacaggtgtaacacggacatcgttcttggttgtccattctttggcctctttcttagggtcctgtacacccatggaacggaatttgtacatcttaaaaggtttattcccaagaccgatacgttcttgggcaaaaatgatcggtccaggagaactcttcttcacaaggatcgcaacgataagcatgatcggtgagaataagatcagcgcaatgatagaaccgataatatcgatcagacgtttgatcagtttattcatcgtatttgttaatggtacgttacggatattgataactgggagtccgtccagatcttcagtgtatgggttggtggaaataaagttatagtaatctggaacaaactttgtatgcacaccagacttctcacagattgcaacgatctgttccagtttatggtattcattcagattcagagtgatcgcaacttcatcaagagatgtcttctcaagataagcggcaagatctgaaagtgtaccgatcttcttgattccacgatattcaaaattatcactgacaagatcatcaaaaatcccatgaacttttaagccccattgaggatttgatttgatgcggtcgatatatgcagctgctgaagtactgaaaccgataaataccgtatgtttgatattgcgtcctttcttacgattcgttttcaaaatcctgcgtatgatatatctggataaaagaccaaaaataaagttaaataaataaaataacagatataaagaacgaggaaagttctgaatctgccatacagtgatcacaaatgcagaaagtccaagtccgatcagattcgctttgaccagattcacaagttccttggaaccacgctggtaacgctttggtgtataaagaccaaagaacgaatacaataacaataacaggatcaaagagctgatcagcggtttctgatattgataaaactctggataatagcggttgagatcgaaaatctcctgattcagccagaatccaaagatcgtgcatttaaatcttatataccatgctgcaaatcctgcaaaataaatgcagacagcatccatcacgacatgcagtctgtttaagtaagtttggttttgtttgatcatatgataaatactcctttttcacttccttctattataagggataaaaagagatcatacaatgacaaatgacttaactttttcttatttttgtattttgtacttattgacactctcatcattttcacgaaaaatgagaaaaaagaggaaatcattttttagtaacatattaatcacagtttttacacatttataagatatatttatctcataaaagataaaggtcgaaacaaaagatcaggatcgaaaggagaattaatcatgagtgaatataatacaaatcaggatggacagtggaagacttccgatcagtggagagcggaggaagcgaacgaccattccaatcctaagaaaaacaaaaatggcggcagaggaaaatatgttgcaaaattagcagcatctgcagtagcttttggattgatcgcagggcttgtgatgcagggagtcacatatggatttagcagagcaggcattggaaatggtgcaacacagcttgcaacaacgaagacaacaagcagcagttcaagtgccagcagtaatgacctctcaggtgtatcaaaaaatgttatgccatcgatcgtatcgatcacaggaaagttcgagacaacaagccagagttggtttggacagacacaaagcagtgaatccgaaggtgttggttcaggtatcatcattggcaagaaagatggtaagattttaatcgttacaaataaccatgtcgtagcagatgccaaatctttatccgtaggatttgtggatggaaagagtgcaagtgcaaccattcgtggtactgacagcgatgcggacttagcggttgtagaagtagatacaaagaacatgaaatcttctaccttaaagaagatcgcagtgatcacattaggagattcctcaaaattacagacaggagaaagagcgatcgcaattggtaatgcattaggatatggacagtctgtcacaggtggttatatcagtgcattaaatcgtcaggtacagttgacagacaagacaatgacactgatccagacagatgcagcgatcaaccctggaaatagtggtggtgctttattaaatagcaaaggtgaattaattggtattaatacagttaaatattcttcagaagatgtagaaggaatgggatatgcgattccaatcaatacagcaaaaccgatcatcaataaactgatcaagaatgaggcaacaagtgagagtgaacaggcatatttaggtgtatcaggtcagacgatcgacagttctatggcaagccagtttgatatgccatctggtgtttatgtacagcaggtgatcaagagttccccagcccagaaagcaggcatcagtgcaggagatgtgatagtatcctttaatggaagcaacgtttctacaatggatggattaaaagaaaagatttcaaacctgaaagcaggcaagaaagttaaagttgttgtaaaacgtcagaatcagatgggtacttatgagaagaagacactgacagttactcttggaaagaaatcagatgcaccaagcacaagcagtaacagcagcaatagcaatagtaataacagcaatagttacaacaataattataataatgaaagttctaacagccagtattatagttttggacagtaaaaccggttgaaaaaagaaccaaagaaagatacaataaaatggaaccctgtgagtaggcagggttccattttttagtcaggagaatatgcctatggttatgatcgaaattgaaaatattaagaagtttatggcaggttttttaggaggaaatctttttgatgatttcttgatgagcgaaggaaaactgtccatgaacatttcgtatgaatttgatggaaagatcttaaaagaattttatgatacagaagaatggaaagagatgaaacaatatccatatgtaacgtgggaagaagagaaagaaaaaatattttctctcgtaaaagggaagaagacaccgttgtcttttcaatttgtgatgatgttaaaaccagatctttctccagagtttcttgccaaatataatcttgcagtccgagaagatgaaatagcaggattatttatcaacattttatacgaccgacagggattaaagtgtacatcaggagtgtccagaaagacatttgtactggataagactttggaagaagcgtgggatcaggaagtaaaagaaagatttttaacaaagtacctgtaaaatttttaacaaacttcgggaacttaaaagaaactttgtttgcatgtttctttttgcgtagatatatgttagaataagtagtaatgaataccagataagaaagttgtaaaaaggagatacgaatatgagttttcatattgtttgtgacagctgtacggatttgacagaagaagatttaaaaaaaggatgttatactttagtacccctgacattattagtggatggagaagaaatcatagatgatgaaacatttgatcaggcagatttcttagcaaaggttgcagcaagtaaagagtctgtgaagtcagcatgccctgcaccagagagttatatggaagcatattccaaggcagatgatatatatgtggtaacattatctgcagaattaagtggatcatacaacagtgcagttttaggaaagaatctatatgaagaagagaacggaacaaagaatattcatgtagtgaattccagaggagccgctacgactcaggttctgatcgcacgtaagctcaacgaatatgcaagtcagggaatgccatttgaagaagtggttgataagattgaagagtatacaacaagtcttagaacatattttgttttggagacactagaagtactaagaaagaacggaagattatcaagactatctgcaacgatcgccggtgcattaaatatcaaaccagtcatgattggtacaagagacggcgtgatccagaaagcagcccaggcaagagggatgaagaaagcactcgcgaagatggtagaacacatgggaagcgaaggaagagatctcacaagaagacaattcgtcatttcacactgcaattgctacgagagagctgtttacgtgaaagaattgatcaagaaacacttacacgcagaagacgttgatattgtagatactaaaggagtcagcagtttgtatgcatgcgatggaggaatcattgtatcatattagattctggttacttgaatagacgtgtatataagtgatagaaataaacatccacttaaattttccaagtttataattgtctacacgatagacttctgatatatgataaaaaataaataaacgatcgggagagcaaaattctaatgctgctctcccgatcgtttatttattttttatcatatatttaaaatctatagttggctaactacaacttaaaattgttacaaaattaacgtgattatacacaaaaatgaaccggattgttacgaaattaacgtacaaattgcacaaaaaacacttgaatttgtcgaaaaatgtgcgtataatgggagtcaatatactgatatagaggaattaaggaggatgagtcatgagtcgtttggaattaaggtctccgaaccaggcacagctggttgtggaaggtctttataaggatttggaacgaagaatcgagtcaagcccgccagggttatgtccggttgatatgtccagagcatttttggagatctgtcatgcacagagctgtggaaagtgtgttccatgtcgtgtaggacttggacagttaaagaatctgatcactgatgttttagatggcaaagcaacgattcgaactttaacagagatacatgaaacagcaaaatccattatggaatctgcagattgtgcgattggctatgaggcagctaatatggtatacaaaggagccattggatttaaagatgattatgtagaacatatcatgtatcatcgatgcttaagtacgttaaagcagccagtgccatgtgtatccagatgtcctgcgagagtggatattccgggatatattgcgttggtacgtgaaggaagatatgaggatgcgatccgtctgatcagaaaagataatccatttccaacaacatgtggatttatctgcgagcatccatgtgaagcattatgccgtagaaatatgatcgatgatgcggtgaatatccgtggattaaaacgtatggcagcagatgcagcaggatatgttgcaccgccagaatgtgcagaatccacagggaagaatattgccgttgtaggtggtggaccaggtggattaagtgcagcatatttcttacagttgatggggcatcaggtaaccgtatatgagatgcttccaaaacttggaggaatgttacgttatggaattccaaactacagactaccaaaagaacgcttagatgatgatattcaggcaatcttagacacaggagtcaaagtagattgtggaaaagctatcggcaaagattattccattgtggatttaaaagaaaaatacgatgctgtactgatcacgatcggtgcaagcacagataagaagttaggattagaaggcgaagatgccaaaggcgttatttcagcggtacagttcttaagaaatgtcggatacggaacacaggaaagcctggaaggaaaagaagttgccgtgatcggtggtggaaatgtttccatggatgcagttcgtacatctgtaagatttggtgcgaagaaagtcagcatcgtatatcgaagaagagttgccgatatgacagcacttccagatgagatttcaggagcagaagcagaaggtgttgagatcaagacattgatggcaccttcaagaatcgagaaagacgaagaaggcaatgtcaaaggtatatgggtaacaccacagatgatcagtaatatcaaaggtggaagagcatctgtaaagccaacaggggaagatgacgtatttatcccatgtcagacactgatcgtagcgatcggtcaggatatcgaatatcagcacttcgaagaagcaggagttcccgtacagagaggaaagatcaacgtagagaaatttggtggattcgaagagatgccaggagtatttgcaggtggagactgtgcgacaggtccatccacagttatttcagcaatcgcagcaggtaaagttatcgcagccaatatcgatgaatatctgggatatcatcatgaaattacagcagatgttgagattccagaacctaagttagaagataaaccagcatgtggaagagttaatcttacagagagagaagctggagagagagttaaagactttgaaggagtcgaaaactgtatgacagagaaagaagcatgccaggaggcaggaagatgtcttcgctgtgaccactttggttatggtattttcaaaggaggtagggatacaaaatggtaaatattacaatagataaccacacgatcgctgtaccttctagaacaacgatcatggaagcagcagcctccattcatataccgattccaaagctttgttatttaaaagatatcaatgaaattggagcgtgcagagtctgcgttgtagaaattgaaggacaggatcatctggtaacatcctgtaataacgtggtagaagaaggaatgacgatctataccaacagtccgaaagtacgcagaaaccgaaaacatacggtagagatgatcctttcccagcacgatgcacaatgtgcaacttgtgtaagaagcggaaattgtacacttcagacggttgctaatgatctgaatattgtagacagcccttataagaaggagatctgtatcgaagaatgggatacaagatatccattggtacgtgatgcaagcaaatgtgtcaaatgtatgcgttgtatacaagtatgcgacaagattcagggaatgcatatctgggatgtatctggaactggagcaagaacaacagttggagtttcagaaaacagagatatcaaaacagcagattgtgcattatgtggacagtgtatcacacattgtccaacaggagcattacgtgaacgagatgatacagacaaattatatcgcgcattagaagataaagatacgatcgtggtagcacagatcgcaccagcagttcgtgctgcatggggagaaagtcttggattatcaagagaagaagcaacagttgagaagatcgtagatgcacttcgaaggatcggtgtagattatgtatttgatacaacattttcagcagatcttacgatcatggaagaagga

SEQ ID NO: 912 - DNA, 9605 bp, unidentified
  source 1..9605: mol_type = unassigned DNA
ttaagttctttccgccatttcccgataccgctgataccgtctgccggcatcttcctctgcctttgcaaacagtgccttcgcttccttaggatactgcgcttcaagcaccgcataccgtaactggcttcttaaaaattccgtaaaggaagcctttggcggtctggaatccagtgcaaacggattttttccttcctttataagctgcggattataccggtacagatgccagtatccggcatctaccgcctgtttcatgcttgccatgctctttcccatgccttccttaataccgtgactgatacaaggtgcataagcaattaacagggaaggaccatcataccgctcggcttccagaatcgcttttatcgtctggtttttatccgcgcccatagcaatctgcgccacatagacatttccgtaggtcatcgccattgcgccgatatctttttttgccgtccttttaccgtcggcggcaaattttgccacggctgctgccggtgtggactttgatgcctgcccgccggtattggagtaaatctccgtatcaaagacaaggacattcacatctgcaccgctggcaaggacatggtctaatccgccgtatccgatatcatatgcccagccatccccgccaacaatccactgtgagcgtttcaccagaaaatccacccgcttctgaatttccgacagtctttgaatctgccgtgacgtccgttctgcctgttccgataccgccaccggtacatctgaccgcgttaccgcctctttcaacccctgcgccagcttctcacgcacctcttctgccgccgcagtgcaggctgtcggattatcacgcactgcaagccagtgttccagcgcttctgatatcccgcttccgctgtctgcaatgccgtcattttccacgccgctttcacactccctgacaaattcttctgccagccgtatcagcgtttcccgctgtttttttgcaccgagcagcataccgtagccgtattccgcattgtcctcaaacagggaatttgcccacgcaggaccttttccgttggcattgcacgtatatgccatggatggtgcggaagcactccagattgaggaacagcctgtcgcattggcaatcaccatgcgttccccgaaaagctgtgtcacaagcttcatatacggggtttcaccacacccgccgcacgcaccggaaaattccatgagcggccgtgcaaactgactgcctttgaccgtttctttggtcatcagctccggtttatccgccaccgcactgacagcaaacgcccagttgtctgcctgttcttttatctgctttgcggcaggctgcatgacaagcgccttttcctttgccgggcagatgtccgcacagttgccgcagcctgtacagtcgagcggactaacctgtatcctgaacgtatgccctgcaagctcttttcctgccgccgccttgctttcaaaattctttggtgcaagcgcctgttccttttcatttaacagaaacggacggatacacgcatgcgggcagatatacgaacactggttgcactggatacagttcttttcaatccattcgggaataaatgccgcaataccgcgtttttcatatgcggttgtaccggcaggaaatgtgccgtccgccagcggataaaaagtgctgacgggaagactgtccccctttgccttttccataggtcttaaaatgttttcaataaattcgggttcctgcacattttcccgttcttctcttgtggactggagcaattcaacaggcacaagctttgtttcccgaaaaccgtattccgccgcctttatatttttttctacaatgtctgcacctttttttccgtatgccgcctgtatggaatttttcagacaggcaagtgctttttcctgcggcagaatcccggtcagatgaaaaaatgcgccctgcataatcatattaatgcggtttcccagtcccagactgtgtgccagctttcccgcatcaatcagatagagccgtgcatttttttcaatcagcgcatgaaccatttctttgggcagttttccgccaatctgctctgcgccatactgcgtattcaatacaaatatgccgttttctttcaagccttctgtcaggtcatatccgctgtttaaaaaggattcattgtggcaggcgatataatccgcttcctgtatcaaatattccgagcggattggtgtatcgccaaaacgtaggtgggaaaccgtaagtccgcccgactttttagaatcatacgaaaaatatccctgcacatagggctttgcatattctccgatgattttaaccgcctgcttgtttgcacccaccgtaccgtccgagcccagcccccagaatttgcactgcataagccctgccggtgtctgtatcggaaaatccggatgaacggcaagcgaatgatgtgtcacatcatcttcaattccgattgtaaaatgatttttcggctgtacgtccgtcaggttgtcaaaggccgcggcaatctgcgcgggtgtcgtatcctttgagccaagtccataccgcccgccgataaccagcggtgcatttttctttccgtaaagcgcgccgcagatatccagatacagcggttctccaagtgcgcccggttcttttgtccggtctaacacggcaatccgctccacgctctccggcagctcctttaaaaagtcgtctgcactgaacgggcggaacagatgcacctgaatcatgccgtatacaccactgttgtcctgcatgatgtcgtcctgcataccggaactgccggtatcacaatccgtatctgcacagttcatctgcggcaggatttcccgtatggtttcacacaccgaacccatggcaatcactacgtactttggatttttagcgccgtaatactggaaaaagcggtatgttctgccggttcttttctcaatctgtgccatatattcttttataattcccggaattttttcataaaaaagattcgcagcttctcttgtctggaaatagatgtccggattctgcgccgttccacgcataaccgggtgatttggtgacagcgcgcgttccctgaacgcctgcaccgcttctttgtcaagcatttcttcataatcttcataggacaatgcttctatccgctggatttcgtgggacgtgcggaagccgtcaaaaaaatggataaagggcagtcttcctttgactgccgataaatgtgctacggcggcaaggtcgcagacttcctgcaccgatgacgatgcgagcatgacacagcctgtctggcgtactgcacagacatcctggtggtcaccaaaaatgctgagtgcctgtgccgccagcgcacgtgcgctcacatgcagtacccccggcagaagttctcccgccattttgtaaagagtcggctgcattaacagcagtccctgtgatgccgtaaatgtagaagcgagtgttcccgactgtaaaatgccatgcattgcgcctgccgctccggcttcggactgcatttccaccacatctgccgtttcatcaaaaatattttttctgccctgtgctgcccagttatccaccgtttctgccatcgccgatgacggtgtaatcggataaatcgccgcagtctgtgtaaatgcgtaggcggtataagcggcggcagtatttccgtctactgtcataattacttttcccataacatcctccatttataaccggctgccgttatccacccattctttggcatggagggcagcattttcatcaatcaccggaacttccgccgccgtatctgtttgttttatatcgttttgggctgtatttttttcacccgctctttcctgtgtactgtgtaaccgtgcattttttctgccgtcaagtgcctgctgaatgtcttctttcatcgcattgcttcctttcgatgtttttatgacattcagtattgcctgtgtgccgccgattattcaccatttacggcttattttctccgtatcctgtggaactgcggctttactgtgatttccgtcactaccagcccctctctttgtgccagtgcaaatgccgccgcttccgccacttcttcgggcagcaggtatgatgcttcttcttctccttcacaaaagtctgcattgcggtacaaatcggtctttgccatatccggctgtatcgtaatcacccgcacaccgtatttgcgcacctcgtcaaacaggctctttgcaaagccggacagccctgcctttgtcgcaccgtatgcacagccgtgcggattggactgcgctgccgtaacagaggatatatttaagactgtccccctgttcttttttaatgttcgcaaaagctgctgtgtcagaatcatcggtgcttccagattcgtgcgcaccattttctgaatctttttcggatttaattcttcatgcagaccgtaataaccgacccccgcattattgaccaacaccgtgacacggtaattcttatcaatctctttaatatgcgcacacaatgcctgcgtgtccgtaatgtcacagaccaccgcatgaaatttttccggctgttctttgcaaaactcctgtgcttctgctctttcaaaatttcttccaaaaccaaaaacttcatacccatttttgacaagcatacggctgagtgccagtccgattccggaagacgatcccgttacaaccgccgtatctgccacatttgccatatccgtgttctgctctattcttcccataaaaatatcctttcttttggcagtcttttttcaagctgtccggtcagaaatccctccatgcgcgtcagcagttccggcggatactgatacacaccgcccacattggtatacggaaactgcaccactgccgcatgcggctctttcttccgcatattttttaaatattcctttgaaatgcggaaacttccgacacttacatccaccagccgtttccagtcaatctgttcgtcaacgcattgaagcatttctgcataaacattttcccagtccttacagtaaatcatcgggtcaaatgccagacgcacggaaaatccccactgtactgcttctgccgcacacgcaatccgcgcctgcatatccggcgtaaaatgttcatatgccgcaatgaccggctgaggcgacatggtaaatgcaaatattacccgctctgtgactgcctgctgtttaaaataatgcacattggcgctttttgtccgcacttcaattgtaagattttcatgttccgtcgtaaaccgcatccactctgccgtataaccgatgaccggttcgaccgcaagcaaatccgtatcatacgacacacacaggtaaacgctgtgctgttctaacaaacgctccacttctgcaaaaatgtcttctaaatttacaaatagcactacatttgcagaaggatacatgcctttcagatagcagtattcgcaatcgtaaatgcagttcatcatgcaggacgtataataaaaccagtgattaccaaagctttggcagaccggcgcgccctgataaatgagattgtttttcttttctgccagaatgagattctgcgttttatgctgtctgaccacgctctgtcccctgcggcagaagacatctttataatgatgtaccggtatcacctgtgcctgcggaaagcgggacagaattttttgtgttctcggatgattccaaaccgcttcttccacataaatatgcgaaaaccgtctgttataacaattcttttctaagctgttcaagacaccgcttcccttcttttttatccttgcacggcagacttcctgccgcataaccgtcccggattatgtcttcataatctatacccgataaccggcagtactttaacagctggaacagttctgcttccatgacggcggaacagtgcatatcatgactaagacgttctgcctgccgctgttcctcttgtgataacacctgctgttcccgcgcataatctctttctgccgctgcaaaccgttccacggcttgcgcaatctgtccaatctgtgcctgcaccagttcacgcacggtatctgcggacattttttcctgtacaccgttatcggatatgatttttataaaaaacatctgatgcggaccgaaaaaatgatgtgccgcctgataccccgccgccgcttccatgtcatataattctatattatataattccgtgtcacataatttcaccggatttgccgtatccgtattttgcggcatatccgctttctgacatacatgttcctctgacacacttgctttccgccgcacgttcattcctgttacaaccgcagcttcgggaaacggatgcctgtataaaatatccgggtaaaatgtcttttgtgtcgcttcttccgtaattttgctgcacagataagccacaccttttttctgttctgcgcctgcgcatatgccgcactgcacaaagatatctcccgctttcacatgtcccattgcacagacagccgcgacaactgtcgcggctgtaatttctcccgttcccgtaattgtaaggcatatctgctgttcctcacagcgatacatttcaaacggaagggaatttatttcttttttcattttgtaatactgcaaaaacggataggcttcatcatacaacgctgtaaataaataaatcatcgcttctcctcatttttgatttcttactaattctgtgccttaacctgttcaaatttttcaagcacttcctgttccggtcctccggttacaaggctgacaacaacaataactgctacagctacgataaatgccggaagcagttcatagattgcaaatacgccgccaagctttgcgatgacatatttccacaggaaaatcatgacaccgccggataccatacccgcaagaacaccgtaacggttcgcacccttccagaataaagataccagtacaaccggtccgaaggttgcgccgaagcctgcccatgcaaaagatacaatatcaaatacagagctgtccgggttgcttgccataaatacaccgataacggcaatcacaacaacggtgattcgtgccactacgatggacattttctcggtaatcttaatgtgaaaacaatcttttacgaggttttgtgatactgcggaagccgccgccaaaagctgtgaatctgccgtagacattgttgccgcgagcataccggcaagaatcagtccgccgataatcgccggaatcgcaccgtatgtactcaataaatgtgccacccgtacaataatcgtttcagaattgctgcctgtcagcacttcaattgcgcctgcctttgacatgctgtaacctacaataccgataaatacaccaattgttaaagaaatcacaacccagacggttgccacacgtcttgaaatctttaatttattttcatcttcaattgccatgaagcgaagcagaatatgcggcataccaaagtagcccaatccccacgccattgtagaagcaatacttaaaaagctgtatttttccgcagattgtgtttctaccgaatagctgtggaagaaatccagataacccggaagctgccttgcattatctattaccacatctaatccacccgcaacattgataccgaataccactacaaccaccagcgcgattgtcataacaatactctgaatcaaatcggttgtacttgctgccagaaatccgcccaatgcacagtagccgacaatgactgctgcactgattatcatggctgccatataattcaccccaaacaggctggaaaacaacttgccacaagctgcaaaaccggaagccgtatacggaatgaagaagataataatcatcagtgccgcaatgcctgtcaggattcctttcttatcaccgaatctttttgcaaagaaatccggcacggtaaatgcctcataggctttggaatacacacggattcttctggctacaatcagccagttgacatatgtaccgattgcaagcccaatggctgtccatgctgcacttgcaacaccggaaagataggcaacacccggaagtcccattaacagccagctgctcatgtctgatgcttccgcactcatcgctgttacaaacgggcctaattttctgccgcccagataaaaatcatcgacgctgttattctgcttcgagcagtaaaaaccaacacctaacattgccgcaagatatataagaatcgcggccataataataatttgtgacataattctacctctttttttcgatttaaaccataaaattataacacaaattaaaatttcagtaaataaatattcgacaaatcaacaaaaaagctgccgcttttcaatctgtgtatctgaatttccgactgtgttctgtccggatttcaggttttgattgatgaaagcagcagcttttctattttattctattactttttatgtattattcgtataatggatacttgtctgttaatcccttaaccagttccatcgcctttgccttatttgcatcgacatcttctacaagcattgcgattgcatctgctacaatatccatatccgcttcattaaaacctcttgttgtaacagctgccgtacccagtctgataccgcttgttacaaacggagaagccgggtcattcggaatcgtgttcttgttacatgtgatgttggctgcatctaagagcttttctacttccttacctgtaactcccttactgattaagtttacaagcattaagtggttgtctgtaccgccggaaacgatatcaaatcctctgttcattaatccgttgcagagtgcctgtgcattctttacaacattttctgcatacgtcttaaagcttgggtctaaggcttcctttaagcagactgccttacctgcgataacatgcatcagcggaccgccctgaataccagggaatacgctcttattgaacttgaacttttcagcagcttctgctgaacttaaaatcataccgcctcttggtccgcgcagtgtcttatgggttgttgttgtaacaacgtctgcatacggaatcgggcttggatgtgcaccacctgctacaagaccggcgatgtgtgccatatctaccattaaatatgcaccgacttcatcacagatttccctaaacttcttgaagtcaataacccttgcatatgcacttgcacctgcaataatcatcttcggcttgcactcttttgcgattcttaatacttcatcatagtcgataaagccttctgcggttacaccgtaaggtacgatgtggaaatacttacctgaaatattaaccggtgaaccgtgtgataaatgtccgccgcagtcaagactcattcccataacggtatctcccggctctaccatagcaaagaatgctgctaagttagcctgtgcaccagaatgtggctgaacattggcatattcacagccgaataacttctttgccctttctattgccagtgtttctactacgtcaacatactcacagccgccgtaatatctctttcccggatatccttctgcatacttattggtaagcggactacccattgctgccataactgccttacttacgagattttctgatgcaatcagctcgatgtggcttctctgtcttgcgagttcgtcatccatcgcttttgcaagatccggatcaaaacttgatacttcattgaatgaatacat

SEQ ID NO: 913 - DNA, 71383 bp, unidentified
  source 1..71383: mol_type = unassigned DNA
tgcaggcagcggaagtgctacaggcggtacaacgcagacagtggagaacatcacaactccatggaaggcagaaaacaaaaacagtacggataccaaaaacagtctgagtgccagaaacgacaagaatgaggagcaggaaacactcgtaggagcaggaaataacacccagatccgcaaagctgtagaagaaattaataagaaagcacacaattcggaagcagtctttggcattcacgatgccacgaaccgcgttatgatcaagattgtggacaaggacacgaaagaagtcttaaaggaatatccaccggagaaaacacttgacatgattgcaaaggtctgggaagtcgcaggacttttagtggacgagaaaatgtaaacaaagacagtacagtctgtctgcagagtatataataacagatgaaaagtttcattagataggagtgataatatgccaatcagaattaccggtttgacatcaggtcttgatacagaagcgattatttcagctcttgtatcttcatacaattacaaaacgaataaatacaaaaaggcacagacaaaattatcctggaaacaggatgcgtggaaatctttgaatacgaagatttacagtctttacagcagcgtcggcaacatgaaattatctaccgcatataatttaaaatcaacaactgtttccgattctaccaaagcaacggtaaaggcaggaaataatgcaccgaccggaacacagcagctaaatattcttaaagttgcacaggcgggttatctgaccggagcacagctttcaagcaagacgacgacatccacaacacttgctgaactaggttatacaggtggagatgcaaagatcaatctgacaaagggtgatggtacaacaaaagagatcacattaacacagggatcgacggttagtgatgtgatcgcttcattaaaagatgccggtgtcagcgcaaactatgatgcgacaaaccatcgtatcttcatcagttccaaagataccggaaaagataacgattttacactgaccggtggaaacacggaaggcgcaagagcactgtatcagttaggactcagtgttggttctgatgcaacaaatgcaacatataagtcgtatacgcagtactatgatgcagatggaaataaattacagcagaatgtagtggatgctattcggacatatcaggatgcacagaaatcttataagacagcatcaggacagaatacaaatctttccgctgcctatggatatgcaacggcatattctgcaatgcaggatgcattaaaaaatagtggcttaactacagatgagcagaagaaacttaccacattacttggaatgagcgcaacacagagagtgaattctgtgatggatgcgtctggaaatgtatacaccaaatcaacgactttggatgatggaagtactatttatgagtacggaagtggaaatgataaaaaatacattcaggcgatcacgacagcaaaagatgatcataacaacatttatactaaaaatgcagatggcaactatgtagattcaggtgcaggtctggtttataaggcaaccggtgagaaggacagtgacggcaatgaatattatgtttacactgctccggatggacaggaagccaaaattgccatgaaaaatgagacaacgaattattatcaggctgatgtagcacaaaaaggatatacggaatacacagataatgatggcattgtttataggtcaaatgaaaaaggaaactataccggatccgatggaaaaacttataagctggaaaacaatacgtttacagaaatcgacagcgatggcaatgcggttagcaatggaagaactgcgacagttacagaagatcagaaaaaagaagttaagacaacttacagtcatggaaatacagcattgtctgatacaacccgtgcagcagatctactgagcaggttcagggaaaaccataaggatacacttaccgatgaagttatttccaaattgacctctaatattgagaaggttaatgtatatgagagtgctgaggattctttggatgacactgatacatattcaaaaaagaatattatctcttccatccagcaggcatatcagagtggcggtgcaagtgcagttacagaggtaactaacaagtatgcagagaaaattaccgagaatcagactgctatgactactgcacagaaaaaaatggatgataattctgttgtttcttcacttgctgcgatggattcgacttcatcggattatacaacagctttggctgcatttgtaaacaaagtacaggattcacagaggatccttgatcagagttctacattaacaaacgcaggtgcaatgaagattgacggctgtgattctgagattaagttaaacggcattacatacaccagttcgctcaatacctactctatcaacggactttccattactgcaatgcaggcaaccggagatggggataccaatgcgatcactgtcacaactgcgaccgatacacaggcgatttatgacaagatcaagagcttcctgacacagtacaactctctgatcaacgaaatgacatcactttacaatgcggatacggcaaagggatatgagcctttgacagatgatgaaaagagtgcaatgtccgattcagaagttgagaagtgggaagaaaaaattaaatcttcactgctccgccgtgatgacagcctggaaagtgtcatgaatctgatgacgaatgccatgagtcagccggttacgattgatggcaagaaatattatctgtcaagttttggaatcaagacactgggtttcttgaatgcaccggagaaccagcagaatgcatatcatattgacggtgatgaggacgatacagcaacttccggaaacgaagataagctgatggcaatgatcaactctgatccggatacggtcgtttcctttatgcagcagcttacgaccaatttatatgatgcgattggaacgaagatgaaatcttcaactttaagcagtatttataaagtatacaatgataaagagatggcatccgaatacagtgattacactaccacgatcaaaaagtgggagcagaaactgcaggatcaggaggacgcgtattacaagaagttctctgcaatggagactgcgttgtctaaattacagagccagacatcttcattatccaacttgttcggaggctgataaaattgctgaaaatggtggtaaaataaaaaagagagtgataaaatttaaatatctgccccacatagatgtgggacagatatttgtgacataaagaaaattatatctaaaattatataacacatggaggaaatgatttatgctggctaacaaaggatacgcagcgtatgcaaacaacaaagttatgactgcatcaccggcggaactgacgctgatgctttatgagggagcgataaagtttgcaaatatcgcaattgaagcgatcgaagcaaaagatattcaaaaggcacatgataatatcatgaaagtagagcgtattattgaggaatttcagagtactttaaatcataaatattcggtggcaaaagattttgatgaggtatataattatctgatgatgcgcttacaggaagcaaacatgaaaaaagataaggaaatcatggaagaagtgttaaaacatttgcgcactatgcgcgatacttggaaagaagttatgaaactggcacatacgcagcagtaaggatatggaaaagatggagagaaaccaatatattccggttatgatacagagcctgaaaaaaaagagtgagatattagataccattatggaattaaatatcaggcagagtgaagaattggaaaatcctgcattagatccggatgattttgataagacagtagaggaaaagtcaaagcagatcgaaaagctggatctattggatgatggttttcaggaactgtttgaccgggtaaaagatgacttgaagaatcatcaggatatttatcgtgatgaaatagcgcagatgcaggattatatccgtaaattaaccagtaaaagtgcaaccatacaggtacaggaagcacgcaataaagatttaatgacaaaaaaatttgcatctgtacataaacaggtcagagaagtccgcaagagccagcgtgttgtaaatcagtattataaaaatatgatgaagacaaactatggcgagccggtgtttacggacaagaagaaatagagatagaaaaaagaaaaaatttcttttttactataaagtatcgggatgaacatccgatatataatacaagtaaacaaagtgatgatgaacattacttgaaaaagttacttggcagtggaacagaatggagcgtacggccgggaaggaaagctgcaaaattaagacgatgcggcatggaagccgcagtaaattcaaggaggaaatgaattatggtagtacagcacaatatgaccgcagcaaatgcgaacagaatgttaggcgttacaacaagcgcacaggcaaaatcttcagaaaaattatcttctggttacagaatcaaccgtgcaggcgatgacgctgctggtttaacaatttctgagaaaatgagaagccagatccgtggattaaacaaagcttctgacaatgctcaggacggtgtatctttaattcaggttgctgagggtgcattatctgagacacactctatcttacagcgtatgaacgagttagctactcaggctgctaacgataccaatacaactgctgatagaggagctatccagtccgaaatcaatcagttaacatcagagatcaacagaatctcttctacaacacagttcaatactcagaacttaattgatggtgatttcacaaagaagagtcttcaggttggatctctttctggacaggctattacagtttctatcaatgcaatgtctgcaggtgcaatcggtgttagtggattacagatgacatctttcgcaagtgctggtaaggctatgagtgcaattcagggagctatctctgttgtatctgcacagcgttcttacttaggtgcattacagaatcgtctggaacacacaatcgctaacttggataacatttctgagaatactcagtctgctgagtcccgtatccgtgatacagatatggctgaagagatggttacatacagcaagaacaatatccttgctcaggcaggacagtctatgcttgctcaggctaaccagtctactcagggtgtattatctctgttacagtaattcaattaaaaaaaacggcagtatattactgccgttttttttttcgcaaaattaatgaaaatatttaagaggaaaatagaggtaatttggattatggatgaaaatgtgttgcaggataaaataagtgaagcagtgttattgttatatcaaaataaagaacaagaagccatgcagcaggtaaaagaattaattgttatgtttcaaaatatgatacaaaatcagacaatagaacatatggaggaaattggaaattttgcaatattaatgcagagggaattactggaaaactatcaaagcctagatatgattgggatagcagactgtttaacagaaaaagcagtgttatttatgaaattctattttcaaaacaagtaaaataacaagatgaatgaggtttataataaatgaatatttttgaaaaaaatgttgctacaatagaaaaaaaatatacattattagcagagaaaataagagaaattgacatagatacgcctactaatagaattgggattgagattgcagcgagtggaatgcagattccatgggtaagatcagaaaacagaatttggagattaaacagcagacaagatccacagaaagcatctgagatttatgcagatcgatatcaaattaggatgtatgggatatattttatttttggtttttcagatggtagaagtgtgcgagaatttttgaagaaatgtgataatacgaaccttattgttatatgtgaacctgatatagaattatttgcaatgaattgtcatttttttgatataagtgatttagtatcagcatctaatgtgcttttctattttatggagcttgaacatgatatggatgcaattttagggaagattgttgaatatacgagaattaggttattggagttttgtattttgccaggatttgatgttttgtataataaacaatgtgaaaggtttatggatggtgtggtggaacgaattcgaaatgagacggttaataagagtaccagtataacatttgagcgcttgattccgcagcatacactctatcatatgaggaatgttatttatcataaaaacataggacaattatattttgcattacaaaattataatttatctaatattccatgtattattgttggggcaggaccatcattggataaaaatataaatctattaaaacaggcacaaggaaaatcatttattattgttgttgatgcggctcttagaactgctttaaaggcgggaattcaacctgatttagtgtgtacagtcgatgcaaaatctccagaacgcttttttgagggtgttgacttggagaatattatttgggcatatacaaggacaacacgtaaatcgattgccgagaaatatggcagagacattttttattatgggacattttatagtaaatggaataaagtattagaagaacagttagggtatccaattccaagtttcccatcagggggctgtgtttcgtctgaagcatttggactggctttatacttgggatttcgaacgatcgtgctaataggacaggatcttgcttttacaggtggtaatacgcatacgaaagaagcaactgtaggaagaccattaagcgatgaaaaatatatccagaaccgcaggattgtagaagtagaaggtatagatggatcaatgctggagacagattttcaaatgtggttttataaacaatggtttgaaaaagttattgaaatgaatcagaatcagataaaggtaattgatgcgacagaaggtggtgcaaaaattggaggtaccattatccagacactagaggagacaattgaaagggagtgtaagcagtatctggatttttatgaaattgaaaagcagattccgctagcttttttacctcaagaacaagaggaacttcttcaaaaattgcgtgatatgaaagatgatgtaagaagctttagaaagaaaataggtaatatgatagtacaacaggaaaatttgcttgcaaatatagaagaagatatgatttcacaagaggatttgctgagaaaattaaaagatattagtgagcagtatgaaaaaattgagcaagagacaattttggagtttatttccatgtatgcacataaagaagaatttgaattaggagatgtaatttatacagaagaggacatgggaccgaaagaactattagaacggggtatacttttgtataaaggctatctgaatggaactaaaatgttagaagaagatattgaagatattctaatgaaagattaaaagataacccaaaagcagtatgaaaagctacttttgggtatctttttatatatgggattgtgatattacatcaagaatcctatgaacacgatgcacaaatgtatgattctcaagcattttaccagtgcagtttgcaatcatttgtgtacgctctttctcatgtgaaagatagtagcgtattttgtcgataaaatcagttttgctttcataaaatgcaaaatcttcaccgggaacaaagaaatcgagcagatcactttgaaaattagtgagcaggaaacctccacttcccatgatgtccatgcagcggagaggaataccagtctgtatacttttgagtgtaatgttgagattgataaggctgtgtttaaataccaatggcatagtatcatagtaatcaaccggtcccatgaaaattgcatttgaaagctcttcggagggtttgtgtgtatataatttaagcggaaaattttccgaagcagactttaacagggaaagtctttcattggacgtgattttgcggcataagaaatagttggcataaacgtaagctgcactttccgtaccatcagacattggctgatacggtatatttttctgcagatcttctaaaataggtggagtcagtaattcttccaaaaaagaacagccgtaaattttctgctgggcatccatgattgcgttcagatagcccctggtaaagtctgatatttgatccagacggtcaaaaaaattatgatcctcgttatagatagaaccgacaaatgaaacgtcagaacgtattttggaaagaatttcatccggacatgtcatcgcctgcagacgctttacatttgctgctaatggcagataatatacagttgggattccagagttatggaatgttaaataggttgctttgtcaaataagaatacataattgcaggagtttatgagagaacaggaatatagagccaccagaggactgtcataaacataagatacatatttgataccgtgtctttggcaattattggataaaatagggaaatagttaaatgaaaaaacaaaatcatagctatttgattcaacagctgcatcaaatgcattgtcaaaatcagtgttttttctgtcatgataagcattgtgaaagaataaatcgcaagtgatgccgcattcaccaaaggcacctaacatatcctgttttgcaaaggcaggtgaatcaagaaataatattttcatatagctccttctgttattccgtaggcgagagaaatcatttgtaatagtcgttcaggataattgtggtatttttttgtggtttcgtaaccattatgggcaatctccatacggtctttttcatgtgtaagataatattctgtctttgtcagtagatcatcttcgctggtataaacatccagatctgtgcctggagtaaaatagtttgttaactctgtctgataattagtcagtaaaaatccaccgcagccaagtacatcaaaaatacgcagtggaagacctgcatgaatggacttggatgtaatgtttaagttgatcttgctataatgaaaaaccagtggcatttcagtcagtgtttttacaaggccgcagtttttgaccggcaaaccagttgtgtcacttcctgtatacaagttcaccggataatgagagccgagtagtttcatgacaagaacacgctccatggcagaaacttttggctctaaataaatacgtgccattgcaatccggtcatcccggcggaagttttccggtggagtatagaagccgggaaggtgtttgcgaaaggtttgtaccatatcatctgtcagtaactcttctaaaaaattatatccatagatttttaactgggctgccatgataccattcagatatccggaaaggtaggatggagcgtttttcagtctgtcataaggagatttttcggtataaagagatcccacaaaggatatttcagaagaaaatctttcaatattatgtaaagaggcatcagagattacgcggttccaacgtgccggattacttgccagtggtaaatgaaaaatatattccggattcctggatgcaaattcatcatactgtgcctgatcaaataagaaaatgcggttccattgatttgtgacagaattagagtagagctccattacgggactgtcaacagtccaacataaatatcttatctggaatatattgcagacttctgagatgaaaggaaaaaaatttacgctaaaaacaaaatcataggatttagaaagcaatttatttttcagaagaacaacgccttctgagggtaataaattcttgttatatatttcggctgtaatttcatctacgtgatttccaagttcctgaaaaccggttatgatatcgggttcgcatatgcttccatagcgataaattagtatattcataagtttctcctaggggggatatcaattgcatttcatatatggttattatatactaaagaaaaggaaagttacaaggtaaaaagatttattcatgaggagacaaggagaaaaatccatgaaaccacttatttcaataataataccatgttttaatacagcggaatatttgccacagtgtatggaatccttggaaaaacaaacgattggatttgataaactacaatttatttttgtggatgacgcatcgacagatgataataagacatggaattgtattgtgcaatttgaacatatacacccgaatgaggtaatagctgtacatttagatgaaaatcgagcacagggtggagcaaagaatattggaataagttatgcggaagcggagtatataggatttgttgattcagatgactggattgagccagatatgtatcaaaaactgtatgaatgtgttgtaaaataccaatgtgatgcagttgattgttgcattattaaaaattttcccaatggaagtgaggaaatttttacaaaaaaaggggatatatatgattattttgaaaaaagcattacagaaggtggtactcattggataaaagattttatgcatgtgggatatggtgggtatttagttactggaatctataaaaagactataataaatcaaaataatattttatttccagaacatttaaaatatgaagataattattggtctgcaattttaagtgtgtacttgaaagatttttatcatttacaagataattgttatcattatagacagagagaaaattcgacggtttatttaagaaatgtatcttatcatttggatcaaatggaaatagaagaattaaaaataaaaacatatcaagaacttgggatttttgaacgttttgaaaaagagatagaggctgactttttacatatatatttttgcaatacattaatcaaattatttgtacagtatgatatgccatcatttgagatttatacaaaaatgataaaaagggtaagagaattgtttccaaattatttaagtaacccgtattttaaaaatgaagaattttatacaactctattaaaattaatcagcaaggatataaatgagatacagtttcaggaaattggtaaaatgattttacaatattgttatgcgtctgaacaactaaaatataatgatacagaaaaggagaatcaggcaatagagcaattattgtgtacaataaaagaatattctttagaagaatattttttcaaatttggagaaatagaaaaaatactaaaaaaaatagacaatatgataactgattctacagaggatcaacaaaaaaatattcttaaaagtatggtaaataatatacaagagatgcctccatggatgcaagttcacatattatctttttgcatgaaagcaagcaaagaagaaaaatatgcagttatattgctggattatattttacaggcatcatatgatgatattggagaatataataaattaagccatttttggcaaataggtacagctcaatttttagatcagagcttacagacatatgctacgaatattagaatggctcaactatacatgcaattgtttcatacatttaaagaaagtttagggttaaaagaacgaaaatatttttcgtggcaagaacgaaataataatcttatattcatattttcagcacaggtgttaggaatggctcatgcaccaacaaaaacattattagatcgttgttatgcactaaaaaagtatttaaaaaaggaaattgttattatcaatacagcaatgcagataccagcgaagggacaggctcctttttatggtttaataaatgcaacatatgcagaaggactaagtgatgtcaaacaacttgaatttaaaggagaaacatttgaatttcatcagtgtgagaataaaatgcctgatatagatattataaaaaatgttattgaaatggttaaaaccagaaaaccagagtttattttggatattggaggaagcgatatttgtgcggatttatgcggattatttgtcccacaaataacaatcagcacggtattttcgagaatagcattttcttgtggagaataccagatggttgataagatattgacagaagaggataaaggtgaattggcaattttaggcgttgatgctcaaaaggtaaagaaaacaccatttacattttcttttaaggagcagacacatcattttacacgtaaacaactggaattatgggaagataaaattgttttacttgttgtgggatggcgcttggatcaggaagtagatgagaactttttggaaatgcttgagcaggtaataaaaaagaatgacaatattgcagttgcgtttatgggtaaatttgatttgtatgatgaaaaaataaagaaatatcctaaattactggaaaacagtaaaaatcttggaatgcaaatggatgcattggcagtggtcgaatgctgcgatttatatgtaaatccgaaaagaaatggtggaggaagttctgtttctgaagcactttataagggacttcctgcagttacactaccgacaggagatgtgtcagtagcagcaggtgaactgttttgggtggaagattattttgcaatgcaggagaaaatactaaaatatgcatcggaagaaaattattataagcaaatgtcagaaaaggcaaaaaaaagagcagaagaactgatgaatgcaaataactttgtgacagtaatacaggatgtggagagtcagatatctacaaatgggtaagttataagtgcagtttatccatttgcaaagacatttcctgatcaagtaaatgggcataatccttccaaatttgtccaagtgattcaaaattggcatttgcattttgaatatggtaatatttttcaaaatccatattgggatcccagggttttggaccacaaaaatgaatgatatgagaaatttttctgactgcttcagcagaaaaatgtttttgagcagcaatagaaatctgaagattatattgctgccagtctaaaattttaactttattgcagtgcattacatttaatatatcctggtcgggacattgtaaaacggaaaggtattttatcattttttcaacgtaggaagtaaaatgatagtctttacgcagttcttttaaattccaaagtataatgccggcgttgaaataagtaaaatctttatcatgtaattcttcgaaattatcccaataatattgtttgaacatacgatttaacagtatatcttcacatgcaatgcaatccattcctgaaaaatcggtttcgtaaaaagtttgaatagactggttaacgataacatcaacatcaagatatagaaaacgatcaagattttgtggtaaaaatacgggcattaaaagtcggaaataagtttccttactccaggcatctgtggttggcagggaattaaatatatttgcgtcgatatttataaaagtgatttcctgtgaccatgcttttgccaaaagagaaagctgttgttcattttttttggatagttcacaatgaaaaatataaacgtggatgcttgcattttgattattgcaaaaaagtgaatacagcatgaccgatgcaattgatacatatttttggtttgtggcaaaacaaacattcattgagcaggtacgtgaaacaggaatatgtctttttattgtagaaaattgcagacagtcatccataaagcataagtaattaccggtagcatattggacgcctaaagctgtagaggcagtagtaccgatatgctctgggatattgattattaaaacagaatccggataacgatcttcccactttagtaatttcggataagtagaatcagtggaagcgtcattgataaatataagctgcaattgattaatatcaacaggctgctgaagaaggcgattgaaataattatcaatagatgtttctatattataacaagggataatgatgctgatgagagggttcataaccttaaatcctttcctgtaatatttctaaaaactgttctgcacgtttagaccaggtgtggagtgtgagtgttttatcctttccgttttgagccattgcctgtctggcagtttcatcggttaacagatgttgtatctgtctggcaagtgcttcaggatgatccagtgaaaatatgattagatcatccgagctgtaatctttatgcagataggtggtgtcgtcagttgccagtacggctccgcatagcatgatattagccatacgttctgtaaacccccctttatgccaggacataatgtttaaagaaatctttgagtgctgccaaatagaaagactttcttctacggtaacattcggatggcagatgaggtttttataatgccgcagaggacagtgataccagctgtcgccaaatacatctaactggattccgttatccaggagcgtgcgtagtacgtgatatctataataatgcataacacaataaatgacacgccgcaggtcataaaagatagtaacaaattcttcatcggaaacgtcaagtccctggtcagaaagaacttcatgaagagcattttcagaagtcatatggggatgttgccgcattttgagcaggaatttattagctaaaaatcgttttggacgctcaagctggtggataagaaaaacttcctgcatataatcgccataagtacctacaaaagtaacgccgtaatgggggtgtgcgatatcaacatcgacgggtggtacaattcctgcaggtgggaataaaatagcatctgtgtgaaagtatttttggacaaaggaaacataatttgcatcgtgtgttaatacggaaaagtctggataatgatgcattaaatgtgatttcatccaaatgggatgatcaaaaataaaattgtatttcggaccgtaaatatattcatgcaggtaatgcagttcatctttcatcttgatagaaaaaagataggattgtacaccaataatagcctgaaaatgctggtctacgtaggaagttaatgtgtttaaatcctctttaccgcaatcaaagtaaacaacttttttgccagtatgttttaatgccttgccaaattgttcagcaaatatatttaaaacattatgacatatatcgtcccctttataaattaatataggacagctgccttcggcaatatgccagtaaatatcatcatgtgcgatcatatgctctaaaaaatggagagtatcttcctgacggttttccagattggcatcgttgagaagagactctattacaagatcgaataaattgttttcgcgaagcagctgactgtatttaccggcaatataacaatctgtctgccagcctgtttctgctgtaaaggcaggatcatcttccagagtgatataagaagaatctgcttcagttgtttcaaaaaaatcaatattccatgtagcagcaatcctcaggaataattcatatttttgcttggctcttaaataggagttaatgccgcccgcctgtataataagttttttctcaactgcaatttctccggtacatagagtttcgtcaagtaataaatcaaaaaaagaaattccaccggaaggcgtttgttttaatatttttttcatatgatgtcctttaagtagtaaggctaatagattaaaaatgaggttggttatcgaaagaagccatgaatacagtcaattacatagtctgatagttccatagatagaccatagaacattggaaggcgtaataaacggtcactctccttagtcgtataaatatcgtcacctacaaactcaccgaattctttcccggctttggaactatgaaggggtacataatgaaatacagcataaattccctttttacgcaagtaatccagcatttgtgtccgctgatctaagtttttcaacttaatgtagaacatgtgagcattatgctggcattcagatggtatgtaagggagttcgaggtattcctgttcttgcagatcgtgaaggccattataataattgtcccacagatcaagtctttttttattaatttgttcagcgacttctaattgtgcataaagatatgctgcattgagttcgctggggagataagaagatcctacatctacccaggaatatttatcaatttctccgcggaagaatttggaacggttggttcccttttcgcgaatgatttcaccgcgttcaatataggcaggattattgatattgatcgtgccaccttcacccatggtgtagtttttggtttcatgaaagctgtaagaaccaaaatcgccaatagtgcccaaatactgccctttataggttgccatcattgcctgggcggcatcttctacaacaagaagattgtgtcttttggcaatgtctatgatggtatccatatcacagcctacacctgcataatggacgggaacgattactttggtgcgttcggtgatagcgtattcaatcaggtttgcatttatattcattgttttaggatctatgtcaacaaatttgacacgcgcacctcttaatacgaaagcatctgcagtggagacaaatgtataggatggcataatgacttcgtcaccgggctgaatgtcacacaggagcgaagccatttccaaaccatgtgtgcaggatgtggttaacataattttaggtgcgtgaaatttcttctctaaccagtcagcacaaagaccacagaattcaccgtcaccattaagccgtttgtttatcaggatagccttttttatgtattccatacttttttctaaatagacaggttcgttaaaattaatcatttggtagtgcctccttaacttttgtaagcatttcagataagaaatctataattttattctcttcattttgagaagcgaaatcaagtgcctgttgatgtttggtattataaaataccttatctgaggcatattgcaaaattgtttcaatcatttgttcctcgtttgttacagtgaatgtctctgatacattgtatgcaacatcacaattaggtaatgttacgacgggaagtcctgcacgtaatgcaattgcactgctccagccaccacctatacgttccggattgagataaaggtttaaagttcgataaatgccaagcagatcaggacaataaccgaggtaatgaattcgatctctatagttggtattttcgaaatgttcttttaattcgtgtacagtacctataacaacaaaatcaattgtagagttgagccgcaaaatggaacatatcaactgacgaaaagaaggagaaacctctgtgtctaagcggttacctaccagacagattagaaacttgtcttccggtaagtttaattctttgcgggtaaagcttttatttgaaatattggtaattgcaggaaaattctgctttatgaatatctgttgctgatgtgaggaaagctcctgtttatataaattttctaatgcattatctagcttagtgcaacggataaaaatatcggcctccgaaataggagctgttgttactgtattgaaattcacaaccgtagtaaataagtgtggtaaatcggcaatgggactatttgcaccaatatttaaaacgaacagtggatttaaatcgtgtatataagttatcatttcacgatagtcatttaatgtactggcgtctaacgggtattggatagcatttaataccgcgtctttataagaaatctgtagatgatgatggtcataagaataaaaaccagttgtaagtgaccataaatatgtaggaagtaatctattacttgcacaggtaaaaatttctatgtcataattaaaatatttatgaagtgcataggcagtttctaaagtcatgagtgttggcgcatgattggtattttgaagtaattgctccgtgataattacaattttattgttatttctgtctttaagtggtatataaggaaatgaaatacctgtatttgcaagaagacaagaaatgttttttcgatgaattttacgcattatattatatggaggcaccttatttagaaagataagctgtgtctctaacataatctgattaaaacagtcaaagtcaccattgtagacatgatcagcgacatcttgttcgaaaccttcaacttttaagtagttaattatataagataaaataagcagagcgtcattatgtttaaattgattttgaatcagatgatggatgtattgttgctctgctgtggtaaaattttcgtatatggaatgcaattgtgcattagtgtcagacaacggaacatggttgggaatttctgtaagatgaagatttttcatacaattttttatgacagtttgaagccattcaacgggggtataatttaacatttgaaactccttgtataaaagtgataagttttgacttaagaggtttaacatatatatcggcagatttaaaaatttatttaatgaatatagattggttgcatagacctaatgaaaattgaaagaatggccgataaaaaatatgatagttatatgcaaatgtataaaatgaaagaggtagaaaaatggagaataaaagagaagaagagatagaagctttggaagtgttagtagattttaatgagcgtctgataaaaaatatgacaattattgtaaaagaactgtcaggtaaaagattggatgatacagataaatttctgagatccatcgtagatgcaattaactgggaaatccaggttatgaatggtaccatggaattgctgaatgaagataaagagcgaattaacaaggaaagttttaatagtgtgattgtatcattgggtggtgcaattgcagaaaaaaatgacaaaaaaatggcagaagagtttgaaaaagcaatacatgtttttgaacagcttggtgaagctgcaaaagaagtagtcagtaaatagaaagcaagcaaaaaaccagtttccagatatggagactggttttcactgtataagagtattaagaaatatactgaatagttcgatataaataaagagatttattgcaggaggcaataattaagtgcaggaggcaaaaagatgttaaatggaaaaacaattcttgtaaccggaggaaccggttcttttggtaatgcgttcactgaatatgtgttgacacattatgatccgaaaaaaattattatatattcccgtgatgaatttaaacaatttaatatggcaaataaatttaaaaagtataaaggaaagttacgtttttttataggggatgtacgcgataaagacagactttaccgagcattcgatggaatagattatgttgttcatgcagcggcattaaaacaggttccggcatgtgagtataatcccatggaagctgtgaagaccaatattaacggcgcaatgaatattgtagatgctgcattggactgcggtgttaaacgtgttgttgcattatctacggataaagcagttaacccgattaatttatatggtggaacaaagcttgtatcagataagttgtttatagcagcaaatgcatattccggtgcaaaggatgtatgcttttctattgtacgttatggaaatgtagcaggaagtagaggatccgtaattccatttttccgtaatattgtggcaaatggagaaacaaaattaccaattacagattataggatgacgagattttggattagtttggacgaaggggtgcagcttgtaattaaggctttaagtgaggcaaaaggaggggaaacgtttatttctaagataccctcttttaaaattactgatttagcacaggcaattttaccaggatgtgaaatgccggaggtaggtattcgtgagggcgaaaagttacatgaggttatggtaacgaaagaagattctgttttaacttatgaatatgagaaacactttattgtatatcctcattttgattggtgggacaagtctagaatacagtctggtggaaaaagagtggaaactggatttgaatatagttcgggaaaaaatacagaatggttgtctgttgagcaacttcaggaaatgttaaaaacagtgcaggaacattagttataggtgagaaaaatggaaaaaagggtatgtattggtaaaagatggattggagaaactgagccagcatatatagttgctgaaatgtctgcaaatcataatatggattttggaagggctaaggcaattattagggcagccgctgatgctggtgcagatgcgataaagattcagacatatacgccggataccataacaatcgatagtgataaaccagcatttcgaacaaagggtatatgggaagggcgaacactctatgaattatatggaaaagcatatactccatgggaatggcagaaggaacttaaagagtatgccatagattgtggaatcaattttttctcgtcaccatttgacttgaccgccatagactttttggaaaatttaaatgtacccgtgtataaagtggcttcatttgaaattaatgatattccgttcataaggaagatcgccaggacaggaaagccgattattatgtcaacgggaattgcatatttggaagatatagatctggcggtaagaacatgtttagaagaaggaaataataaggtcatattattgaaatgtgtctcatcttatccagcaccgtatgagaatatgaatcttagcgtaatacctaatatgaaacagacttttgattgcatttgtggtttgtcagatcactcgatggggagtgaaatcgcagttgcagcagtagcattgggggcaaaggtaatagaaaagcattttactttatgcagagcggatggaggagaagattcacagttttccatggaaccggaagaatttagcgagatggtccgtcagatacgaaatgtggaaaaggcgttgggacatccaacatatgaacttaacaaagagcaggtagagagcagaatttattcgcgttctttatttgttgtaaaagatgtacaagaaggagaaatatttacggaagagaatgtaaaatcaattcgaccgggtattggattgcatacaaaatactgggacgctattttgggacaaaaggctagatgcaatattgagaaggggactcctatggactggaagtatgtggaatgatgatatgaatgatatagaagaagcagtatgtaagaaatataatgtaaaatacggtgtgtttactggaaatggaacgactgcgatgtatttagcatttcaagcattgggaatgcagaaaaaaaaggtcctgtttccgggcatatcgtgtacaaatccagtaaacgccgcactttttgcagactatcaagttgatttttgtgatgtttctataagtgattatacaatctgtgcagacaaaatggaacagatgctacaaacaggagagtatggaattgttgtaccaacacatatatatggacatcggtatcaggaaaataagatccacgagttgtgcgataaatatcatgtagtattatttgaagatgctgcgcaatcattttatacggggaaaatggatgtggcggtagtcagctttggacatacaaaagtttgtgagacaccgttggggggtggaatggctttaaccaatgataaacaactgtatgaaaagatgtgcaaagaaaaattaaaactgacgaaactagattctttaggaatggatttgtttgatcaatatagagagcgatattatgatattttgaagaaaaatgctgactgggaggaacgaaataaaaaactaaaggaattacagttggatagcaaaaagtattttatctttgatctagatgacaataaaaaaataattgaagaattggataagttggaagaaacggtaacacagagaagaaaaaaggttgttttatatcaggaaaagcttaatcataagtatgtgataaaacctttggtaaaggatttatttcgatggagatatacatttctttatgaaggagacagagattatttattgcggagagcacgtaaagagggaattgatataagtagttggtatttgtcacttgccggaatatataaaggcgaacatctgacgaattctgatacgatagagaaaaaagtagtaaatttgtggcttgataaacagcattctacacaacagataatgagtgagattgattgcttaaatcgcattatggaggaggattatgagcgaaacaaatagacagcagtggattaatttacataaaaataaaaggtacaggccaaaatatccgtccgaaatagttgttcagtttgtatttcgaaatttttcaagtgatgggaaaacaaaagtattagatttaggttgtggtgcaggaagacatgtgttttttttgggaaatgaaaatattgtaccatatggacttgatttttcggacgaaggaattgagtatacgaaagaaatgatgattgaaaatggtctgggacagtatgtagacaatatgtcagttggaacattgacacaattaccgtacgcagataattttttcgacgggattatatgctatggtgtactttattatttagcatatgaagatataaaaaaagcagtacaggaaatgagacgggttttaaaaccagcagggaaactacttcttgtcgttagaacgatagaagattatcgttatgatgagaaaaaagaaatagaaacacatacgactattataaatgaggaaagcgaagaaaagtgcgcacatagtgaaaacgggatgttgatgcacttttttgatgaacaggagttaaacacatttttttcagattataaagaaacgaaaatagattacataaaagaaacacatgataatcagaaattttgcgatagtaattatattttgacagcagaaaagtgaggaaatgaaaaatgatactttcaggtcatcaaccaaattattggccatatccgggattaattgggaaaattatgaaatcagattgttttatgtttgtaacaaaggttcagtttgaaaaaaaaagctggcaaaaacggaatagagttcgaacgaaagaaggatggacttatattcaacttccaacgataacaaaagggaaaatggatcagaacatttgtgatgttatgattaataataatgacggatggcgagaaaaaaattataagacgatagaattactgtatggaaaagcaccgttttataaagagtataaggactttttggatgatttatatactaagcaatgggaaaaattaatggatattgacatatatattatgcaatatttatttaaagaattagatgttaagacaaaaattttatacgatagggattatgagttcaaagggaaaaaaacggatatgcttgtagatatgtgtaaacagacggggtgtgatacatatttgtctaatctgggaagtgctgcatatgtggatatttcatgttttacagataatggattaaatcatcaatacataaattatacgggtaccccatatcggcagcaattctctggttttgaagatggattgacaattctggatatgcttatgaattgtggtacagaaaagacaaaagaaattttattagatgattctaattacaaatttagtgaattgaataaagaactgtaggtgaagatatgcaaaaaagtattgccattattacagcgcgtggtggaagcaaacgcataccaaaaaaaaatataaaggaattttgtggaaaaccaattatagcatatgcgattgaagcagcaaaaaaaagcggtatttttaaagaagttatggtttcaacagatagtttggaaattgctcaggttgcgcgcaaatatggagcggtagtaccgtttatgagaagccaaaaaaattcggatgattttgcaactacagaagatgttataatggaagttgtaagtgagtatcataagcggggggaagaatttgattatgtgtgttgtctgtacccgacaacgccttttatatcgggaaaaatattaaaagaagccgtagacttgatggaaaaaaaacgacctgcagttgttattccagttgtgcaattttcttacccaccgcaacgttgttttataatagataatgatggatatgcaaagtttaagtatccacaatatgtgagaacacgatcgcaggatttagaaaaggaatatcatgatgcaggtcaattctatatctacaatgttgaaaaattattcgcccttaaaggctgtattgaaactgattttgtgccaatcattttaccggagatgtgtgtgcaggatatagacacattgagtgactggaagttggcggaattaaaatataagttattaaaggatgaaaaatagcgtgttatatattagaacagatgcaaacgaagttattgccactggacatgttatgcgttgtcttacgattgcagaggaatatcgaaaaaaggctggagaagtatgttttattgtttcagatgaaaattcagctaaaatgattgatagaagacgatacaatgtgatagtgacaaatacaaaatggaatagtgtagatattgaatctgaatataagttgttaaaacataaaatacgtaggtcagactggcttttgatagattcatatcatatatattcttcatatgcggcgagaataaaacaattattaaatgtggtcgtatttgatgatatgttttcagaaaaaaaaattgctgatgtgataattaattataatgtgttttaccgaagatttgattatctgaatcgttataaacatgaaaaatgtattttgctactaggagagaaatatgtcccattgcgtaaacaatttcgtgaaatagaaccagaaattaatgttcgaaaatatgaacgcccgaaaattcttctaatgtgcggcggagcggataaacccaatttaatatatgaaacgttgcaatatttaaaggagaataagccagaattatttttacaagttgattggaaaattgttgtaggaagtttttattctaatattgatcaattaaatttgttaatacagggatatttaaatattgaattgttgtgtaatgtggaaaatatggcagcactgatgaacaaatgtgatctatgtgttactgctgcaagtacagtattatatgagtgctgtgcaatgttacttccaacgctgttttttgttgtgtcagaggatcagaaatatgatgctgaagttttctcaaaagataatatgttattatattgtggaaactatatggacggcaagaaagaagcattaaagcgaatggaggttgtgttgagcaaaattgtcaaaaacagggaacagcaatataaaatgaaacagatgatgaagaagtttgtggatgcgaaaggtgcagaaagaattgtggcagcattgatgggagaaaaaaatgagtgaatttataatgaaaagaaaagataattattggtgggaggtaacattggtaaaattaggtaaaccatttattatctttctgacacatacatcagttacacctaatatgattacgttgataaatttgattattatgttacctttgatatgtctaatggcatgggaaaaatctttttttgcactcgctttgatggttcagatttatatgtttttagatatagttgatggtaatttggcaagaaataaacatatgcaatcagaattggggaaaaaattggatgttatttcagatacacttttttatacggtggggtattttttcattggattaggagtagaggcgcctataggagttgttttgatggccattttggtacaacatttctatggaatgatagctacatattatattgtacctaaaataagaaagttagaagtatttaaacatactagattgaaaaaattttttatagatagagacattttgtttggtatggatgcatctttggaaacattgattacatcagttttacttttaacgtcaatacgtaaatatatatatatagtttgtcctgttctttggatgttagatttaatttatagattatatgaattgaattgggttaatagatataatgtgaaaggttaaattgagaggcggtgggagaagaatgaaaaaaaatgctattattttggcggctggcaaatcttcaaattttgcaccatttacatatgaaaaacccaagggaatattctgtgtaaaaggtgaaatccttatagaacgccagattaaacagctacatgaagcaggtgtagaagaaatttatattgtagttggctatatgaaagaaaagtttttctatctggaagaaaaatatggtgtaagattgcttgtaaataatacatttgcggaaaagggaaatctttattcactatatgtagcgagagaacatctagccaatacatatatatgttgtgcagatcattattttgtagaaaatccattcttggaagaaaatccgctaaatttgtcatatagagcatgtacatattatcagggcaaattcagagagtttggtgtagattattcggatgcaatggttataacggatgtatcagttggcggaatggatcagatggcaatggttggtcatgcttattttaatgctacattttcagctaagtttaaaagatgtatggaacaggaaattgacacgttcagagtggcagatatgttttgggaagagttttacgcaaaacatttaaaggaaatgacactgtatttaaagaaatttgacaatcaaagtattcttgaatttgaaggaatagaagacttaagacagtttgattcagaatttttgcttaatgttgattcagatatcatatcaaatatatgttccgtcttaaaatgtaatccgaatgatattaatgatatcgatgtcattaatgctggactgacaaatgtttcgtttgggtttaagataaatggagagggatatgtatataggcatccaggaggaacagcaggaaatcttatagatagacgagcggagctttttgcacaaaatgctgcatatgcaatgggaatagataaatcggtaatatatatggatatatctggttggaaaatttcccattatgttaagaatgctgcatattgcgattttgaaggttcagataaacaattagaaactgctatgaattatttacataagcttcataaggtaaaagtagattcggacataaagatttttgataatgttgcagagggaaaaaaattgatgcagatagcatctctgacaaaaggaaatttgtttcgggaatttcatgagataattataaagatagaaaaattatattttgaaatacagaaagatgctgaaagattaggatatcaaagggttttatgtcataatgatacatatgcaccaaactatttgagggatgatgaggagaatgtatatttgattgattgggaatatgcaggacttaactatgctgcaaatgatattggatgtatattatgcagatatgactggtcagatgaacaaatagcaagatacttaaaggcgtatatgggaagaacacttacagcggaagaacatagatttttttatgcgtttattccaatttcagcattctattggttttgttggggattgtataaaggaagcgttggcgatgatgacagctttttctttttaccatcgtatagaaacttggtaagatttgtggataaagcgttgaatagctatggaattatggaaatttagaggaatactggcatgattacagcgatgatattggcaggtggagtcggttcacgagtaggtgctgaacgaccaaaacagtttgtagaagtatgtggaaaacctatattggcatatacaatagaaatctatcagaaaaatccacaggtagaagcgatagaaatagtttgtcatgcagattggattgattatttgaaagaaatgatagaaaactatgatttatcgaaagtaaagtggattacgcacggtggggaaacatttcagaaatccgtgattaatggtatggagtatctgaaagataaattagatgtagatgatattgttatgatacattatggtgcggcaccgttttccagccagcagattgtgacggatggaataaaagtctgtcaggaacatggaatgtcagtttcatgtacaccctgttttcaattaatgggttctgatgatgggaatggagaaagcaaacggtggatcaacagagacaaacaggtacagatttgttgcccacaatcattcaaatatggttatttggcagatatttataagagggcagaagaaaaaggattgcttgagactgttgagcctcatacaacaagtctgatgtatgctctgggagatacaatttatcaatcctatggaaatcaaacaaatataaagattacgacaaaggaagatttggaactgtttgaaggatatgtattattgcaagagaaaagagaaagaacacaataataaaagtatataattatttgttttttgctaaagatatataataaaacgaacgatatatattttaggaatatagtctcaaggaagaggtggagaaaacatggtagttgctcataatatggctgcaattggacagagccgacagttgcggtataatgtaaaaaaaatggaggattcatccaagaaactctcgagtggttataaaatcattacggcaaacgatgatgcggtaggattacagataacggaaactatgcgccatcagattaaaggattgaataaggcttcgagaaatgcacaggatggaatcagtatgttacagacggcagatgcggccttacaagagacgcaggatgtactggatcgtatggtggaattgacaactcaggctgcaaatgatacaaatacagaagcagaccgtgatgcaataaaggatgagatagatcagctgaataaagaagttgatcgtattgcatatacaacaaactttaatcagcagtatatgttagctgctggaacaccacaggctgatccgggatattttaaaatacagacgggtgcacttgcaggtcagagtgtgacaattcgctttgtaaatgcgggcaaggaaaatcttggtgtagataaagtagatgtttcatcccatgcgaaagcagcagagtcaattaagactgttcaggatgcgattgaaaaggctgcattgtggcgtgatgattttggcggtcagttggaacagttagaacatgcaacgcgcaatacagataatacatctgaaaatacacaaagcgcagagtcacttcgtagagataccgatatgaatatggaattggtacttcattctacaaaccggattctggtgaatgcgtctcagagtattctggcacagtataataatgatgcgaaagctgttctcgaggttttgaagtaaaatttgtaaagaataatgtcctataaacggtagaaaacaagagcttttctaccgtttctttttaagagtaaaataaatacggggaaataaacaggaggcaatgatgataccatacggaagacagacaatagaagaggatgatatacaggaggttattaaggtattacgatccgattacctgacgacagggcctaagatcgcagagtttgaaaaactggtggcagattatgttggggcaaaatatgcagtggcgatttcaaatgatacagctgcattacatgctgcatgtcatgcggcaggaatcggaccgggagatgaagtgatcactacaccgatcacatttgcagcgtcatcaaactgtgtattgtattgtggtggaacacctgtattcgcggatgttgatcccaaaacttataatattgatccggaagatataaaacgaaagatcacggataagacaaaggcgatcataccggttcatcttgcaggacagccatgtgatatggatgcaatccatgcgatcgcgaaagaacatcatctggttgtcattgaggatgctgcacatgcgcttggttcggaatataaaggaaaaatgatcggatcaatgtcagatatgacaacgtttagttttcatccggtaaaaccgattacaaccggtgaaggcggtatgatcgtaacgaatgataaaacattatacaagaaactggtattgttccgcagtcatggaattacaagagatgaaagccagatgacccgtaatgagggatcttggttttatcagcagatcgatctgggatataattatcgtatgacggatatccagtgtgcattgggctgtacacagatgaaaaagctggatcgttttattgcacgcagacgtgagattgtagaacgatataatgaggcttttgcggactgtgaaaatattgttactccatatcagcttccagatacaaagagcggctggcatctttatattatccaagtgaaaaataaagaacgcaaagaagtattcgaggcattgcgtgcagaaggaattggagtgaatgtacactatattccggtttactatcatccgtattatcaggaacacggatttaaggatgtacattgtccggttgcggaagaactgtatacacatattatcagtctgccgattttcccgaaactgacggatgaacagcaggatgaagtgattgataaagtgaagaaagttgcggaaaattgatgaatacagggagaaatatgaaattattattttttcaatggcattcttttatgaataagggaatcgagcgggggttgaaggaactggaaatcccatatgatacatttttttatcagtttaacgactgggaaaaggatgatgcttttttagagcagttccgggcttatttaaaggcgggagcttatacggacgtgctgtcggtcaatttttcgccattgatttcgatgttgtgtgaggaactcggaatcgtatacacggcatgggtatatgattcaccgcttcacatccgaaatctggagagccttaagaattcctgcaaccggattttattttttgacaggggacaggcagagcaacaccgcaaagatggagtcaatgcgatgcatctgccgcttgcggtggacacagaggtttttcgtattaatgcatcgaaatgggaaaaagaagattatcggacggatatctctttagttggaaaactttaccagacagagtatgcatattttacgacaccgctgcagggctatacaaagggatatctggaagggatcgtaaatgcgcagggcaaggtgtacgggggttgtctgataccggaattaattaccgatgaactgttggcgcagatgaatgccgattatgcgaaggtggcaaaggacggctttacgatgggcagaagagaacttgaatttatgcttgcctgcgagacgactggaagggaacgttatatggcattggcacttttatctgcacattatccggtggatttgtattcaacggatgtggataaaaggttagaaaaagtaagatatcgtggatacgcagactattattcacagatgccgcttgcattttcccagagtaaaatcaacctcaatatttcgctcaagacaatccgtaccggaataccgcttcgtgccattgatgtgcttggctgcggtggatttgtgctttcaaattatcaggaagagctttttgattactttaacgtcggaaaagaattggttgtatatgagaatatagaggacttgttttatcaggcaaaatattatctcgaacatgaggacgagagagaacaaattgcacttgcgggatttgagcgtgtgaagcgtgattttacattccgggaacgacttgaaaaaatgtatcccaaaaactaaaattttatgaaataaattttaaaaagaggaaaagaatggaaatttcagaacagttggccagacaattattagaatctattgaaaacggatttataaacgaaacgacgatatcaaaatttcgatattggcatctggatgcggtcatgaacatgacaaaacatatggagcatggcagagagaccttttgggaaatcaaatcttatttggagcagatgaatattgaaaggcttcaaaaacaggaaaaaataattgttggttttattacgtcatcgtcacaggattggattggagatgaattatactggctgttagaaaaatcagaaaagtttgaaccgtatatttttgtgatggcaacatatttaaatggcagggggaaacctttaaaaagggattattgtgagaccataaatttctttcaaaaacgtggattgcgagtaaaacagacctttgatgtggagacagagcacttatacacctgggaagagatagggatgaaaccgcagctttgtatttggctgacaccttgggcagatggttttaaagaacattttcatttgttatattattctctggatacgattcatgcatatatcccatatggttttatgatagcagggagtgaggacggaaggtttatcgaagcacagtataaccagctgatacataatattgcatggaaaatttttgaggaaaataaaattgcagtagaattggcagataggtattcttttgtgggaaacagaaataccgtttatcttggatatcccaaaatggatggtttttatggagaacgtgaaaattgtacaatttgggaccaattgaaagaaaaggttggaaatccaaatgcaaaatgcgtgatttatgcaccacatcatacacttgacaaagataaagaacccgtgtgcttttcgacttttgcgcagaatgggaaaaagatgctggaatttgcacgcaaatatcacaaagatacggtatgggtatttaaaccgcatccattattaaggaccaagttgattcgtaacgggatattaaaggatgagagtgagtggaagagttatataaaacaatgggaagatttaggaaatgcagcgtatgtaaatgatggaatgtatcaggacatgatgtgtaaatcagatgcaatgatattggatagcatatcttttttagctgagtatatgtatacaagccacccgatgttgtttttgcagagaaaagaacagcgctttaatgagttcgggaaactggtagtggaacagttatatcaggcagaaggaaatgattttgcggcaatagacgaattccttcaaaaagtagttttgaaaggaaaagacgaacagttagagaagagaaaaaaattttttcttgaaaaccttgattataaaaatatgaattataaaaacgcaaatgcagcacaaagtatatattgtgaaatagagaacacgtttgggagaatgacagaatgaaaaagacggcggaacaattagaagcttacaggatagcaagacaggaattacagaatacattaagtggtgatgcggaaaaagactgccaaatctataacgatctatggtatttggattttatggagaagggtggaattatttctgaagatggagggtttttgacggactcagaagaattgattaagaaggtaaaaacaagatatcagaatgacagtatgactgcgtggtggacgaaacaaaagaattggactgtaaagaatggtgtaaatggtttccttgatgaacaaataaggaaatggttagaggagatgtatttgccttatatcgatgaaacacagattgtaggagatctggcctgtgcaagtgggcaatggagtttcctgatagcaaagaaggcaaaacaagtatatgcatttgattattcaaagagtatgatagattttgcaaaagataaagcagaaaagttgaatattaataatatagaatttgtgcaggcagatgctataacattaaaatttgatcggcaatatgataatttcatgatgttaggattgctgacttgtataaataatgaggaagaggcagaacatattatacgaaatgtatatgaagctttaaaacaaggggcaagattaattgtcagagatagtcttactaaaactgattacagagagatttttttatataattttatcagtggatatcaggcagtatacagaaacgtggagtgctacagagagttatttgtaagatgcggttttgaaatcgaatcagaaattgcattaaaagaagaagttacggatggaattgaatatgtaaattatggtgcaatattaaagaaagcatgattaagatgtcacaagagggtaggaaattttatgcaggtaataaaatatgcgttccagcagcatggtgatgacaggggaatgttggtcgcactggaagaatataaagatattccgtttgaaattaaacgtgtttactatatgtatgatacgaaaaaagatgtacatagagggtttcatgcacataagtcgctggaacaaattttaatctgtattcatggttcctgtaaggtactgttggataacggaacggaaaagaagattgtctcgttggaaaaaccatatgaaggtttgtatattgcaaataacatgtggcgtgaaatgtatgacttttctgaggatgcagtcctgatggtactggcatcagaatactataaggaagaagactatatcagggattacaatgaattcctgcggatggtcggggtagagaaataagatgaaaattccatttgtatcatttgaaccgatgcaccgggaagtggatgcagaactgaaaaacgcactcctttcggtatatgaggctggctggtttatccgtggcgagcgggtaacacagtttgaaaaggaatttgcggcatattgtggagcaaaatattgtattggatgtggaaatgggctagatgctctttttctgatattaaaggcatatggaattggtgcaggtgatgaggtaattgtaccatcacacacgtttattgcaacagcccttgcagtgacatatgctggggcagctcctgtttttgtggaaccggatatggaaagttatacgttaaatccggcacagatagaggaggcagttacaccatacaccaaggcaatcattgccgtgcagttatatgggcaggcagccgatatggatgcaattaatgtaatcgcaaaaaagcatgggctgaaggtgattgaggacgcagcgcaggcacacggtgccttatataaaaataaaaggattggaaatcttgcggatgctgcaggttttagtttctacccgggaaagaatcttggtgcatttggggatggtggagctgttgtgacatctgacaaagagcttgcggataaagtacgcgcattggcaaattatggatcggattataagtatcatcatatctatcagggaaataattcaagactggatgagatacaggcggcagtactttccgtaaaattaaaaaatctggatcgatggaatgaaaatcgtcgggatattgcgcagagatatttaacagaaataaaaaatgaaaatctgattttgcccgttgaaatgccgtataattctcatgtatggcacatttttgcggttcgtgcaaagaagagaaacaggctggaagcatatctgaacgagaatgggattgggacaaccattcattatccaactgcgatatacaggcagaaggcatacgagaatcttggactgctggaggggagttatccacttgcggaagagattgcagcaacagagcttagtataccgatgtattatggaatgaccgaagaacagattaggtatgtaattgacacattaaaccgatggagataaacggaggaattatggaaccattagtaacagtattgataagcagttataaccatgcaaaatatatagcagcaggactggaaagtgttttaaaccaatcttataaaaatttacagattattgtggtggatgatggctcacaagatgacacgttggatcttcttcagtcttatgaagatgagagactgaccgttttaacggcagaaaggaacacagcattccgattgtatgatacggcgaaaagtaaaatacagggaaagtatgttgcagaacttgcatcagatgatcgatggacattggataaaatacaaaaacaggttgattttctggaaaatcacggagaaattggactggtattttcatggtgtgaagttttgacaccggatttaaaggagaaagagcgactagagagtgtatttaatgttcagaataaggaaatgcatgaatggttctgggaattgattgttgagggcaataaatttaacaatccatccgttatgtttcggacagaagtttttcagaaatatgatggctatcgttttcaatacaggcagttacaggatttggaattgtggcttaggatgttgccgaacgaaaatgtttatattatgccggaaaaactgacatattacacatggcatccgaaagataatgttggaaatatgagtgcagatacaatggagaatatggtgcgcttggatatggaaatgtcatatattctttttgatgtttttcggaatatagacggggccttttttaaccgtgcatttgcaagggaactagaaggtgatgtgtcactggaaaaagcggatataatatgcaaaaaatttttgatattggcatgtttcaattcatctgtttttcaggatgcggcaattttattttaccatgaatgtatcagagaagatggtgtattggatactcttgaacataaatatggattttcaagggcggatttttggaaatatgaaggggaaaagggaagtgttcatgatatgagggcatatagggatttagcggttaagtggagagaaaattattataactgccagagataacaggagatatggattggaatgagagatatacaaagatacgcggataactatgggcagataaaggatcctgccaacaaatttgaaacgaaatatcaagtgaattaccgtagaaaaaaagtattggaagaattaaaaaagtatccgtacgataagattttagaggttggttgtggacttgattcctacatgaattatatagatgattttaaggaagctgtcattgtagaaccaagcacgagatttgctgataaggcacgagatgatttaaaaggggataaccgggttaccgttatttgtgcaactcttcaggatgccgtagaaaagttgaagaataaaagatttgattttattattatcagtagtttattgcatgaattagagcagccggttgaatttttaagaaaaataaatgaactgtgtctgagagatcatacgattgtgcatgtaaatacaccgaatgcagaatcaatgcaccgcttgctggcaatggagagtgggttgattcatgatacatgtgaaccttcagcccgaaatgaaaagtttcaacagcatacggttttttcaatggataaattaaaatatgcagttcttaagtcgtgtgaggacggacagatagaagtgcttaatgctggaagttatttcatgaaaccattttcacacagccagatgatgcagtgcttagagcagggaattatcacagaacaggtcattgaagggttggatagaatggtaaaatattttccagagaacgggtcagaaatatttataaattatcgaataaagtaggaaagcgtgataaagtggtattagaaattgttgatggaaaaacatatcagaaaataataggtgattataaatatttttataatagtatggcatttcatgaactgaacaggaaaaaagcggatgaggtgttgttttttttgttcaaaggaaaacattataaaatgggcattgctggaggagtgattaatcaagaactgcaattcccttattcggcgccctttgctatgccagagattataagagaaagtcggttaggggagatggaagaagcgatacagttactggatacatatgcgcagacaaataaaatggcgtctgtaacttttcgacttcctccttttttttatgatgaatctaatatatcaaagatgcagacagtcttgttaaatgaggaatatcagatacaggaatgtgatttgaattttcaattttatatgaacaatcaggtgcagtatatagatatattgcagagaaatgcaaaaaaaaaccttcaaagagcacagggagcagactttgattttgttaagtgtattggagaaatagaaaaaaagcgtgcatatcaggtgattcaaaaaaacagatgtagaaaagggtatccgcttagaatgagctgggaacaggtccaggaaacaatccggattacggaacatgatatatttttactcaataaaaagggaaaagacgttgctgctgcaattgttttctgtgtaaataaagatgtgtatcaagtgatatactggggagatattgatggatattctgaagagcgtccaatgaatttacttgcagaaaatgtttatgagttttatcagcagaagggaatacatgtattggatattggtccttcgacagaaaatggtgtgccaaactatggattgtgtgatttcaaagaaagcatagggtgtcagtgctcatcaaagtatactttaaaaaaattttttcaataaaagaaaagagagttgaaactggagaaaatatattatgcgagttaaagagaaaatagaaaatattgattataatgagacaaaacaattttttaaaaacagggctggtaagtttagaacagataatccatatgcggtaacaatgtatcaggatcataatgaaaagctggtaagagaacgaaatgaaaaggaagtgcagaaattaaaaccactacttgaactgaatgaacaatcccgaatattggatattggatgtggaataggtagatggggagatgcaatttcggagaaaattgaggaatattgtggactggattttagtagtgacttgataaaaattgcgaaaagcagaagtggaaaatcaaattatttcttctatgaaagtgcagtgacagaaatagagagagttttgtcggaaaataaaaagcaaaattataatacgattttgctgatgggaatattaatgtacataaatgatgaagatatggatatttttcttgaacagttggaacatcaatgtatggagcaaacaagaatttgcatccgggagcctattggagtgggggagcgtcttacgctaaaagattttttctcagaagatttaaatgataattataatgcaatttatcggacaagagacgaactggttcatttctttgaaaaagaattattgcagaaaggttttcagattgagcaagaaggttttttgtttcaggaaaaggggttgaataatcgcaaggaaacaacacaatattattttattctgcaacgatagtgacctgtaagaaaaatatttggaaaatgcagggaaaaagacgtgtattctgaaaaattgaaattattggtggctttgaggcttatgctgggttgaatttctagaggaagtaattattaacttaaagagagatttacggtaaaatgaacagcgggagaaaaggtatgagagagtatattttcgtatttaatttggatgcaatagtgcaagataaaagcggtgaaaaaaattgtggtatattggagtttatcaacgataatgcacaacgctgttattttaagcaagattgcatagacaaaaatcgggaaaaaacggttgttgcaattagtaattctgaatctgacattgcaatgatgaaaaaggcagatattagaattggatatggtggaataaaggaagttatgcctgagatactttcgattgtcgattatgtaatttatgaagaaaaaaaattggtagattttttgggacgattattgcaggaagaaaaaatggcattatcaaggactgtgataataagttgtgctggaatgggaaatcgcctcggattaggaacaacaaaggcattattggaagtggatggaaaaacattgattgtgagatatcttgaacaactacaggaagaaaaagatgttcgtattgtagtaggatatcaggcatcttctatgatagaagcagtgctaaagtatagaagtgatgtgacatttgtatttaatcatgagtatcagaatactgggacaggtgcaagtgttgtacttgcagcaaaatatgcaaatgaatatgtgttgtctctggatggagatttgattgtccatcctgaagatatgaaaaagattttggcgtgtcaaaaagaatttgttggagggtgcactaagatatcggatgatccttggatgcttcagacttatatgcaggaaggaatggaatatgttcatgccttttcaaagaacgatggaaattatgagtggaacggggtgacacaagtgagaagtgacagattgcgtgatggaacggggcatgtttttcaattgatagagccacatcttccaattccatttatgatggtaagaaccagagaaattgatacatccaacgattataaagaggcattaaggtgggtaaaaaacggattctgttaaaaaaatatacaattaattgtagaaatatatattttatgaaagaaaatgtatgaattataataaaatcgcatttatcatatgcaccaataatcagttatattttaatgagtgtcagtattatatccataatttaatattgccggaggggatggaacttgatgtcattggaataacgggagcaccatctatgtgtgcagggtacaatgccggaatgcaaagcagtgatgcaaaatataaggtatatttgcatcaggatgtgtttattcgggagcctaaatttataatatatctgttagagcggtttcaaaaggatatacatattggaatgattggaatgattggcgggaatggtatgcctaaaacaggtgtaacttatcgtgcctggaatgttggaaaggtggattgccgggacccggatatggcatattatatgtatggtgccagggatatgaaaaaaggggatacgatcgttgaggcggtagatggtcttttgatagcaacacaatacgatattccgtggcgggaagacctgtttacacattttgatttttatgatgtatcacagtcttttgaaatgcgcagggcagaatataaagtgttagttccttatcaggaaacaccttgggtaattcatgacagcagctttgcaaaattgacttattatgatgaagcacgaaaaatttgcttgaaagaatatccggaatatctgtatgcggatggaggctttgagtttacctatgataaggaatggaacgatttgagcgatctgcttgcggatcagataaaagcgttgattgctgcacatgaatggaaacaggtaggacagattatagattcctatcgtggagccggaagaaaaagcagtgagatagaaatacttggcattttatatgatatttatgaaaaagaaaaaactgcgggagtaaaaaatagtttttttatgggatgtcgggactatcaggaaatatatgaaaaatatatgtctgtccggtttctgatgagacgaatggaattaggactgcagccagtatcgtatcaggaattatgggatgcaatagctgcagaacaaatttcatatgaaacactggaggagttaatacttcgggcaacagtcgataaaaacaaagtattggagcgattgataaaaatatataagattgctggaatgaagaatcaagttactgcatgtgagaaattatttaagattatagaaagacgaacgatttcaatcacttatagtagaatgcaataataatttacgatgaagtatttagaaataagataagaatggagagtgggcaatgtataaagtagcaattatttataccggtgtagcttatgagagtgaggtaaataatataaggttacaggagttattgggaaaattaaagttattggaattggaacacctgatatttatgcgaaaaatatggatggatatccagtgacttctatagaaaatattttgaatcaaaactgggattaccttttagttgcaggtcaggaacaaaattttgcagaaataaaaaaattgttggtaagcgtgggggtggaggaagacaggatcttttcaataaagatattttctttaccaatgtttgattttgagcaatatgtaaaatttattaatgaaaaggtaagtattgtatcaaatcattgttggggtgggtttacataccattctttgaaagcagaatttttatcgccgtttattaatatgtttattccacaggaagattatataaggctgttggaggattttgatgattacatgaaagaagaaataaagtattataaaaatgaatatgaacctaatttgcagagtgaatatccagtggctttgttaggggatgtggaacttcattttaatcattataaatcatttgaagaagcgaaagaaaaatgggatcagagaaaacaacgcattaacaggaataatttgtttgttgaaatgcagacagaaaatgaagaattggcaaaacggtttaacaaattaccatataataaaaaaattgtatttgttccatttgaaacacagttagaatcagcagtaagcctgaaaaaaatgaatgaaaattatacgggggcattttatgcgagcgtaaattatttggcaatggggcgacagacattttataatgttttgaatttattgaatggagaaagagatttttatagatttgattaaatggtaatgttaaggagaagtattgttattatatcagtcaatgaatggcattgaggtgaatgtatggaaaagaatctagctattataggagcaagttatttacagttacctttgattcaaaaggcaaagaaagtgggatatataacacatgtatttgcatggaaaataaatgatgtgggtgaaagggcagcagactatttttatccgatcagtattgttgaaaaagaatgcatcctaaaaaagtgccgtgaaattggaatatgtgggatatgcagtatagcatcggatcttgctgtgataacggttaattatgtagcggaagagttagggctaaatggtaatagcttagagacaacagatgttagtactaataaatatttaatgagacagatatttaaaaaaaatggagatccaagtccaaaaagtatgaaagtagatttgaatacggatttggacaagataaatattatatatccagtgattgtaaaaccaactgacagaagtggaagcagagggatattcaaggtggaagatagccgagatttagctgattcggtaaaaaaatccgttgaacaaagttttgaaaaaaaggcattaatagaggagtttgcggaaggaaatgaatatagtgttgaatatatatcttatcatggtgaacatcatttccttgctttaactaaaaaaattactacaggggcacctaattttatcgaaaaagcccatatagaaccagctgatgtggatagtgtaattttaaatagagttaagcaaacaatcgaacatgcattggactctttaggaataaaaaatagtgcatctcattcagaaataaaaattgatattgatgggaatatcaaaataattgaaattggaggccgtatgggaggagattgtataggcagtgacctggtctggtattctaccggaattgattatgtgaaagccgtgattcaggtggcatgcggcaaaaaaactgatttggagccatgtggtgaaaagatgcacgttaaggcagtatatatttttagtcatgaagatctggtggagtataaaaggataaaacagacttttccacaaaaaatattaagggaagtttttttgaatgagtccttaatagggaaggcaacaaacagttcggaccgtgcaggatgttatattatcagagaagatgaaacagattatttgaacaaacaagattaattacaggatcaattgtactagtggataaaacagattttaatggagagaagatcatggcaaatgaaaaaatattaaaagaagcagataattattttaccgggacattgcataaattaggaacaaatagttgtggtgttggttggaatggtgatgatgcgcagaggatacgttatgatcagttgacaaagctgatagatttctcgaatacagtaaatatatgtgattacggatgcggatatggttattatctgtcttatctgaaagaaagggacacgtggaatgggtgttataccggttacgatatatcgaaagagatgattcagactgcaatacaaaagtatggtgaaaataatgaagaacatatttttaaggtgggatcaaagattgagggaaaatatgattatatagttgaaagtggtatttttaatcttaaattctcaacaccagatgaagagtggaaagaatatatattggatactttgaaagaatttaatgatcatagcaaaagaggttttgcatttaatgcgttaacgatatattcggatacagataaaatgagagatgatttatattattcagatccattatttttatttgattattgtaaacgtaatttctcccgtaatgtagctcttttgcatgattatgaattgtatgattttacaattattgtaagaaagtagttcttaatatgatgttccaaacagttgtatatgaaatataaaggggtatttccttgtaacaattggagattgtgaatagagtatgatactaaaaacgataaaggaagatttacacgcatgcaatttacacagaattttttcaacccggaaataagagaaggttttgaaatctcagccatgatgaaacgcgcctgggcggcacagatggaagtattgcaggtagttgcagacatctgtaaaaaaaacggactggaatattttgcagattggggaacgttattaggtgctgtgagacatcaagggtttattccgtgggatgatgatattgatatatgtttaaagagggaagattataaccgcttgatcagtattctgccaaagcagcttccacatggttttgttatggctggaatgtatgccgggacagagagattacgtttggcagcagaagtgccgcagctgcgtgtgatggcggatgagacattgtgggattttaatgattatatgaagtattttcacggatttccttatcagcgtgccggaatcgatatttttccactggattatattccgaaagaggatgagtttgcagacatacaaaaaatcatgataaaacagggaacgaatcttctgggaaattggacgatgctggaaagtgagggcaaattagaagagagtctgcatgcgtatgaaaaattatgtaatgtcaggatagacaggcagggggacgtaaaaaactggctgtggaagctgacagatgcgattgcttcgctgtatcacaaagaagaggcagaatatataaccaactatactttctggatagagaaagatggttataagatgaaaaaagaatggtatgataatgtggtcatgcttccgtttgaaaatattgagattgcagctccggcgatgtatcatgaggcattaacggcacaatttggagactatatggttccggtaaagggagcggcagatcatgattatccattttatggtcacatggagggcgaactgaaaaaacagatcaaagcggttggttttcatggaagtgtggaagaattctgtcaggcggtttccagtggcagactacgggtataaagttagcacccttgttaagcagaaatgcgacagtttcttatgaaacttgtttatatgatgcagataaaatgaatggagaagagataagaaatatgaatgaatggaatagaatctggggaaatcgttcatcggatattgtaatttcagataacatatttgatatgttttgtaaattaaaaaaagccgacggatttgatacacaggatgtagatggatattatgaagcttttttttcacaatggaaacatatggtggaacacattacacagaatgttggcgatatttcaagtgtgtatgaagtgggatgtggaagcggtgtaaacctgtatttgtttcagcagttaaagaaagtgacacaggttggtggctgcgattattcccagacgcagattgctcttgcaaaaaaaatattaaatgcaaatgatctgcagtgtatggaagcggatcagatagcagagaaacctgtttatgatgtggttctttcagacagtgtatttcagtatttccagagtccggaatatggtatgcgtgtcgtggaaaagatgtggaataaagcaaaaaaaatggttgtgatcacagagatccatgatgaagaaatgaaagaagaacatttgaaccacagaaggcagtgtgtggaaaattatgatgaaaaatataagggactggataaaacattttacacgaaagaaatgtttttgcagtttgcggacagagccagggcaaagtgtgagtttgtgaaaccgcagaatgatctgtactggaacaataaatatgtttttgactgttatctgacaaaataaaggagatatggcatgcaggcgattatcttggcagcaggaatgggaaaacgtttgggagagttgacgaaaaataatacgaaatgtatggtggaagtcggtggtgtgcggctgattgaacgtgcgcttcgcatacttgacagaaaaaaattaagccggatcattctggttgttggataccagcataaaaatctggtttcttttgttgattctttgtgtcttaaaacaccggttgagtatattgtaaatgatgtataccataagacgaacaatattttttcgctttctctggcaaaagatcagatgatgcaggaagatacgttgttattggaatcagatctgatttttgaagagaacctgatcgatatgctgttagaagatgaccgggatacgcttgcattggtagacaaattcgaaaactggatggatggaacctgcatcgtggtcgatcaggatgacaacattactgattttatccctggaaaattattaaaataccacgaaaaagagcactattacaaaacagtaaatatctataagttcggagcacagttttcaagagatgtatatgtcccatttttggaagcatatgcaaaagttatgggaaataacgaatattatgaaactgtgattaaactcatactgatgttggacaaaaacaccatgaaggcaaaaaggttaaatggtgaattgtggtatgagattgatgacatacaggatcttgatattgcacagacattatttatcgaggatgatgtggaacgttatcatcatctgatgaaacggtatggaggctactggcgtttcccgcatttacaggattattgttatctggttaatccgtatttcccgacaaagcgtatgcaggaggagatggaatcgaattttgatgtattggttcgacagtatccgtcaggtatggcggtcaatacacttctggctgcaaagagctttgatgtgcacgaagaacatattgtgatcggaaacggtgcagcggagctgatcaaaggattattggatgagctgaacggaaaactgggtgtgatccgtccgacttttgaagagtatccaaaccgctgggagaaagaaatcgttgcatatgattgtacagaagatgattttaattacagcgcagaacgtcttatcgattattttacagaaaatccggttaatacgcttgtactgatcaatccggacaatccgaccggtcattgtatgaatgcagacgagataaaacgcctgctgcagtggagcaggcaatgtgatataaatctgatcatagatgagagttttcttgatttcgcagatgcggaaaacttatcgttattatcggaacaggtgttaaaagaaaacaaaaacctttatgtggtaaaaagtatttcaaaatcatacggagttccgggaatcagactgggaattttagcaagtggaaatacagatatgatcggacgcttaaagaaagatgtatcgatatggaatatcaattccatggcagaatttttcatgcagattctggacaagtataaaagcgactatacagattccctgcggaaaataaaggaggaaagaagtcgttttctgaatgaactttgtgcgatcaaaaatctaaaggtctatccgtcacaggcgaattatttcatgtgtgagattttagatggaatcagcagcgaagaactggcaggaagacttttaaaggaaaatatcttgattaaagacctgacaggaaagatacataatggaaagcagtatatcagaattgcaatccggggagaagaggagaaccggatactggtggaaaagctgagattatgtatgaaacagtaagataaggcatgaaagtttagaaattatgtcaatgtgaacttcctcaataattaactctcgttaggaggacgccatgtattttgattatgaagtcaaaattccggattccagacatggaatcacgagaaaaaagatccggggaataactcatatttactatgcttacgaccacaagtacagttcggataagcattataccattccgaagaatacaacgatcggtaagtgcctggatgtttcatcagagacgatgtatcctaataccaacttcctgaaatattttcctgatgctgaaattccggtgacgcaggtaaaatctgaccggagtgcctgtctcagaatcggagcattcattgtgatccgtaagatcatcgcagaatatcatctggatgagatggtcggccgcctgatagggaaagatgccggcctcttccttgatctggcagcgtattccattgttacggaaaataatgccggtcagtactatccggattatgcatacaaccatccactgtttacacagggaatgaagctgtatagtgattcaaaggtctcttcatttattaacagtattacgagagatcagagcattgctttccagaatgaatggaacagcagacgtgatcaccgtgaaaagatctatatcagttatgattcgacgaacaagaactgccaggcaggtgatcttgagtgtgtcgagatcggacatccgaaggatgacaacgggaaaccggttctgaactattcgattgcctatgatcacaacaactctgagccgctttattatgaagaataccccggaagtatcgttgatgtttcgcaactccagcagatgctactgaaggcaaaggggtatggataccggcaggccggtttcattctagaccggggatactttagtaaagaaaatatccatttcatggataagaacggttatgagttcattatcatgatgaaggggatgaagtctctggtgcgggatcttgtgctgtctgtgaaaggcagttttgaagaaaaacgcaaatacagcctgcgtgattacaaagtaaacggtatcacggtgaaacatcagctgtatccttccgatgagaaggagcgttacttccacatttactataacgaacggcagcagacagccgaatgcgagaatgtagaagaaaagatcgaccggatgtcactgttcctgcgtgagcatcagggtatgaaactgaatcttggcaatgagttccgcagatattttgatctgtttttttatcatgaaggtcaggatgatgaaaagttcatgtatggtcgggaacgctaccaggtcattgatgaagagatagccctgtgtggttactttgttattatcacatctgagaagatggatgcagcggatgcccttgatctttataaaagccgggatgcatccgaaaaactgttccgggaagataaaacctttcttggaaacaggacaatgcgtttccagagcaatgaggcactgcacgcaaagatcttcatagaatttgtagcactgattatcaggaacagaatccacttcctgctcaaggaacagatgctgaaagcccatcaaaaagagaattacatgacagtgcctgcggctgtccgtgaacttgagaaaatcgaaattgtgcggcaaaccgatggcgaatactatcgggattacgcagtaaccgcaacgcagaagtcgattctgaaagcattcggcttatccgagacaaacgtcgggagcaggctgttgaaattaatgaagatctcagatcctgcaatacgaaggaggcatagtaatggcacgtagaaaaataagtatcgatgacaggattgaacagcagaagctggccgtttccaaagccaaggatagatatgaagcagaactcgagcaactcaatcaattgatgaaaaagcgtgatgagatacgtaataaagagttacttcaggctatcgagcatagcagccgttcatttgaggaaatcatggacttccttggcactgatgacttccaggattaaacctggaagtcatcgagagttaatttttcaggaagttcacaatatgaatttaaaccgttatttgtatttgaaatgggaatatttaatgctgttgcagatgctttacgtgaatttacaacagtagtaaatctcgatatggtaacggaagcacctgtttctgaagctgatatatttatcagacctgcaaagttagagaaaaatgtagaaaatatatacgaaaagaatttatcattaaatcaaaaacagatatttatgagtgaaaaaattcctgcattatttgatataaatagtacagcttacacacggcaggaacttcatctgtcggaagataagtttttgattgcaattgttggaaataggctgggacaggagataacagaatcatttgaaaagtttatgtttgaaatattacaaaaaaataaaaaaacagattttgttataattggggaagctggagaattgcagaatcgattgacagatagcacatttgataaacgtattcattatttgggatattgtacagatttaaaaggtgttgttgctacattagatatatatctgaatccggagcgtttaggaggaggctggagtagcgcaattgccttgagtgcaggaattccggttgtgacattaaaaaaaggtgatgtggcatataatgtttctgaaaaatttattgtaagtgattataatgagatgtatgaagttatacgacaatatatggatgataaagaattttataacacacgaaggcaggaggctttcagatatgcgaaggaacatagtgaaaataagcttatagatttttgtgatgaaatgtttggaaaaattaaagaaatcatgataaatggtaaatgttttaatatataaaagaattatttctgtgaggacgataaaatgggaaaaaaagtggctatattgcaatcaaattatataccgtggaaagggtattttgatattatcaatatggtggatgagtttatcctttatgatgatatgcagtacacaagaagagactggagaaatagaaataaaatcatgacgcctacagggctgatatggcttaccattccggttgaaaataaaggtaagttttatcagaagattaatgaaacgaaagtgttggatcatgagtgggtggataagcactggcgaagtatccagtataattatgcaaagacagaatatttttcggaatatgaagaatgcattcataatatttatgaggcatgcagggaagaaagctatttaagtaaaattaattatatgtttttaaaagaaatttgtaatcttctgcacattaatacgaagctaacctggagttccgactatacaatggttgatggaaaaacagaacgtctggtgggacttgtaaagtcagcagggggagattattatctttccggaccggctgcaaaagattacatagttgaaaaatactttgaagatgcaggtataacacttgactggatggattattctgggtacccacaatacaagcagatgtcaaaacagtttgaacatggcgtttccatattagaccttatctttaatgaaggtccaaaagcacaaaaatatatgaagagttttaaagagtaagagaaagattatacaataaatccggaaacagataccctgttgcaggtaaatgcaaagatacgttcacaggcagagtataagggtgtgatagttgagcacaatggggagaagatgtataagtgtttgggggtgagaaagcgttttaagtaaaaggcttccattttggaagtcttatgttattatataactacaaatgaaacgaatatataaaagaaaggaagatatggtggaagattataataaggtatcaggcatgctatccgatcaagatattaggcattattggaaaaaaggaatttatgtatatgatacagaaaaaaagtttgatttagaaaaacaattacaattgggggctattgatttacgttttcgaaatgagtataagaaaattgagttaatgggtaaaaatcaaatgttaacatatgatatgataaaaaatcatagttatacaaagccttatgaattaaaagctgatgagaagttagttattaaacccggagagataattttaacaaccacgatggagactgtacagcttacagaacagtttgcagcacttatttctggcagaagcagttttgcccgtttgggtatcatggttcattgctgccaagaatttatcaagcctggtcatggacaaacgataccgttgcagattattaatttaagtccatatactgttgagttggatatgaatgtccctatttgccaaattatattttttaaattagttacttctgccagtgaaaaatatgttgatagaaatggcgcaaaatattcagaagaagttgcaccagaaagttctaaaatatacgaagaaatgtcgcaggaagacataacaaataataagaaaaaaagaataaatccaaatatatatataaaaataaaaaaattattaattccttttttgtgtccttctatattgtatttattaataaatccgatatataataaatacttgatgacaaattcatttgaaagtttaataaatatagtaaaagatgcaccgttatctatgatgggtggaagcgtgttgttggttatttattgcattatattttggaaagagggagataaatgagagcatatattgcatcaaaatatatcagtcacaaaaaaataaatgaagaaataagttgtgcattaagaaaaaatggaatagatacttttttacctcaaagtataaatgtggatgctgttttaccagaacaaatgagggatgtttctgaaatatgttttcatgcattagaaatttgtaatatagttcttgttgtttcaccttttggacagagtgtttcatgtgagattggatatgcaattgcattaaagaagaaaggtgaagataagcatatactgatttatgattgtagtgaaaaagaacatcgttggagaaatgaagcaatgatagtgccgtatgtagaagcacgatttgacgatttaaataaggtcatagagtattgtaaaagtttgtaaaatgtaaacgattcataggttcttacaaaagatgagcatatcagatgttagatggtctggtatgcttttttgttctgttcaatattttaattaaatacttgtagtagaatttaaaatgtagtataatgaataaaggtagagtaatatatttaaattttaaaggaagaaaatatagacggagctatgaaaataacatagctctattttagattatactctatgagagagtacaagggagaaaagttatgaatagtgtagtaatacaatttgtcataaactgcgttattatgatagcttcttttataacagcattatgtcaatataacaataaaaaagataaaagacagagtggcatttttatatgtgcctgtattatagcgattggcacacttgtttatacgtttgttggaggttactacacaatgccaaccgtttatataagtcgtgaagcagatcactcagcagtcgtattgtatgcagatgaaccggtgaagatagaatataagcttgaaggacagaaagaatatataaagtatacaggtccatttaaattggatcataaaaccgtaatatatgcaagatcaaagatgtggacgtggacgagtgctgttgagaggagagatgtatatttaacagatacgggattagtttattttggaagtgcagatgaacctggggagtccatcaaagaaataaatgccgaatacatatataaagatgctgggggcaataagtcaggaaaccattatgcaggttatcagataagaaaacaggatatacatgtaacggggatagatttaaatggggaagaaaaagaggtaacagagttctcgtattcacccaatgtattagagaatggtaaaaatgatattgaggttacatattcacttacagatgagcagagcataaaaacacatttgtatattgaagcgaatgatccgattcttattaaattaagagcaaaatatactggaagaagaatatttgcaggaacagaattatcagatgataatttattggtaaagggcatttatgaagatggaactgaacagaatttaacagattattctatatcacaaagagaggtaaaagaaggaaaaaacaaaattactattacaaaagatggactttcagtggatttagaacttgatgcagttgataaggggagcattacggaacaggagcaggaacctaataatgaaattagttctgcaaatgagattgattgtaatgtaaaatatactggaagattgcgggatgaagaagatgtggattattataaaatacgtctggatcaaaagggaaaaattgttcttaatctgcaacatcctaaaatagatgagaggaatgttttatggaaagttggattaatggggttagatgaatcggaaaaggttagcatggatgtgacaggtgaggagtctgaaaaaaattccagtgctgtcagagtaatgcctggcacatattatataaaggtatcaagttattctcattcatcggaaaaatatacattaatggtaatgtttgaggaagaagatgatacatatgagatagaaccaaatgatgatttgactacacaggcaatggatattaatgttaacactgagtatataggaaatttaaccactgagaatgatcaggactattataaatttacattgccagaaaagcagaagattcgtattgccttttcgcatgataaagttaatgagaacaatgttttgtggaaagcagttttactgggagattatgatggtacaattactgaaattgattctacaggagaaaatgcgagcagttattctgattatgtgaggctgcctgcaggtaactattatcttcgtgttgtcagtcactattggtctgatatagattataagttttgtatacagtctgaggtggagcaggtggaaacagagagtgaaaataatgatgattatgatgtagcaactactataaacataaactcagaggtaagaggcaatatacagtctgaaaatgatatagacttttataagtttaccttggataatatgtcaacgttagaattggtattttcacatgaaccgatggatagtggatatgcatattggaaaatttcattatatagcgtggattctggagaaaaacttcaaaatcaaaatgaggatagtgaaatggagcttcatggaaatgatcagaaaagtgtttctggcatttgggagtcactttcacctggaacatactatatcaaaatagcaccaagttattattgcaatgcagattatgagataaaaatagtatctcattaaattatttttgaagaatatgctttcgggaacaatgtggagggaaaggtatcaatagggagcatccgaagttttgtgtaaaccttcaaactgatgtaagataaaataattactcagtttgggggttatttttattacaaaaaaaaggggacttataaaaagttggaatatgtcatcctttatttttgttacttgtaacggattatagtaaagatatgtatcattttgagggataataattaagttctcaataaaaaggtatttttatataaaattgttgctataataaaaaaaaagaagtaaactgaaagttaagaggatatgataaaaatatattttggaataatactggagataatatggttggaagtggtttttgctctttaccatatttatggatataatttctttttaattattttgtttggaataattctgcatatgtgcaaattactggggtcttttttaaaaaaaattttttgaggaattgggtatacaaaggaggaaggttgtgtgaatcaagttcaaataagtagtagattaacccgaaaaaataagaaaacaataaaagtgtggggaatagcactagttataatattacagataattagtctctcttttttgatattttataaaaatactgaatatataggaaatgtgattggaacaattacaatgatcattgatttcttgggtgtaatatgtataggatatgagctagaaatgtctcaacgaatacaggaagcacaatttatatttgaattaaatcatgcttttgtagaaaatgcttgttacgcaaaagtgtatgacaaacttgagatggcggataggatgcaaaaggaagttaaattaaagacaatagagatatcaaattatcttacattttttgaaacaatgtatttgttattgcaagaaagagtgatagaaatagaaacattggatgatttatttgcttaccgtttttttattgctgtacataatgagacaatacaaaaagaaaagattataaagactccgtataattttagaaatatctttctattggaaaaagaatggatggaatatagaaaaagaaaaggattgaaaatttataagatagaaaatagtttgaaaaatgcctgtttaaatgctagaaaaatagatgattataacaaaatatgtgaggatgcagagagatgaatatgcaatatgatgcaatgaagttatataaatgtacagaagcagatgtgaaaataataatggaccttcaacaagaaattattgatggattgttggacaaacaagttttgagaaaaaatactgaaaaaatgtttttgcagtgtacacaatttccgaatataacagttattatgaaggataaacagggagttgttgcattagcaatctttgttgatgcaaatgggacagaagaggatttaagtggaaatttagttttatataagcctaaaaaggctggaaatattaaattagttatggtacgagaaaaatatcggggaaatcggttacagaaaattttaatgctttttttggaacgatatgcagtagaaaaagggtatacttgtttatgtacaactgtgtcggataaaaataagtatagtttaaataatatagtgcaattgagctatgaatatgatcattcggcaataaagtatggtggactacaaagaaaaatatttgtaaagaatgttgaaacagagaaagcagaaagaagaaaaaaagttctgacttatatggaagaaatgttacaaacaaaaaatatacagaacataataaaagatgaagcccaacagaatagtaatttcttagaaattgattacgagattgctggaagtggtgatatagttgaatattatcatgaaaaagagaaaatgagtaaatatggaatattattagatgggtatgtttggtttaaagatgacaggagttacttatttgaaagaagaataggagaatggaaattaaaaagagtgatttgcattttagaaaacttataataggagagagagttgtgagccgtcacatcctactcgctggaagaggatatcaatactcagttgatcatcagtagaaaattttggggtaacaaattatcatgactaacctagagccggctcacagccgctcccaataccccccgaacttctcctccgtcattccctcccccatcatccgatacagctccatctgcttcggaatcagagcactgtaagtggactgcgcataatccggcacctccgcaagaatcgttttttctaattctttgtagaaagaataggagggtttaaaatcccggagttttgcaaaatacagtgtctcatacagataggtatggagaaaatatagtttgatttcatcatagtattctttgaaaaatggagtttttttcatgaaattccagacagcaagctggacgtcggcatgcatttttagggtttcttcctgtctcatatcatttcgcatggttccagaatcattttgtctgtaataatagtaggcatcgtttaagattacgattttatttgcaaaatataaaagcgggtatacaaaaagtggctcctcataaatgacatgttctgcgtaggctgtatgagcctcattcagcagagtgtggcggtaaagtttattccagcagccataggtaactttttctgagattagaaatctttttcggtcactgacagaagaaatttcaatcacttccggcgtaatgttccgaccggagtccacggcacccagacggtctgtataataaaaatattcaaactggatgatgtcagcatccgattctttggctttttcataagtttccaacagaaaattttcagagacaaagtcatcagcgtcaacaaatgcaatatattcgcctgttgcatactgcagggcaacatttcttgcaccgccctggcgcatattttcctcaagttttaagatcttaatgctttccggataggcgcgttcaaattcctgcagcatgttccaggtagcatcctcatctgtggatgcatcgtctacaaagatcagttcgatctggtcaattccgattgtctgttgtacaagtgacataaagcatttcggaagatattttgttgcattaaaacatgggatgatgacacttactttcttcataaatcagattttctcctaacgaatgttaacgtgtggtataataaaactgccgagcgaagctcgtgtagatcacgatcatgaagcaaagcttcatgatataatatacctcaaaaggtatactattaatttatcacaataaaaaagaacgcacaatatcagtctgaaaagcagggaggttacaatgtctggaaatatagcgatcggtatacaggatttttccacaatcatccagggaaactatttttatatagataaaacgccttttattaaagaatggtgggattgcggggacagtgcgactttgatcacccgtccgcgtcgttttggaaagacacttacaatgagtatggtggagcagttcttttccatagactatgccggcaggtcagatttgtttgaacatctggcgatctggaaagaagaaaaataccgtgagctgcagggaacttatcctgtcatcagtctgtcatttgcgcggattaaagagagagattatgagaaaacaaaacaaaagatgtgtgaggtgttaagaaacatatatataaagttttgttatattaaagacagtgaaaagcttacagatgccgacagagcatattatgagcgtatgttggaggaaaatataaaagagacggatgcgacatcttctttatatcagttatcagatttcctgtatagatattatggaaaaaaagttatcattttgttagacgaatatgatacacccatgcaggaagcatttgtggatggttactgggatgaacttgtcgcattcacccgaagcctgtttaattcgacatttaagacaaatccggcactggaacgtggaattatgacgggaatcacaagagtaagtaaggaatccgttttttcagatttgaataacttaaagatagttacgactacatcaaatgaatatgcttctgtatttggttttacagagaaggaagtctttgatgcattggaacagtatggtcttgagaaagaaaaaaaagaggtaaaaagatggtacgatggtttcatttttggggaacacaaagatatttataatccatggtcaattttaaattatctcgatacacagttatacaaaacattttgggcaaatacaagtgcaaatagtctagtaggaaaattgattcaggaaggaaaccgtacaattaaggaaaaatttgaaaaattattgtgcggagaatacatctggtcagaaattgaagagcagattgtatacaatcaattaaatggaaatgaaaaagcagtttggagtcttttgctggcgagtggatatttgaaagtattatcttatgaaacgtatcaggatattgaggaggggaagatgccgaaataccagcttgcgttgacgaatctggaagtaaagttaatgtttcagggtatggtacatgactggtttgctcctgtacaaccagattacaatgattttgtaagggcaatgttacttggtgatgtggatgcgatgaatgaatacatgaatcgaattgttatacagacatttagttatttcgacaccggagagagggcatctggggcagagcctgagcgtttttaccatggttttatattaggtctgcttgttgacctgcgggatagatattaccttaaatccaaccgtgaaagtgggtttggcagatatgatgtaatgttagaaccgaaaaattcaaaggaatgcaaagcagttattttagaattcaaagttcgaaatccacgaaaggaaaaaagtattcaagagacagttctgtctgccttaaagcagatctgtgagaaaaaatacgatgcagacctgcttgataaaggaatcagaaaggaacagatatatcattatggatttgcatttgaaggcaaaaaagttttgattgggacagacagggaggagtgaatatgcccaccaatatagcgatcggcacacaggagaacaaccacatgttatcagtctgcatcatcaccaaaaatgaagaacacaatctggcacgctgcctgaaatcattccagaacaccggatttgaactggtcgtagtagataccggatcgacagatcagacaaaaaaaatcgccgcagaatatacggaaaatatctatgatttcccatggtgcgatgatttttcggcagcaaagaattttgcggtttcaaaagcagcacatccgtatgtgatggtcattgacagcgatgaatatttacagcagattgatcgggtacagttagagaaaatgattgccgaacatccaggtgaggttggcaggatccggagaatcaatattatttccggaaaagatggaaagcaggaaaataaagagtggatcaaccgcatttttgcaaaagaaagttttcattacacgggaagaatccatgagcaggtaactgcctgtgacgaaaaggaatatcgtacatacgaagcaccggtcgtcatcggccatacgggttatgatcttccgaagaaagaaaaaaaggcaaaagcgctgcgcaacataagactgttagagcaggaattaaagaattcaggatgggatgaaaaagtgcatgccacgcagttagatcagaatatcgcaaagcaggatacggatgcagagcagaaatctaaaattacggatgcaaaaaaagagcagcagatcccgtatctattgtatcagcttggaaaaagctattacatggcagaagattataacgaggcatgcttctggttcgcccatgggctcagttatgaccttgaaccaaagttagaatatgtcatcgatatggtggaaacctacggctatgccttgatcaacagcggacgcgccggggaagcacttttctttgaaaacatttacgaagaatttggaaatagtgcggattttcagttcctgatgggactcatttatatgaacaacgctatgtttgatgcagcagttggagaatttttgaaagcggtcaaacatcgggactgcaggatggcgggagtaaattcctatgcagcttattataatgttggagttatttatgaatgcctgggaaaaatcagtgaggcgaagtattattatcagaggtgcggtagttatgagccggcaaaaaaacgtttaagattgataaagagttaaatttattatagtcagcttattggagaagcagagtgaaaaatataatttttcaaatgcagaatggagattagaatgggaatatatttaaatccgggaaatgaagaatttcagaaagcacttaattccaagatatatgtggataaaaccatgctgatttctgaaatgaatcagaatctgaataccgaacatcagaatatatgcgtaagcagacctcgccgttttggaaaatctatgactgcaaatatgcttgtagcttattatagcaagggatgtgattcgaaaagcatgtttgcggattataagattgcacaggatgaaagttttgaggcaaatctgaataaatataatgtccttcatgtcaacatgcttgactttcttaaccgggcgcagtcggtggatgcaatgatcgattatatgcaaaagagacttttatgggatatcaggcgggaatacggagatgtagactgttttgaccgggaagatcttattgatgtattagagaacatctatagtcagaaaaaacagaaatttatcatcattatcgacgagtgggattgcatatttcgaaagtatccgggggatgatgaagcacagaaaaaatatctggatttcttgtgcctgtggatgaaagataagccatatattgcgttggcttatatgacgggaatactgccgattaaaaagtatggcgagcattcagctctcaatatgtttgatgaatattccatgaccaatcaaagggaactcgctgaatttaccgggtttacggaagaggaagttcaaagtctgtgtgtgtcatatggtatgccttatgacaggatgaaacagtggtacgatggatatgatttaaagggcattcagatctataatccaagatcagtagtcatgtcattgctgggacatgattttgacagttattggacgaagacggagacctatgaggcactaaaaaaatatatccagatggacatgtatcacttgaaggcgttaatcacacagcttatatcaggcagccatataaggattaatccggataagtttcagaatgatatgtccacatttgcgagcgtagatgatgtatttacgcttttagtgcatttgggatacctgacctacgattttgagaacaagactgtttctattccaaaccaggaggtgcagaaagagtttattaactgcatagaggatggcggatgggaaccggtcatggatgcgattcgtaattctgaaacactgcttcaggcaactatagatggaaaagaagaatatgttgcggaaatgatcgagcaggtgcatcaggaaaatatatccattttaaagtataatgatgaaaactctatgtcatgtgtgctttcgctggcatattatgctgcaagaaaagattatgtgatgtatcgggaactcgccgggggaaagggatttgctgacattgtgtttgtcccgagaaaatttagagatgtgccagcgatcgtggtggaattaaaatgggataaatcgtcagatgcagcgattgcacagataaaaaagaagcagtacatgcagagcctgaaagattatcatggacaagtgatcctggctggaatcaattacgacagcacagattccacaaaggatgattataaaaggcatagctgcagtatagaaaaaataaatctataaaaagtacaggagaccaccatgcagacaaccatcatttacatcaccggtgtctacgacaccctcgacttattcacccaggaactgaaaaatgcctttgaatccatgggatatgcttcctttacctatgacgcccgtctcgaagaggtgagcaagcaggcactgatcgaatgtatcggagatggtgcaaaaaaagatcagaggtttttctgtgtgacgtttaacaatttgggatataatctgacagtgcctgtagacatgatcgaggcaggggcatttttgaagcaggatatttttcaaggcactggagaatcaaaaagagcaggttctacggaaaaagagccaaacctctgggaaacttatgaaattccttacatcaatatcctgatggatcatccgtttcactatgaaaaaccactgcagaatgctccggcaacatctgttgtgctgtgcacggaccgcaaccatgtccggtatatccgcagatatttcaaaaatatccggtatacggattttctgccacatgccggggtggaacttggcagcaggcataagccgcttgcggagcgtggaattgatgttttatatgccggggcattgccgatctacacagttgcgaagatgataccggatctgtcatccatcccggaagtcgatggagaggagatggcacaggctgtgctgtcagaactggtgcatcatcctgaccggacaacagaggatgtgatagaagaatatttaaaatataagcggaatgatatttcagaacagcgtattcatgagatcatcgtgcagatgcgttttattgactcgtatgccacgtcatttttccgtgaacaggctgtccgtattctggtggaaaacggaatacgggtaacggcatatggaacaggctgggatcagtgtgagtggagtgacaatccgtatctggtgtatggtggaaaagtacttgcgccggaaatattgccactgatgaacgatagcaagattgtcctgaatacgatgacctggtttaaagccggagcacatgaccgtatttttaatggaatgcttgcgggggcagcagttgtgacggatgattccacttatctgcgcagagaatttacggatggaaaagaatttgtcatgttttcaagaaatgagatccggactttgccagaccgtgtatttgacctgtttggccacatgcagtccacacaaaaaatggcagactgtggatatcaggcagtaaaagaacatcatacgtggaaaagcagagcggagtggatcagggaagcctggatgtagagcggaggttctcattccctccctgcaacaggttttacatacagatgaaaacgttattttggctgacacggcacaggaatggagattattatgcacatattaatgtatcgctggaaagcttataattacagagacatagagcagacttttttattactggggcatacggtggataatatcgaacagtatcttggcaattatgatatcgatccggaatttgaaaaaatcattgaaaacaaactgcgggaaacgcactatgatatggtatttacggtcaattattttgcactgatctcgaatgtctgccagaaaatggggataaaatatgtatcctggagctgtgataatccgctgatcagcatgtatcatgagtctatttttcatccgtgtaattatatatttacctttgataagacaaactatctggaattccgggagatgggagtggaacatatctggtatctgccacttgctgtggatacggaccggatggatacggtaattgcaaattcaccggaaatacagaaatataaaggagacattgcgtttgtcggaagtctttatgaacggaactcttatgataagataaaaagcaggctgccggaatacctgcgcggatattttgatgctgtgattgaggcacagttaaacattagcggtgcaaatatagtggaacctatgctgaccacagacattttagaaaaactgcaggaatattttgaactggaaaaatcagaagggtcgttttcggatcttggactgatctttcagacaaccgtacttggatttaaaattgcggaagtggagcgcagacgtgcattgatcgaactgtcaaaacgttatcatgtcaatgtgtacagtaacagtgatgtaagtgatatgctgcggattcagtactgtggttcggttgattactggagtgagctgcctcaggtttttcgtatgtcaaagattaatctgaattttacgattccgaatatcaagagcggcataccactcagggtatgggatgtgcttggggcaggaggctttctgatgacaaattatcaggcggaaataccatattattttaaagagggggaagacctggtatgctttgacggaatcaatgatctttgtgaaaaagcagaatattatctggcacatgaggaagaacgtctggcaatcgcagaaaatggttatcgaaaagtaagggagcatcacaattatatagagagaataaatacgatgctggatattatagaagaaaatgaaaatcaggaaaatgatatatagtacatgatcagtgcgaaagatgcataatctgaagttgcatctgggatattggaatattaaacggacactacagaaaagctgtaagtgtccgtttagcaatatctgtctaacatcattccggaataaacggaggtcaggtaagggcaggaaaaattcttatgacctggttttttgtaagtgatcatcgttttgcttgcataatttaacgggtcaacagagacggttccggcggtcgttccgagatcgtttttaaacttatttaatgttgcaaagcattcttttgcatccgcggaagtaactgcatccgtcagaagatgtgtatcgaccttgatggcaccgtcatctgaaagttttaatccatacgactcaaattcattgtaataaggttttaccacctgtgtaaaatcgcgccgcagtttatctgcttcctgtgtgctgtcatagcgatagcttaactggatcagattgttgtatacatttaccagagactggacattgtctacaatggagtcagctgttgttttaaagccgatctgtacagggtttgcctgggagcttggtttattcagtgtcagttcaaaagcattgttgacagtaaaagtatttgacagagatgcatgctccgtaccgtttaataagaaagaagaattactcgctgtctgggtaacacaatcaataccgagtgtctgcattgcttttgcggatgcatgatcggaacttggggtaacttcaaacagataggactgaccgtctgcaagaccggtctgacttgaagttaaacgcagggcaatcttgttactggcatttttggcaagatcggcatgaatcccggcacctgaagaattgaccaggcgtgcaagcttttcaagaatatgctggttgtcatcatttctgcttacggtatactgaaactcatatgaacttaaatcagttgatatatcgaatgtgtaagtacctgttttgaaatcgcattcatcagggtaaagaaactttccgacattgatctgtggggctgcaagctgttttacctccacatcaaaatgcaaagaattatcgagactctgatcctcaccaatgtaggtaacattgacagaagattcgtcggaagactttgcaacttttttgttgaatacattttcaatcccctcgtcgttgtcagaaagggcagcgattacattctggatcgaacgggtatgttctttcaggtcaatcgcaaattttttcacatccgtggaatctggaattttatacagaggagtatctttatttgtttttacaatctgattatagacagcacgaagctgactcttcttatgggtatcataacgcgataccttcgaagtgccataagtgcttaaataataatgataggcactgtcaatagcagccaagaaaacccctcctttcttccatgaaatatatacatttatcaggttataggacagcatccttgccgcctgacatgataaatgtggggattttaattatatttttaaagattctttaaaagtatttcggtctaactatataaaaatattataccatttgagaaaaaaatgtgaaataggaaaaaataatcaaaaaggtttaaaagggtataatatacaaaaaaagattgacggaaacaagtggatatgatatagtagacaggcgatggaagtaggtcttttttttatgcctttttttaaggactgtcgctgatccttaaaaaacgtctcactacggagaccggggcagaaaaaagcacaaagaattttaatggaggtggaagttgtgcgcacaaaaataacattggcatgtacggaatgcaaaaaccgtaactacaacatgacaaaagacaaaaaagctcatcctgacaggatggaaaccaaaaagtattgcagattctgcaagacccatacgttacacaaagaaaccaaataagacgcgcgtggcaaaggagtgaaaaaatgggagaaaccgagaagttagacaaggctccaaaagagagctggtttaccggtctttcggctgaattcaaaaagattatttggccggagaaacaatcacttgtaagacagaccacagcggttattgctgtatccgttgtattaggtcttatcatcgcgcttttggatttcgcaattcagtatggcgttgatttccttgttggttttaatttttaatggaggcagagtgatttatggcagaggcacactggtatgttgttcatacctactcaggatatgagaataaggtaaaagcgaacattgacaagacaattgaaaacagacatctggaagatcagatcttagaggtccgcgttccgatgcaggatgttgtcgaaatgaaaaatggcgcaaaaaaatccgtatcaaagaaaatgtttccgggatacgttcttatcaatatggttatgaatgacgacacatggtatgttgtcagaaatacccgtggtgttaccggatttgttggtccgggaagcaagccggttccgcttaccgatatggaaatgaaacctttgggaatcaagaaagagaacattgaagttgactttacagagggagacaccgttgtggttaccggaggtgtctggaaagacactatcggagtgatccaggcgatgaatcacggaaagcagagtgtgacgatcaatgttgaattgttcggccgcgagacgccggtagaaataagtttcgcagatgtaaaacttaacaattaaagcacagaccaggatctgtgcgcaggcatgagattatgcctgaaacattggattaaggaggcaattccaaatggcaaagaaagtagaaggatatatcaaattgcagattcctgctggcaaggctacacctgctcctccagttggacctgctcttggacagcatggcgttaacatcgttgaatttacaaaacagttcaacgcaagaaccgctgatcagggagatcttatcatccctgtagttattacagtatacgcagacagaagcttcagcttcgttacaaagacaccgcctgctcctgtattaatcaagaaagcctgcaacattaaatctggttctgcaacaccgaacaagacaaaggttgctacactttccaaagcaaaattacaggaaatcgcagaattaaaaatgcctgacttaaatgcagcatctttagaggcagctatgagcatgatcgctggtactgcaagaagtatgggtgttacagtggaagaatagaatttgcaaaaacagcaaattcattggaagaatgcaagaacggcattcttctgagaaattctgcaaaaattaacgatatttattaacgattatgtgggagggccctctcccgataataccaccaggaggttttttagaatgaaaagaggaaagaaatatcaggaagctgtgaaaagttttgataaggctgctcagtacgatgttgctgaagcaatcagcctggtaaagaaaaacgcaacagctaaatttgatgagacaatcgaacttcacatcagaacaggttgtgatggacgtcatgcagagcagcagatccgtggtgcagttgtattaccacacggaactggtaaatcagttaaagttttagtattcgcaaaaggaaccaaggttgatgaagcacaggcagcaggcgctgattacgtaggcggcgaggagctgatcccgaagattcagaacgagggatggttagacttcgatgttgttgttgctacaccggacatgatgggcgttgttggacgtcttggtcgtgtacttggaccgaaaggtttaatgccaaacccgaaggctggaacagtaactatggatgttacaaaagctgttaacgacatcaaagctggtaagattgaatacagattggacaaaacaaacattatccacgtgccagttggaaaagcttcttttacagaagaacagttaagcgacaacttccagacccttatgggtgcgatcaacaaagcaaaacctgcaagcttaaaaggtcagtatgttaagagtgcaactcttgcatctacaatgggacctggtgtaagattaaacgtagttaaaattacacagtaaaagcagaaaattgttgacaaccataatatacaatgttataatgcatatcgttgagccggttttccggtactcagcgatttgcatatatgccgaagacagcaggtgccatatggcgtaaacgtaagacgacctgccgaggggatctttatcaagatttttttgaccgtatctctctgtctttgcagggagttttttattgcagattttaatctgaataaagcggttttatatacctcaagtcttttatgcagcagcagtgagaaaatcactgtgatccggcggattatccgtcggcaaaataataaaaggaggtgcacgattcgtggcaaaagtagaactcaaacagcctatcgtacaggaaatttctgaaaacatcaaagatgcacagtcggtcgtagtagttgactaccgtggacttaccgtagcagaagatactcagttacgtaaagcattaagagaagctggtgttacttacaaagtatacaaaaatactttagtaagccgtgcagtagaaggtactcagttcgaaagcttaagagacgttcttgaaggaccgaatgctttcgctatctctactgaggatgcaacagctccggcaagagttttagctaagttcgctaaaacagctcctgctcttgaaatcaaagcaggtgttgttgagggtacttattatgatgaggcaggcatgaaggctgtcgcagcagtaccatcaagagaagaacttctttccaaattacttggaagcttacagtctccgattaccaaccttgctcgcgttctcaatcagatcgcagaaaaaggcggtgcggcagatgcagcagtagaggctgctccggcagaagaaacagcagctgcagaagaaccagcagagacaccggcagagtaatctatccggcggctggatgaaacagtatatgggcacggcaggagagactgaccggtgcgacaataaattataatggaggaaaattataatggcaaaattaacaacagcagaatttatcgatgctatcaaagagttaagcgtattagagttaaatgatttagtaaaagcttgtgaagaagagttcggcgtatctgcagcagcaggcgttgtagttgcagcagcaggtgctggcgagggcgcagcagcagaagagaagactgagttcgacgtagagttaacagaagttggcccgaacaaagttaaagttatcaaagttgttcgtgaagctacaggcttaggcttaaaagaagcgaaagacgtagtagatggagctccgaaagtattaaaagaagcagctgacaaagcaacagctgaggatatcaaagctaaacttgaagctgagggagcaaaagttacattaaaataattgcgggtgctttatacgcaatgattgtaacagggcggctgccggataattccggcagccgcttttatactttataggattcgggcgtcaaaaggtggttcataacttagtgattgtcaaattgcacaaagccgagactgtttttgtgactttgggagaaaattagaaaatcttagtatgcctgtctatttacagtaatgttctgccacggacggcagaacaaggcttcacgagccatggaaggctcgttgaatgccgtttacgtcactctgtgaaaaactgattcaggcatacttagtttttcttattttcggacaacggaacaaaacaagttcggttttgtgcaatttgacagacccaaaattgaaaaccaccttttgacgcccgaatctttatagg

SEQ ID NO: 914 - DNA, 10588 bp, unidentified
  source 1..10588: mol_type = unassigned DNA
  misc_difference 7781: note = a, c, g, or t
  misc_difference 7782: note = a, c, g, or t
  misc_difference 7783: note = a, c, g, or t
  misc_difference 7784: note = a, c, g, or t
  misc_difference 7785: note = a, c, g, or t
  misc_difference 7786: note = a, c, g, or t
  misc_difference 7787: note = a, c, g, or t
  misc_difference 7788: note = a, c, g, or t
  misc_difference 7789: note = a, c, g, or t
  misc_difference 7790: note = a, c, g, or t
ttaccgaaggttacggctacgcttacggcggctcaggacagccccgccgagcagcaggacgctgatgcttcccagcgcgccgcccagagaggaagcgcaaccggaagcggaagaatccgccgcggtagtggtcggttcctgaagcgtgctgctgtcggcaccagcaccggaagttccggcgacagtcccggttgcagtgccgggaaccgactgggtagaggaatccgtctcagtgccggtcacgggttcagtcacaggttcggtggcggtttcggtcgcggactccgtctctgttccgccggaggtcggcagaggcaggataaactgcgccgagccgatccactcgccccggtcgaagctgcgcccccggacgatcaggcaattctcgtacagatagatgtagtagccctccgagccgacaatgccgacattggtcgcgatgcagctgtcatcccacaggtacgcgcaggacgcggtgctgacaacggaaggcagcgagccgtccgccggcttgaccgtatgcgcggactccattgtccagtggctgtgaccggagaacagcacgacctccggatactgccgcaggatacggcgcagctgagcggactgcttgacaccgtgccagttctgatactggaacgtgcccgcgacggtgtccatcagcccctgatgcaggaacaggaacgtgggacgcccctcgacgcgatcctttgccaatgtctcttccagccatgcaagctgtgcgttcgacaggtcggcgtgcagtcctgccgcctcaccgcccagaaatacaaagtggtaaccggaaatccaggtgtcgaaccagatggtttccgagctgtttccggttcccttgaggaagcgccggatctgccccttggcgtccagcccgccgtcaaagtcatggttgccgatggcacacagaacaggcggcagtccgtcgcctgcctgcgcgatgagccggttgaatgcctcatactcggcaacctgcccgtggtcagcaacgtctccgttgacgaaaatccccatactgttcggggaaatcgcccggatgtccgccagcgcctgggcaaagtgcttgttgtgcaggtggtcatccgagggattgatatggatgtcactcatgacctgcatctcgcccagcagggtaccgggatcaaaatccgccgcgccggcaggcaggagcgcctccgtgccggtcgcagagcaggcaccccgccgctgcgcaaaaacaagcagacggtcggctccagccgggatcagggtgttgtccgccagccgggtggtcgtggtagcgcccgtgcgggcaaaggtcgccgccgcgctccagccgggcagcacgccgtcggcatttgcccagtatgcaacataggacagcggcttggcactccccgcaccctcggtgacagtcagcttgccgtccgcacgcccggcaccaacgccgtcagatgtgtagacggcggaggcaggcgcatccggcacctgatccggcgccggcttcacggtaaatgcaacctgcgccagtacggtgtaaccgtcattggcgcacaggaacatgacataatccccggcaggaatctccaacagggaaccgcggtcgttccggaactccgcttcccgtatgttcttctgctcgccggacttgttaccgtcctgtgcgacatggtaccagtagatggacacctgcccgccgccgggaacaccgtcgccggcagcatacagtccgacccagtccgcaccggatccggtcgcggtcacaaggatatcctcgccctctgtgtacgtggttttatccagcgtcagcgtcccagcctccgccgtcacgggtactgccgacagggtggctgtcagcatcaggagcagcgcaagcagtacggctccggttgtctgtctgcgtttcatagcaaatcctccgcaatagttttatcgtttatgcgcagtattcagtcgttgtcggaaccggcaatgtgccgcgccacgaacacgccggacgccgaagcgtgcgagagcgagtgcgtcacgccggagcagtcgccgatgacatacagccccctgtggcgggtctgcagggtatggtcaatctcgacttccatgttgtagaacttgacctccacgccgtacagcagcgtgtcgtcgtttgcggtgccgggagcaatcttgtccagcgcataaatcatttcaatgatcccgtccagaatgcgcttgggcatgaccagactcaggtcgcctggcgttgccgacagggtcggctcgatgaatgcctcctcaatacgtccctgcgtactgcgctgtccgcggatgaggtcgccgaaacgctgaaccatcacgccgccgcccagcatattggacaaccgcgcaaccgattcgccatagccgttggaatccttgaacggctccgaaaaatgcttggaaaccagcagggcgaagttggtgttggcggtatgcttggcgggatcctcgtaggagtgcccgttgaccgtcacgatgccgttggtgttctcgttgaccaccacgccgtgcgggttcatgcagaaggtgcggaccagatcctggaatttctctgtccgatagatgattttggactcgtacaactcgtcggtcagatgagcgaacacctctgccggcagctcgacgcgcaccccgatgtccacgcggttggagcgcgtggggatctgcaggtcgcggcagaccgtctccatccacttactgccggagcgtccggcggaaatgacgcactgtgcgcccgtaaacacctggccgcggctgacgatggcaaagccttcctccgtcttgcggacctcctccaccggcgcattgaaatggaactccactttggcggacagctcctcgtacaggttcttcagcacgatatagtttatatcggttccgagatgccgcaccgaagcatccagaaggtgcagtccgttctgaaggcacatctttttgatgtggctgttggcagtggagtacagcgcggttccctgccctccgtgggaaaggttgatctcatcgacatatttcatcaggtcgatcgcctgctttttgccgatatactcgtgcagagtgccgccgaactggttcgtgatgttgtatttgccgtccgagaatgcgcccgctccgccgaagccgttcatgatggcacaggtcttgcaacccatgcaggatgtcactttcaccccatcaatggggcatttccgcctctccagcgggtttccggcttcaaaaactgctatgcgcagttccggtctgagtcgggacagttcataagcggtgaaaatgccgccgggacctgcgccgataatgataacgtcgtattggttctgatgattcatggtgggctgcctttctggattctatccgttctgttcgccaggtgcgccttggcacaacttattgtactttatcacagatatatcacaggaacatgacagaaatcaggacaatttgtaaatttacctacggtgggaagggctgccgatgccgcgcggggcaagccccgcgcggcacttgctatccctgccactgtggaaaacgcattggggggcttgccccgcgcggcatttgttatccctgccccgggggagaggaccatctcaaacgccgaagttcctctcccccggtcccccctctccttggctgccggcactaccaatagaaaggcggttctgacggttttgcgccaaactggcgacgccgaaggcaagcccccgccgggaaccataccggcagtgtctgtcagtgccgtaagcggtctgatgccggggtgccgggggctccgcccccggcaaaataaacttatagtctcccccttcccgctggaaaggggggtggagggatgggggcagacaaataagataaaggcagcgtcggcaggcgacaaagaaggtaagtcccccaccgggaaccatagtggcagtgtctgtcagtgctgtaaacggtctgatgccggggcgccgggggcggagcccccggcaaaataaacttatagtctcccccttcccgccgggaagggggtcagggggatgggggcagacaaataagctaaaggcaggataggcaggcgacaaagacggcaagccccccgccgggtacagcggtggcagggcgaaccggcgaaaaaagcggatcccgccaccgcaaaataatcgcaacaagggtagacaatgcgcaaaaactgtgatatactgtataggaaaacagagacacaggagaatataccccatgcactacacacaagccctgcgcggcttccaatgctttctttttgacctggacggcacactgctggactccatgccgctctgggacaaagtctacctgcaaacacttgcccactttggcatatccgttccggcagattacctcatgcatgtcaaccacctgagcgtccgcgacggtgccgtctatacagtgcagtcgctgggactggacacaacccccgaggagatcatccgcatttgggcttcgctgggaactgcggcataccgcgacagtatccagctcaagccgcacgcagccgacctgctccgcctgctccgggcggacggcaagacgctcggcattgccacagcgctgggcaaaggcttttttgagtcatgcctggcacggaacggcgtgctgtccctgttctcggactccaccagcgtggaggaggtcggcaggggcaaggatagccctgccatctacctgcgtgcgtgtgaaaaagccggcgccgcccccggcgagactgttgtgtttgaggacagcctgaccggtgcgaccagcgccaagcaggcaggcttttttgtggtcggtgtgtacgacgcttccgccgaggcacagcgcgccgacatgatccgcaccgccgatctgtacatcacggattaccgggatctgctgtatgactgaccgtaagcgtgccgccctcgcccggctgatgctgtttacaggcgcaatcctgtggggcagttcttacttcgtgctgaagaatacgctggacgaggtgccgctgttcctgctgctcagcatccggttctttttcgccggtctgatcctgctggctgtccgggcaccttacctgcgcagactgaaccgccgctgtctcggcaccggtgcgctgaccggtctttttctcgcgctggcatatatttttcagacagtcgggctgacgaacaccacgcccggaaccagcgcattcctgaccacggtgtactgtgtcctcgttccgtttctcagctttgcattcacgaaaagacgccccgacggctacaacatcgtcgcggcgattgcctgccttgccggcatcggtctgatcagtctggacacgggactgcgcttcacattttccggcgaagggctgacgctgatcggcggcgtattctttgccctgcagattgccgctgtggaaaaatggtgcgcagacgaggacgtcatcctgcacacagccatccagttcctgacggcgttcgccgtttgctttgcctgctcgctggctacggaaacgccaaccgtgaacttttccgggcgcacgctgctggcgctggtctacatcaccgtcttcgtaaccgcgctcgcctttgtgctgatgaatatcggcatcaaatacacgaccgcaaacacttcgtcactcatcctgagcacggaggcggtgttcggcgtcgctttctccatgctgttctatcgggaacgccccagcctgcaggaaatgatcggctttgccgttattcttgccgcggttctgctgagtgagctgaaaccgggcaaaaagacccccggacgctgagcggctggcgtccggggattggatccgggggagatgaggggagccggcaggcgggaaccgccatcaccccttcctccacacgaagcgattcacgacctcggtgtagctttggatgatgcgggcaaccttcacagacacattttcggcagtataatccggcacgggcgtgccgatactgccgtttttctgcatacttacggcaaggtcgattgactgcagcagctgctcggtccggatgccggcaagcacgaagcaccccgcgtccagcgcctcggggcgctcggtggacgtgcggatgcagacagcggggaagggcttccccaccgacaggtaaaagctgctttcctcaggcaatgtcccgctgtcggatacgaccgcaaacgaatgcatctggaggcagttataatcgtgaaatcccagcggttcatgggcgattacgcgcggatccagccggaagccggttgcttccagccgtttcctgctccgcggatggcaggagtagagaatcggcatatcgtacttttcagccatggcgttgatggctgtaaacagtgcggcgaaattggcgtccgtgtcaatattctcctcccgatgggcagacagcaggatgtactgccccttggtcagccccaaacgctgatggatgtcgctcgcttcaattctctccaggttggctcgcagaacctccgccatggggctacccaccacaaaggtgcgttccttcggcatgccgcactccatcagatagcggcgtgcgtgctctgaatagcagagattgacgtcgctgatgatatccacgatgcggcggttggtttcctccggaaggcattcgtccttacagcggtttcctgcctccatgtgaaagatcgggatgtgcagtcgctttgcaccgattacggacaggcaggagttggtgtcgcccagaaccagcaccgcatccggctttacctgcaccatcagcttataggagcgctcgatgatgttcccgattgttgcgccgaggtcgtcacccacggcatccagataatagtccggcgcccggagaccgaggtcgtcaaaaaacacctgattgagggtatagtcatagttctgaccggtgtgtacgaggatctgctcgaagtaccggtcacagcatttgattgtggcagacagtcggatgatctccggtcgcgtgccgacgatagtcatcagcttcagcttccccatgtctaatgtctacacctcctcaaagtaggtatccggtcggttcggatcaaagcattcgtttgcccacatgactgttaccagcgtgtcggtatcgctgaggttcgtgatgctgtgggtataccccggcagcatatggacagcctcgatgcgctcgccgctgacctcgaattccagaacctcatccgagtccagccggcgttcgcggatcagtccgtgaccggcaacgacaatgaaaaactcccacttgctgttgtgccagtgctgtcccttggtcacgccgggcttcgtgatattcacggaaaactgtccgcagttccgcgtcttcagaagctccgtaaagctgccgcgcgcgtccgcattcatctgcaggggaaacgcgactttttcctgcggcaggtaggaaagataggtggaatacagcttcttttccagactgcccgcaggcatatccggaagcagcagcgtctcgggctgggctcggaaactgcgcagcatcgcgacaatcctgcccagtgtcacgcggtgcgtcaccggcacatggcagaagcgctcaccgggaaccggcgtcagtccgtcatactcgcaacggtgtgcctgcccggacagcgcgcccagcagttccgcaaccagatcgtcgatatagagcagctccagctctgttgccggatcgctgaccgtgatcggcagatcgcgggcaatattgtggcagaaggtcgccacggcagaattatagttcgggcggcaccatttcccgaagacattggggaagcggtaaatcagcgcctccgcgccggtttcggcggcatgggcgcgnnnnnnnnnncagccgctcctcgcaggcacgcttggctttgccgtattcactgcctgcgtaacgcccgacaagcgacgcctgcgccgagcttgccagcatcacgggacagcggttgcctgcctgcttcagggcggtcagcagtatttccagtgagccggtgttgccggggaggtattcctctgccgttttcgggcggttcacgcccgcgagatggaacacaaaatccgctgttttgcagaaatcggcaagctgctccggtgtgttgtcggtatcgtacccgcagatatcccggatttccagttccggatgggtgcgatccttgccgtcgcggatagctttgagcgcctccgtcagattcttccccacgaatccgcgcgcacctgttatcagaatgttcatcagcaggaacctccgaacagcctgagcttcagcagtaattgcttcatttcctccacacacagccggctggtattgtgggaggtgtacgccccgatcctgccgagttccggatttcccttgctgaaatagttgtcatagttcaggttccggttgtccgccggaatgcggaagaacccgggcagatcctccgcccgaagcatctcctctgccgtcaccagcacctcaaagagcttctcgccgtgccgcgtcccgatggtcgttatgcccagatccgcatgcttcagctccagcaccgcctgcgccaacgtcccgatggtcgcggcaggggctttctgcacgaacaggtcaccctgctcgccgtgctcaaaggcgtagagaacaaggtcaacggcatcctccaacgtcatcatgaagcgggtcatatccgggttcgtgacggtcaggggctttccctcgtcaatctggtcgcagaacaggggaataaccgaaccgcgggacgccatgacattgccgtaccgcgtcaggcacagaacgggatcccctgccagcatctgccgggagcgggcaatcacattcttctccataacggctttggtcatacccatggcgttgatcgggtaggctgccttgtcggtggacaggaagattgccttccgcacatggttggcaacgcaggcagagatgacattgtccgagccgaccacgttggtcttgaccgcctccatggggtagaactcgcaggatggcacctgcttgagcgcggcggcgtgaaacacgtagtccacgccgcggaacgcgtttacaatcgaggtataatcccgcacatcgcctatgtagaaccggattttctccgcatactccggcatggtggtctgatatgtatgccgcatatcgtcctgcttcttctcatcccgtgagaggatgcggatttccgcaatgtcggtggtcaggaagcggcgcagaacggcgttcccgaaggagcctgtcccgccggtaatcaggagcgtttgattctggaaggatatcatctggtcttactcctctgtgtgattattttttggaaacgccggttgcttgcgggcgccgaagcggtgccgctgccccggtcagcgttcccttgctttccccggcagtacgccgcgcaagagaacggcatccagcatcagttttgcgttcggacgcagtgggcggatcagcgccggaagcaggatcgtggtggatacctgcgtaatcagggatgccgcggcagccccggacgcgccccacagggggatcagggcaaggttcagcacaacgttgagcgcggcggcgctgatgtacagatacttgaggtacttctgctgattctcgcacaccatccatgcgtttctggcaacgccgagataggagaacgccgtgtaccagaccacaatgcgcaacggcatgacagccgccaggtatttctccccgtacagagtcacaacaaagggctttgcaataaggcatatcagaacggatacgaacagggatgcatatataacgattgcgtagagctgtcggttcttcctttcgtagcgcaggcgatccttccggaagctctgcacgatctcggggtaaagcgagtcaatgaccgccgagagtaaaaaagcccacgaaacgctgaccgttgaggcaagagagtaatgcccgacggcatcagccccgagcatctgcttgagcatcagcttgtccgtgcaggcgtaaacagacaccatcagaccggcgataatgaagctgtaactgctttgcaggagttcccttgcctttttcaaggagcaacaaaaccgcaccccgccgttccggaaataggcaatcagcaaaaataccgccagcacgatgtaatccagcgcgcttgcaacggcgaaccactccacgctttttccgagcgccagcagaataatcttgtacgcggacatcgccgcatacgacaccagctcggcaatggcagaatatttggactgaagccgggactggaaccaataattcagcgtatcaaatacctggaagacaagtccgatgctgtacagtgccacgaccgcaacggtcagcggctcccccttgtccacaacgcttacgatgccgacgatagtcaaagccgagaacaggctggaaacagcccgcagaagcagggttgtcccgattgtttcgccttcctgctccggatgatccacgaagtttttgacgaggatgctgttgatgccaagcgtgcagagggaggcaaaaaaggtcgcatacgccgccgcgtaattgatcagaccgtaattgcccggtcccaggtagcgcgccgcaaaaacaccgaccacaaaagccagcagtttgtttgccaccttgccggctataatccagcccgcgtttttgacgactttattctttctgagcgtctgtagcaa

SEQ ID NO: 915 - DNA, 7509 bp, unidentified
  source 1..7509: mol_type = unassigned DNA
ttagaaatctgttaaatcagcagctcttctctctaagaaagcagtcataccttctgttttgtcatgagtagagcaggttacgccgaataagtttgcttccatctcaacagcgttcttgatgtccatatcataaccgttgttgattgctgcttttgcaacggaaacagcgtagcttcctttggagatgattttcttagccatagcttttgctgtgttcattaactcttccggagcaactactttattaacaagaccgatgcggtaagcttctgctgcatcaacggaatcgcaggtaaagatcatctcttttgcgcgtcccatgcctactaaacgggcaagtctctgtgtaccgccgaatccaggaatgattccaagacctgtctctggctgtgcgaaagtagcgttgtcagatgcgatacggatatcacatgccatggaaatttcacatccaccgccaagtgcaaaaccattaacagctgcgatcgttacctgacgcatgttcattaatttgaagaatggtacggaagctctcataccgaaagctcttgcttcagctgcggtaaagtttaccatctcagaaatatcagcgcctgctacgaaagatttgaattcgttgcctttcttgtcaggaccgccggttaagattacgactttgatgtcgtctcttgcttcgatctcagttaatgctgtgtttaactcgtctaatgtctcgctgtttaatgcgtttaatgctgctggtcttgaaattgtaagaacagcaatctcctcagcaacttccagttttaaattgttaaaatcgctcatcgtttggaaccctcctgaatagtttgataaaaaattaacaatatacgttattaatagcgtacagcttttccctgaatttgtcaatagattatgggaaaaattcactataaatttggtagaaaaagtgctatgataggtggtatgatattttgacaaagacacagaaaagaggaaaaaccatggacacaagcaaatcatacttatctaaggtagtaaaggagatgccggattcagggatcaaggacttttttgatattgcaaatacgatggagggagcattgtcacttggtgtcggcgagccggattttccgacaccggaacatgtcagggaggcagcgattgcttcaatcaaaagaggtgagacaaagtataccgataatcgcggtacggtcgaactccgtgcggcatctgcagagtatctggaaaagtttggacttcattatgacagagaaaatgaaattctgatcacaatgggggcgagtgagggaatcgatcttgcactccgcgcactggtggatccgggggatgaggtgttagttgtagaaccttgctatgtttcctatattccgtgtgtggaattgtgtggcggcattccggtttccatcccgttaaaggcagagaataaattccgcctgacgaaggaagaacttgaagaaaaaattacagataaaacaaaagtactgctgatctcattccccaataaccctaccggagcgatcatggaaaaagaggatttagaagcaatccgtgaggttgtgaccgcacatgatatttttgtgattacagatgagatttatgcagagctgacctatggcaaaaagcatgcatctattgcggcgctgccggatatgtatgagcgttgtgtggtattaaatggtttttcaaaagcatttgcaatgaccggatggcgtatgggtattgcagcgggtcctgcggaagttatttttcatatgaataagattcatcagtttacgaccatgtctgcaggaacaacgtcacaggtggcggcgcttgaagcactgacgagtccggttcgtgacgaagagatcgatgtgatgcgtaaagaatacgatgagagacgaaagatcatggtggacgggttccggaatatgggactggatgtgacagaaccggaaggtgcattttatgtattcccgtcgatcaaaaaaacaggacttaccagcatggaattttgtaaccgtctgctgcaggaacagaaggtggcagtcattccgggagacgcatttggaagttgtgcagagggttacatccgctgctcttatgcttattccaaagacattattaagaaatgtttagagaagatcgcagtatttgtcagccagtttgacctcaaataaggtactggtttgaaaaaaataagcgcagacatgaaggctgctatataacaaagaaagtttgagacatacatgttaaaagattacgacttaaagcaacttgtatccccattattgcaatggtttttaaatcatgcccgtgtattgccatggcgagaggaaccgactccataccgggtgtgggtttcggagatcatgctccagcagacgagagtggaggcggtaaagccgtattttgagcggtttaccacggcactgccggatgcaaaggcacttgcagtgtgtccggaggatgaacttttaaagctttgggaggggttaggttattataaccgtgtcaggaacatgcaaaaagcggctgtggaagttgtggaaaattatggtggacaacttccggcagattatgagaaactgttgaaactaaaggggatcggccattatacagcgggagcggtcgcatctatcgcatacggaatcccggttccggcggtcgatggaaatgtgctccgtgttttaacgcgcgtttctgcggatgatacggatatcatgaaacagtcattccgtaatgagatggaaaaattattagaaaaattgatgcatggggcagacggcagaaatgaaaaaaatgtatttccatggatggaggatgcagatgatctgagggcaaaggtatatcatcagaatcttgccggtgcgtttaaccaggcactcatggaacttggagcaacgatctgtgtgccaaacggtgcaccgctttgtaccgaatgtccatggaaggatttttgtgaggcaaaaaaacaggaactgatcggacagataccagtcaagagcaaggcaaaaccgcgaaagatcgagaaaaaaacggttctgattttaagggatgatgagaaggttgcaatccggaaaagaccggcaaagggacttttggcaggactgtatgagcttccgaatgtggaaggaaatatgggacaggaggaagtactttccatggtaaaagagatggggtatgcaccgatccgtattcagccgttaggtgaggcgaaacatattttttcccatatcgaatggcacatgacaggttatgcagtccgtgtagaggagccggaaatgcatccacaggtgcagtgtgaaaaaaatcgtgcagatggattattatttgtggaagcagaagatgcaaaagaaaaatatgctattccgtccgcttttgctgcgtatgcgaaatatatgaacattcttcttggaaatgaaaagaaagcttaaaagaaaatatttataaaaagagggagccggtgcaacagcaccggctattcattatgaaaaagagtgtgtatgaaaagtgaagtaattcactatttgctgggaggaaccttgcttatcggataagcaaggctacctgacttacatcaggtatgaaaaaaagttctatgaaaaattttaacttgttgccttaactttgaatttagtatatcggggaattgtgaccgccgtatgccctgtttgtgagaattatgtaaataaaatatgaacaactacatactttggcagaaattaagaatatctaaagaaaaatttgattggtttgcggtaggaaaatgtgtataatagaatggctatggtaaaacaaagtggaaaacaaagtggaaaacaaggaggattacatgtacgattgtatcgtgatcggcgcaggaattgcgggtgctgtcagtgcgagaaagcttgcagaggaagcaggaaagaaagtactggttttagagagacgcagtcatatcggaggtaactgctatgatgagccggatgaacatggaatattaatacataattatggaccacatatttttcatacaggaatagaagaagtatatcagtatctctcaagatttacggactggtatgcattcggacatgaggtggtagcaaaggtcggggatcgtctgatcccggttccgtttaatttaaatacgcttcatatggtatatgaaaaggaaaaagcagatgcattagagcagaaactgattgctgcatacggagagggaagccgcgtgccgatcatgaaactgcgggaaaatgaagatccggacatccgcgagatcgcacagtttgtgtacgaaaatgtatttttaaaatataccatgaagcagtggggacaaaaaccggaggatatcagcccggaagtgacaggccgtgtgccggtgctggtttcttatgacaaccgctattttcaggacaaatatcagggagtgccgaaggaaggtttcacaccgatgtttgagcgcatgttagaccatgagaacatcacggttgagacaggtgttgactgtaaagagagattgcgttttgaagaaaatcagatttattttgatggaacaccgtttgacggagagattatctatacgggcgcactggatgagttgtttgactgtcagtttggaaggcttccatatcgttccttaagatttgactttgaacattatgagaaagaatcttatcagggacacagcgtggtcaactacacggtcagtgaggattttacaagaatcacagagtttaagtatctgaccggacaaaagaacacggacggaaccacaatcgtgaaagagtatccgtttgcctacacaggagcggagggagaaattccttactatgcgatattagagccaaagaaccaggaactctatgaaaaatatcgtgcgcttgcaggtggactgccgcatttttatctgctcggacgactggcagaatacaaatactataatatcgatgcgatgacgaaaaaagcgatggaacttgctgatgcgatcatggcagaaaatacaaaaagataatcggaggattcatatatgaaattactgacatttgcgatcccgtgttacaattcacaggattacatggaaaactgtatcaaatccctgctgccgggtggcgatgatgttgagatcctgatcattgatgatgggtcaaaagacagcaccggtgacatagcagatgcctatgagaagaaatatccgggaatcatccgtgcaatccatcaggtaaatggaggacacggagaggctgtcaatgctggaatccgcaatgcgacaggactttattttaaagtggtagacagcgatgactgggtagatgaggaggcttataagaagattttagataaacttcgtgagctgaccggcggcaatcagaccctggatatgtttattgccaattatgtatatgaaaaagaaggtgcgcatcataaaaaagtgatgcactacacgaacctgccccaaaatcagatttttacctggaatgatgtgtcacgtttcagaaagggtcagtacattttgatgcattctgtgatttatcgtacaaaactgctgcgtgaatgtggattagagctgccgaaacatacattttatgtggataatatttatgtgtacaaaccattaccaagtgtaaaaacactgtattatatggatgtagatttttaccgttactttattggcagggaagatcagtcggtcaatgagaaagtgatgatcagccgtatcgaccagcagatcaatgtaaataagattatggtagatgaatttgatctctggaagattccaaaccgaaaactgcgtcattacatgtttaattatctggaaatcatcacggtcatttccacgattatgctgatccgctccggcactgaggaaaatcttctgaaaaaacgtgaactgtggaaatatattaaggatcacgacatccgtttattccatcatctgcgcgctggaattatgggaaatgcaatgaatctgccgggcaagggaggcagaaagatttcggttgcggcatatcgactgtcacagaaagtggtcggatttaattaagaggtagtgagagtatgagtgaagaaaataactggaattatggaaatgatgagccgaatgtaaatcagggaaatcctgtcagcctggagaaaagtacgactgatggtacagcaggtgtaaatttagagaagactgtgaccggaaatgaagagcgtgtaaattcagaaaagactatgacagacaatccgtattatacaaatacgtcatatggaaacggcaatacaaattataattacggacagtcaaatgacagtgcaggttataactatggacagtcaaacggaagtacagaatataattacggacaaccggctggcaggtatggaagtaataagtcagaaagtgaaggctttggtattgcgtcgttagtacttggaatcattacggttttgctgttctgtacctgtatcagctggatcaccggtattcttgcgattatttttggtatcatacagcttgtaaaaggaaacaaaaaaggaatggcgatcgttggtttgatcacaggtggaatcggttttgcagcatcgattattctgtatatcctgattttttttacaggacttggatcttatagcagctataatgacatctatgatcatatttacgatgatatctatgatgatattgaagacagtatggatgacggaacgatataataagactgccgagcgaagcgagtgtagatcacgatcatgatatagaaatttttaatggagagggttatggaagagttattgacagtcagtggattatccaagacatttcacttgtcaaaaaaacagcagaaattagaaaagacaacggaaaaagtgaaggttgcggtggatgatctttccttttgtacttacaggggggaagtttttggattattagggcccaatggagcgggaaagacaacaacgcttcgcatgttagcaacgctgatcaaaccggataaaggtgatgcacggatcgatggcagcagcattgtgacagatccaaacggtgtgcggaaaaaaatcggatttctgacgagcgaattaaaactggaagaattttttactccgaactatctgtttgattttttctcagaattatacggtgtcgatcaggcagagcgggatgagagaaaacgtatcctgtttcagaaatttggtgtggatgagtttgcggaagtgaaggttgcaaatctctccactggtatgaaacagaaagtatccctgatcatttcactggtgcatgatccgcagatcattatttttgatgagccgacaaacggacttgatgttatcacggcgaaggttgtgaccgattttctgcaggaattgaaagcagaaggaaaaacgatcattgtatcaacacatattttttcactgatcgaaaagatctgcgaccgtgtcggcattatcatcaacggaaaaatggttttgtgtgacacgctttcccatgtgacggcggaaatgccacttgaggataagttctttgaaatctatcgggaaacggcaggtgagatcgcatga

SEQ ID NO: 916 - DNA, 24841 bp, unidentified
  source 1..24841: mol_type = unassigned DNA
acgccgacacctgcgacgcactttcaagctacggcgataccgcgaagaagctggaaattttaaaggacccccactgcggcgcgttcgcggtcattcggctgtgcagctactttgcggcgtattttgcgctgtgcggctgtgtggtgttcaccccgcgggtcggcgtgctctggacgctggcgctggtgggggagcgggcgctgtccgggctggccgtggcggcgttcccgctggcgaaaaacaccggccttgcccacacctttgccacggcggcggaccgcgtccgcgtgcggcaggtgctggccgcgctctgcgccatgctggccgtggggctgactgcactgggcggctgggcgctggtgctggccgcaggctacgtttttgcgcggtactacgttgtttcaaaaaaacagtttggcggtgtgaccggtgatctggccgggtggttcctgcaaaaatgcgagatctggatgctggcggcgctggccgcctgccaatggctgggggtgctgtaaatggtgtttgtgacagggccgctctgcagcggcaagcgcacctttgcgcaaaagctcggcgggcggcaggtgtacgacgtgcaggatttggccgccgacgccgccgatttgaaccggctggccgacgagctggcagattatgatgttgtgaccgcggcggaggtcggcggcggcgttgtgccgattgaccccgccgcgcgtgccgcgcgggaggcggcgggccgtctggcctgtctgctggccgcgcgagcggactgcgttgtgcagatgttttgcggtctgccgacgattttgaaaggagaacttccgaaatgctgatttatttactgcgccacggcctgaccgagtacaacgcccagaagcgctatcagggtcagcgggacatcccgctctcgcccgaggggctggcccagctgcgccgggctgatattgacccgaaggttgtctatatttccacgctgcagcgtacaaggcagacggcggaggtgctgttcccggacgcggagctcgtgcccgtggacgggctgaaggagatgtgcttcggcagctttgaaggccgcaattatattgagatggagcacgaccccgactatcaggcgtgggtcgccgccaactgcgagagcagctgccccgatggtgagcgcaaggatgatttcagtgaccgcgtatgccgcacgtttgcggcgctggtggataaggcactggccgacggcgaggaaatgctggtgatcctggcccacggcggcacccagatggccgcgttggagcgctacggcgtgccgcgccgcagctattaccggtggtgcggccccaacgcgggcggctatgtgctggacgcccgcgactgggcggcgcggcatgagctgcgtttggtcaagaccgtgcagtacacgaaggagagcacatgctgattttttgggcggtgctgggtggctttttgctggacgctctgtttggcgacccggcgtggctgccgcatccggtggtgctcatgggccggtgcatctcggcgctggaaaagcacctgcgcaccgcactgcccaaaacgccgcggggcgagctggtcggcggggccgcggtggctgcggtgctgccgctgggcacgctggccgttaccgggcttgcctgctgggccgcggcaaggctccatccggcgctggggctggcgctgcaaatgctctggtgcggccaggcgctggcagccaagggtcttgcacaggagagccgcaatgtgtacaaggaactggcaaagggcgacctgcccgcggcccgcagggccgtggcccgcatcgtgggccgtgacacgcaaaacctaaccgccgcgggcgtgaccagagccgccgtggagaccgtggccgagaacgccagcgacggcgtcattgcgccgcttttgtatatgctccttggcggggcaccgctggcgctgacctacaaggccatcaacacgatggacagcatgctcggctacaaaaacgaaaaatatctttatttcgggcgctgtgccgccaaattggacgatgccgccaactggctgcccagccgcctggctgcactgctctgggtggctgcggcggcgctgacgggcaacagcgcccgcggggcgtggcgcatctggcggcgggaccgccgccgccacgccagccccaacagcgcccagaccgagagcgcctgcgccggggcactgggcgtgcagctggctggcccggcctattactttggcgaatattacgataagccgacaattggcgacccgctgcgggagatcgagccgcgggacatcctgcgtgctaaccgcatgatgtacgccgagagcctgctggcccttgtgctggggctggccgtgcggctgatgcttgtcttgtgagggaatgcggaatggaactggtacacggcggcgactgggcgggctatcgggccgagtttggccgggacgcgctggatttttcggccaacgtcagcccgctggggctgcccgcgggcgtggcggcggccatcacagcggcactgcccatggcggatcgctacccggacccgctctgccgggcactgcgcactaagctggccgcggcagagggtgtggatcctgcgcaaattttgtgcggcaacggtgcggcggatctgatctaccgcctggcactggccctgcgcccgcggcgcgcattgctgcccgcgccgacctttgccgagtacgctgctgcgctgaaaacggtggattgtgacgtacagcggtttcttttgcgggaagaaaatgactttgccgtgacggacggctttgtagacgccatcgacgacagcaccgatgcagtgttcctctgccagcccaacaaccccaccgggcaggtcacgccgctcgttatggtgcaaaagctgctgcgccgctgtgccgactgcggcgcggtgctggtcgtggatgagtgcttcctcgacttcctcgccgcgcgggatgccctgacagctaagacagttttgcgcgatgcaccgaaccttataatcttaaaggcattcaccaagctctacgctatggccggggtgcggctggggtatgcgctgtgcagtgacgcggcgctgctggacaaaatgcgcgcggcgggccagccgtgggccgtgtccggtctggcacaggccgcagggctggccgcactggaggagaccgcctatgccgacagcgtgcgaacactcattgccgaccagcgcccaaggctggccgcgggactgcgggcactgggactgcgggtcgtggacggacaggccaactacctgctgttccgcgcaccggcggactttggggcaaagctgcgccgtcacggtgcggtggtgcgcggctgcggcaactacccggggctggacgagacgtggtaccgcaccgctgtgcgcacccaaaaagaaaacgaacagctgttgaaaattatgcgggaggtgctggcatgagccgggcagggtgcatcatggtgcaggggacgatgagcggcgcgggcaaaagcctgctgtgcgcggcgctctgccgcatttttgcgcaggacggctacaaaaccgcgccgttcaaaagccagaacatggcgctgaacagctttgtgacccgggacggcctcgaaatgggccgcgcacaggtcgtgcaggcgcaggccgcgggcgtcgagcccgatgtgcggatgaacccgatcctgctcaagccgagcagcgatgtgggcagccaggtcatcgtgaacggtgaggtccgcggcgatatgcccgcaaaggaatacttccgccgcaaaaagtcgctgattcccgatattctgcgtgcctacaacagccttgccgatgaatttgacatcatcgtcatcgagggcgcgggcagtcccgccgagatcaacctgaaggcggacgacattgtcaacatggggctggcaaagctcgtggacgcgccggttctgctggcgggcgacattgaccgcggcggcgtctttgcgcagctgtacggcacggtggcgctgctggagccggacgagcgtgcgcgtatatgcgggcttatcatcaataaattccgcggcgacgtagaaattttgcgccccgggctggcaatgctggaggaaaaaacacagctgccggtgctgggcgtcgtgccgtacctgcgggtggacatcgaggacgaggactcgcttgcgccgcggctgcaaagcaaaagcgcggtcaagccgctggacgcagctgttttgaaattgccgcatatttccaattttaccgattttatgccgctggagcagcacccgcttttgggtgtgcggtacgtgcagtccgtgcgggagctgggtgcgccggatctggtcattctgcccggcaccaaaaacacggtgaacgacctgctgtggctgcgccagtccgggctggaggccgctgtgctcaagctggcagcaggcggcacgccggtgctgggcgtctgcggcggctatcagctgctgggcgagacgctcgacgacagtcagggcaccgagagcggccatccgcagacactgcgcgggttgggtctgctgccgacgcggacggtctttaccgccgaaaagcgccgcgcacaggtcacggcgacggctgccgcgccctttgccggggctgcgctgaccggatatgaaattcacacgggccgcaccgcggtgaacggcgctccgttctgccactacgccgacggcacaccggagggctgcgtgcaaaacgccgtgttcggcacctacctgcacggcctgtttgacagcggcgaattgacggagcagttggccgcgtacctctgccgccgcaagggaatcgcgccggagaccgccgcgccgcttgcgatggccgactaccgcacacagcagctggacctgctggccgacggcgtgcgcagtgcgttggacatggacgccgtctacgcggccatgggtctgcacaatcccggaggaggaaaaaaatgacaccgcagcatcatctgcccgccgatattgagcgcacgagcatgggcattatcacagcggagctggccgcgcgcgggcttgcggttccgcccgaaaacgccgccgtggtcaagcgcgttattcacacgacagcggattttgattacgccgagaacctgcgcttcacacccggcgcggcggcggcgggcgtcgcggccatgcgtgccggggcagtggtcatcaccgacaccaacatggcgctggcgggcatcacaaagcccggtctggccaaattgggcgggcaggcactctgctttatggccgaccccgctgtcgccgctgctgcgaaggcggcgggctcgacccgggctgccgccgccatgcacagggccgcgcgggagtaccccggcgcggtgctggccgttggcaacgcccccacggcgctgctgacgattgcggacgagatcgaaagcggtctgcgccccgcgctggtcatcgccgtgcccgtcggctttgtgaatgtggtggaaagcaaggaacggctgtttgcggtttgcacgcagtacggcgtgcccgccatcgccgccatgggccgcaagggcggcagcaacgtggctgccgccatctgcaacgcgctggtgtattccgccgccgagatgctcgaccctgcggcaagaggatggcagtaatacactttctacccccggtgtttccctacaaccgaaaattttggcgcggaggaggcgttttgcctcctccgcttttttgtttccctatagctttcagccttatgcgtgaagatggtgcttgagctttctgtaactgctgacgtaatttttcataatgcgctcgattttgcttgactgcgcgaccatttacgaatgtggatcttcgtttaaagacgttaaatagcaatagaattacggaaatatcaggtcaggacccaagcgcccatcagaatggccagaaacactacattggaaatagtaaacatcgcaaaatagtgccctttttcagcaggtacttcatttgcaatctgtcgataagaaatcaggcttgccatggatgcaattaatgtgccaaggccaccaaggtttgtgccaataatcagcgcacggaaattatcggtaaatcctgaaagcaggatggcagcaggcacattactagtcacttgagaggccagaacggatactaaaacctcatggccggccagaatattctgcaaccatccagagaacgcttccatccgacctaagttcccaatgaaaatgaacagtgctacaaaggtaagaatcagagaatagtctacgcggccaagagtgggacggtcggcaaagaaggtgcacaccaagatagcgacgaatgcaacaccgtatgggagaacacgcaatacaaccaataaacaggcgacaaacagaataccgtacaacgcaatgagtttcttgttgggttctgagtttaccgcagaatgagttacaacaatgtcggaaccttcacggcatagccataccgcccatgtagcaataagcactaatgatatgatggaataggggagcatcaacagaacaaaagagctcatatccatcccgctcttgccatacaaatacaggttttggggattgcccagtggtgtaagcatactgccaaggttggcagctatcgtctgcatacagacgatagggaggagcagtttgctgcgaacagatgtgttcaaactattcagaacgacaaacgtaaatggtacgaatgtcagcagcgatacatcgtttgttatcagcatactgctgaagaagcataggccaacgagaacaaccgttaactgcaaagtggtgcgggtatgagataggagggcatggccgagtctatcaaatacgctttgccctctcagtccggccataactgtcattagcgaaaacaggattgcaagagtacggaaatcgatatatccgaggtattctgcgtccggggggacaaagaaagcggaaatgatcgccaaacaggtggcaatgctcaggacaggttctttctgaaaaatgtgcttactcatcataaataagattctctttccgatcattcgttatctcttccggacggcaaaaccaaaagctgtaccgcaaataccaccgacaatgtgcataaagttagctacattatcttgtataaagaggatactgtatacctgctggcttaagtacagcacgccaaccaagatgaaggtgatagggatacctccattcttactgccggccaaactggagagcatgatgagcatgaatacgataccggatgcaccaagcaatgcagaagtggggaacagcacacactgcaatatgccggataccagcgcggtcataaggataccgcttagaagtgttcggcttccgtatcgttcttccaaagggggagcgacaacaaggaagaggagcatattgtttataaagtgatcccaaccgccgtggccaaggacatgaccgaacaaccggacatagaatagcggatccgtcatcgacgagcgatacacactaaacaggtgcgaggttgtccagctgtttgttaagtagcccaataccagagaggcgagggacaaaaagaaaaaggtcagtgtgacgggggcattgtattggagccggatgctgcgtttcatagaagttcctccatccttattggatagtattagtatagcacattagagcgaaatatgttgcagaatagaaaataatctgggagagtaaaagagaaagtaaataaaaccatttaaaggcgattggatatttcacagggaagatatgcagcagcggtcaaatcgcagtcagcaagggatgcccctgcggggggataatttgtgtgctctccttttataataccggaagatgagaaaaacggcgattcaattagataaatatttttacctaataatattgacattcgaaacaaacgtggtataatgacctcattgacaattacgtcaatttatttagttaaattatgtgaggtacgtaatatgagctttgaagaagtaaaagaagtatttgttgacaccctgaactgcgatgctgataaggtcaccatggatgccagcctgaccgacgacctgcaggcggacagcctggatgcggtagagctgaacatggcgtttgaggacaagttcggcattacgattgccgatgaggatctggggacgctcaaaaccgtgggcgatatcttcaactatctggctgcgcgggcagcctaaagggtattgtaggatgagtgccattgaaaagctgttcccgaccagcccgcaggagcgcagttttcagatgaaagcccgccgcgatgccggcacggctgcgcccaactgggtgccgccgcaatttgtcgagtgcaaaaaatgcggccgccgtgccacgcggcaggtttgggtcaagagccagtatgtctgccccaactgcggggtgcatttggcaatcggcgcctattatcggctcagcacggttctggaccacggaacttttaaagaactgaacccggacattgcgcccaacgatgtgctgcattttcccgattatcaggaaaagctggccgctgcttcggtcaagaccggcctgaaagaagccgccgttacagcaatcggcaggatcggcggcgtgcaggcggtggtcgctgtgctggacagccgtttttttatgggcagcatgagcaccgctgttggtgaaaaaattacacgtgcgattgagtacgctgccgacaagcacctgccgctcattattttttctgccagtggcggcgcacggatgcaggagggcattttcagcctgatgcagatggccaaaaccagcgccgcgctggaacggttcaaccgcagcggcgggttgtacatcagcgtgctgacccaccccaccacaggcggggtcacggccagctttgccagtctgggtgatattacgctcgccgaaccgggggcactcatcggctttgccgggccgcgcgtcattgaacagaccatcggtgaaaaactgcccggcgggttccagcgcagcgagttccagctggaacacggttttgtggatcaggtcgtgccgcgcaccgagttgaaagaggtcttgacgcggatcttgcagctccacacgcaggggaggaagcgcagatgatcaaagaagttttgcagcagttggaaccgctggacgcgcagatcgacgcgctgtgcagccgtgccgatgacgccgaaatggcgagcacgaccacccatgcggctgaactggctgagctttccgcagaggaaaacacgcttttacagcaatgcacctcgctgacgccggcggaccgcgtttttctggcccgccgccctgaccgcccgcatataaccgaaatgatcgacaacctgtttactgacttttttgagcagtgcggtgaccgacaatgcaaagaggatgcggccattttatgcgggatcgcacggttccacgggatgcccgttaccgttttggggcaccgcaaagggactacgctggaagaaaacctgcgctgcaactttggcatgccgggaccggagggctaccgcaaggccctgcgcgtgatgaaacaggcggaaaaatttcaccgtcccatcatcacttttattgacactcccggtgcttaccccggcaaggatgcggaagaacgcggccaaggggaagccattgcccgcaacctgatggagatgagcggcctgaccgtcccggtactggccattgtcacaggtgaggggtccagcggcggcgcgctgggtctgggcgttgccaaccacattctgatgctggaaaatgccgtgtactcagtgctcagccccgaggggtttgccagtattctgtggaaagatgcttcccgcagcggcgaggcctgcaccatgatgaagctgacggcacaggacctgtacgcagatggcattgtggaagagatcatccccgaaccgctgggcggcgcacagcgtggacggcagctgcttttcagccggttggacaccgccattgcggtgcaccttgccgctttatgtaagatgagcggcaaagcgttggcagaacagcgctacaaaaaataccgccgcatcggagaaatgaggggcgcatgaaaggtttacagctgttggctaccggcggggcattgcccggccgtgtagtgacgaacgaggacttgcgccgacaggtggacaccagcgacgaatggatcacgacccgcaccggcatctgccagcgctattactgcaccgaaaacgaggatgccgccacgctggctatcaccgccgcccgtcaggccctgacccgcagcggtctggcggcaaacgacattgcctgctgtgttgtggcaacgctctcggccccgacggctaccccaagcattgcctgccgcgtacaggctgccttgggtctgccggaaaaccggcctgcctttgatgtaaatgcggcctgttcgggctttatttatgccgccgccgcggcccacgggctcctgagcacgctgggcgggcggtatgcgctggtcattggctgcgaggcactctcccgcatggtggacccgactgaccgcacgacctgtgtattgtttggcgacggcgcgggtgcggctgtttttgagctggccgaaaatgcaccgttcgccgtaacgttaggcgcacggggcagtgaagcgatccgcgcgggcggccctgcggcctgcgataccgcgccgatcacgatggatggcagggcggttttccgctttgccgtggaggctatgccgcgctgcctgcaagccgtgctggaccgcagccaaaagacattgtctgatctggactgggtagtctgccaccaggccaacagccgcataatcgaccattgtgtcaaaagtttacacgcagaaccgtcaaagttttacaaaaacataagccgtcacggcaacaccagtgctgccagcatcccgattgccctgcacgaaatggcggaaagtgatctgctgcgacccggccagacgctggcctgcatcggctttggcggcgggctgacatggggcgggatgctgctgacgtatgagggtggaaaatgaagctgctcaatgaaattttaggtacaaaatatcccattatacagggcggcatggccaatatcgccacgggcgagtttgccgctgcctgttccaacgccggggcgctggggctgatcggctccggcggcatggacgcggactccctgcgggaaaacatccgccgctgccgcgcactgaccgacaagccctttggtgtgaacatcatgctgatgcacccgcaggcggatgaatttgccaaaatcgtggtggaggagggcgtaaagctcgtcaccaccggggcgggaaatccgggaaagtacatggccgcgtggaaagcagccggtatcacggtcattcccgtggtggcggcagccattttggccaaacatctggaaccgctcggcattgacgccgttattgccgaaggtaccgagagcggcggccatgtgggcgagatgaccacgatggcacttgtcccgcaggtcgtcgatgccgtccatgtgccggtcatcgctgcgggcggcattgccgatggacgagggctggctgcggcgctggcattgggggcgtgcggtgtgcaggtcggtacctgtctgctggcgagcaccgagtgccccatccatgaaaactataaagccgccctgttaaaagcccgcgacagtgataccatcgtgaccgggcgcatcggcggcacccctgtacgtgtactgaaaaaccgcatgagccgcgagtatgtccgccaggaaaaggccggggctgataaaatggcgctggaacgctttactttaggcagtctgcgcaaggctgtgtttgacggtgacaccgagaatggcagcctgatggccggacaggccgcagggctgctgcacgaagtccgcccggtggaagaaatttttgccgtgatggtaagcgaagccaaagactgcatcgccggggtgtacaaggagatcaccttatgaaactagcatttttatacgccgggcagggaagccagcacgccggtatgggccgggatctttatgagactttcccggctttccgcgctgcttttgacgaagccgacgcggcggtggattttgatttgaaagaagtctgctttaccgacgcagccggtgtattgaacgagacccaatacacccagccctgcatgacggcgtttgccgccggccttactgccgtactgcgggaggcaggcatcacaccggattatgcggcagggctgtcgctgggagagtattccgccctggcctgtgcgggggtgttcgatgtgcagaccgcagtcgctttaaccgccttccgcggtaaggcaatggctgcggctgcggcggggcgcacctgcgggatgacagccgttttggggctggacgaagcccccttgcaggcatgctgcaatgcagccgccgacgaaggcgttgtgcagatctgcaactacaactgccccggccagctggtcattggcggcgacaaggccgctgtcgataaagctgccgagttggcgcttgctgccggggcacggcgctgcctgccgctgaatgtcagcggcccgttccatacctcattgatgcacccggcaggggatgcactgcgggaaaaatgtaaggctgtccactttgcgccgatgcagttccctgtgctgttcaactgcctgggacacgagatggaggaaaccgacaccattgccgcattgctggaaaaacaggtgcagtccggcgtgcgttgggaggtgaccgtccgccgtctggcagaattgggtgtggatgccgccattgagatcggtcccggcagggcgttgaccgggtttgtcaaaaagactgtgggcagtgctatctcgtgctatccggtggaaactgccgcgcagctgcaacagctgctgcgcaccatgaaaggagcctgaccatgccgcaaaccgaaaacttgcgccgtgccgctctggttacgggcggggccaaaggcattggccgtgccatttgccgggctttggccgaaaacggcatgaacattgccgtcaactatgccggcagcgctgccgctgccgaggaaacagccgcagcctgccgcgcccttggcgtgcaggctgtcacgctgcaggcggatgtgcgcagccccgaagcatgtcagaaactggtagaagataccgttgccgcttttgggcggatcgatgtgctggtcaacaacgcgggcattaccgccgacaaattgcttctgcggatgaccgaagctgattttgacaatgtgcttgccaccaacctgaagggagcgttcttctgcaccaaagcggcctgccgctttatgatgcaccagcggtatgggcgcattatcagcgtcagcagtgttgtcggtctgcacggcaacgcggggcaggccaactacgcagccagcaaggcggggctgatcggcctgacgaaaagcgctgccaaagagtatgctgcccgcaatatcaccgccaacgttgtggctcccgggtttattgcaacagatatgaccgccgtgctgtcagaaccggcccgtgccgcagcacaatcggccatcccggcaggcaaaatcggccatgccgaggatgttgcggcggcggtggcttttctggcaggggagcaggccgggtatattaccgggcaggtcctttgcgttgacggcggaatgggaatgtgaggtgtgcaatggacacaaaaaagaaacgccgggtcgttattaccggccttggcacggtaaatcctaccggcaatacggtggcagaaagctgggcaaacattaaggctggccgctgcgcagtaggaccgatcacggcttttgatacggctgattttaaagtaaagctggccgcagaggtcaaggactttgaccccgccgcgcgcatcgacaagcgcgaagcccgcaaaatggcacgctttacccagtttgccgtggccgccgccgacgaagccgtccgcgacagcggccttgcgctggaagaaatcgaccatacgcggtttggcgtgatcctttccagcggcatcggcggcctgcccaccatcgaggaagaacacacccgcggtcagcagcgcggctttgaaaaggtcagcccctattttgtccccatgtccattggcaatatggcggcggggcagatcgccatccgtttcggcttgcagggcatgtgcagctgccccaccactgcctgtgcaggcggcaccaatgcaatcggcgatgcgttccaccgtatccgcgatggatacgaggaccgcatgctctgcggcggcagcgaaagctgcatcagcccgctgggcgtgggcggctttgccagcatgaaagccctttgcacggcggacgacccggcccgggcctcgatcccttttgatgcccgccgcagcggctttgtgatgggcgagggcagcggcgtactgctgctggaagaactcgaggccgccaaagcgcgcggtgccaaaatttatgccgaggtcgtgggctatggcgctaactgcgacgcctaccactttaccgccccggcaccggacggcgcaggcggtgcggcctgtatgcggctggcgctggccgacggcggggtagtgcctgaacagatcggctacatcaacgcccacgggacgtccacccacctgaatgacagctgcgagacaactgccatcaaaacggtgttcggcggccatgcgtacaagctggccgtgtcttccaccaagtcgatgaccggccatctgctgggcggtgcaggcggggtagagggcgtatttaccgcgctggctctgcacgatgcctttttgcccgccaccgtcaatttgcaggagccggacccggagctggatctggactatatccccaaccatgggcgcgcggcgcaggtggagtatgccatgagcgatagtctgggctttggcggccataacgcctgcgtggtattcaaacactgggagggatgaggatgaactatacgccaaatgagccgccccgagccatgagcgcggcagagatcgaagagatcctgccgcaccgttacccgtttgctttggtggataagatcctggactacacccccggccaatgggcgcggggcgtcaaatgcgtgacccgcacggagccgttttttgaggggcactttccgggacaccccgttatgcccggtgtgctgattctggaagcgctggcccagaccggggcggtagccgcgttaagcctgccggaaaaccgcggaaagctcgccctgttcggcggcgtaaaaaacgcccgtttccgtcggcaggtcatacccggcgatgtgctgatattggaatgtgagctgatagaacagcatggcccggtaggcatcggcaaggccaccgcatgggtagacggcgtgcgcgcggccaacgctgagctgacgtttgttctcacggatgcctgagggctggttttacatggcggaatgtgctataataaatccactaacctacagggggattctcgctatgctggaccagacattcggacgggtatataccaaattcaaactgcacttctataagcagatcttcagtcgattcgaggatcgcgaggccacgctgacgacggtagaatctttctgcatggaagtcatcatggcattgggcgaacctacgattgcgcagttcagccacatgatgaatctttctacccccaacgccgcctataagatcaactcgctggtcaaaaaaggctatgtagagcgcattcagtccaccatcgacaagcgggaataccgcctgcgcccgacccaaaagtacattgattactataacatcagttattcctacttgcaccttgtcatggagcgcgctaaacagcgcttcgatcccgatgacctggctaaattggaggaaatgctgcaagtcgtctccgatgagctgatgccggagattcaactgcctgaataattataccgattctaaaatcgtctgagatgacgacctaaggcaataccgcataattcccgcgaattatgcggtattgccttatatttgcttacgctgcccagcgaaaaaatcttgaaacgattccgcggcaatgctataatacatactgtatacgttggtatatactgttcaagaaagctgctgacaacccgatgcgatggaggctgccatgaccttcctgaaatcggcggtacggaaatgaaatcaaaatgcagccgcctggggcggagaaagatgggaaagaatgaaaaactccggaacgcgcaaagccatgcagaccccgacatggagaagcatctgtgcgatgctgtgcctgctgctgttgctgccggctctgtttcctgtgaaggctgccgcagaaaccgtccctgcaaaggtcgtccgtgtcggctcgtttgaggacaccttcaactatgtcaacgagaagggcataagaaagggctacggctacgaattgctgcagaccttatccggctatacaggctggcagctcgagtatgtgacctgcgactggtcagactgctttgaaaaactcaaaaacggcgaaatcgacattatgggcgatatttcctatacggaggaccgcaccgaggagatgctgttttcggacgagccgatgggggaggaaaaagattacctctacgccgatctctcgcgcgaggacatcaccgcttccgacttcaagacgctgaacggcaaaaagatcggcgttctgatgggaaccgcgccggaggtgatgctgaccgaatgggaagaaaaatacgacctgaaaacgcagcacgtcaacatctccaacaatgaggatgccaagcaaaagctggcaaaccatgagatcgactgctttgtttcgatggaagaatccttctggacggagcttggaatctcgaccataacccgcgtgggaagctccgacatctactatgcaatcaacaaagaccgtgcggatatcaaggaagaactggacaatgcgatgcgcgcgctggaggacgccgatcctttttatacggcggatctctataaaaggtatttctcgatggattataccccgatccttacgggagaggaaaaggcgtggctcaaaaagcacggcgcgatccggatgggctttctgacgggtgacagcggcgtcagcgtctatgacccttccaccggggaacttaccgggaccatcacggactatattcggtttgccaaggattgtctgggaaatcaggagctggaattccagatggtcggttatgacagccaaaaagcggaacttgatgcgctgaaatcaggcgagatcgacatggtattccatttcgaccagagtcccaatctggcggaagagtatcgcgttgcctgtaccaacacaacgtggacctccaacatgatggcggtcacgaacaaagagcactttaacgaaacccaagcgaaccgcgttgccgttccgcaaaacaagctctccctggcaaggtaccttgcggtttattatccgcagtgggagatcgtggactgcgctgcacaggaggatgcggcaaggctggtcaaggacggacaggcggactgctttgtcacaggggtcagcagccaggaaaactacagtaagaaatacgacttttacagcgttccgctgctcaaccctgccaaatcctgctttgcggtcaacagcggaaacggcatactgctgtccatcctgaacaaaacgatcaaggccatgccggtcaatatgcttaccggcgcgctggcaatgtacaaaagcgccgcgcggaaagttacccttggcgagtttataagggacaacttcgttatggtcctgctggtcagcagcatttttgttgcagtcattctgctcgcaatcctgaagctgctccggaaggcacgcaaagccgaagctgccgcaagaaaagccgcgaacgatacgcaggagctgaatgcaaaattgcagatcgctgcggaaaacgccgagagcgcaaaccgggccaaatccaccttcctgttcaatatgtcgcatgacatccgcacgcccatgaacgccattatcggctacgcagaccttgccgcccggcattcggacgagcctgccaagctggaaaaatacatggagaacattcaggtgtgcgggcagaacctgctgatgctgttgaacaatgtgctggaccttgcccgcatcgagaacgataaaacggaaatggagtattcggtttcggatgtcgagaaggatttccgcaattgcattgcgatgttccagaatcaggcagacagcaaggggcagacgcttacggtgacaacgcacctgctgcacccgtatgtctatgcggatgttccgcacctgacggaggtctgtacaaacctcgtcagcaacgctgtcaaatacacaggaaacggcggcacgatctgctgcgatgttacgcagaagcccggcgaaaaagagggctggtgcgatacggtggtcacggttgccgacaacggcatcggcatgtcgcaggagttccagaagcatatctttgaaccgtttgaacgggaacgcacgtccaccgtcagcaaggtggaaggcagcggcatcgggatgggcatcgtgaaaaagctggtcgggctgatgggcggcaccgtggaggtggagagcaaaatcggtgttggctccacgtttacggtgaccattccctgccgtattgcgtccgaggatgaaatacaggcgaaacgagagatcaacccttcggatcaaaagtgcctgcgcggcacaagaatcctgctgaccgaggacaacgacctcaatgcggagatcgccaccgagctgctgcaggaggaaggctgtacggtagaccgcgcgaaagacggtgtagaatgcgtggatatgctggaaaaagctgcgaacggaacgtatcagctgatccttatggacgtccagatgcccgtgatgaacggctacgatgcgacaaaaaagattcggagaatggacgatcctcaaaaagcaaatatccccaacgtcgccatgacggcaaatgcattttccgaagataaacaggtggcgctggacgccgggatgaacgaccatatcgcaaagccgatcaatatgagcgttcttgtgccgaccctgcggaaatacctttgatgcggacaggaagtcatcgcataatcgtatataagaacgacccataaatcaaaataccgccggggagccttcccgtttttgggaaggctccccggcggatttttgtgaagcgcagcttatctacctgaaatagcgtgcacaccgcaatgtgtggttttctttatggcgttctgcggctctgccttagttgggcgcggtactcggcgggggtgatgccgtacagtgcgcggaaactctttaaaaagctgctgtaatttgcaaaaccgctggcggtgcaggcgtccagtacgccggtgccgtcggcgagctcgttgcggcagtgctgcatacgcaggttggtcagatacccgtgtatactttccagcgtgtactctttgaacacgcgggacaggtgctcccggctggtgtaggtgtactttgccagctgggccacggtcagatgcgggtcggtgtagttggcctgaaggtaagcaaccgccttggcgacgagcagactggtggccgagggcggcggggcattgtgccgccgggtcacaacttggcggatcagcaaaatcagctccgtgacctcgcagcattgcacggtatcgcgtattttttcatcaagatacacggtctgggccatccgctccagcagaccgcggaagtcccactgcgtgacggcgtcagtgtccagaatgacaggatcccccgaccagacatgccgcggcaggccgctttgcgcccaggcacgctcccagatgccgggagctatctgcacgacgagccgctccgaggtcgtgtccgtgatgttgaacttgccggagtggtacatctcgcccggaaacagtatcagctcccccaggtgcaaatcgtagacactgccgtcgacggagtagcgcacgctgctgcccgccaccggcagtatcatctcataatacgggtgggagtggaccaccgactggacattctcccggtttgtatacaggcccacgacaacctgaccgtcctgcagggcggcactggcatcctcctgcgtcagaatagaatccacgtaatgcggcattttttgcaggatcatgagcgacgcctcctgtaaaattttgtctttaccacgattatatcacattttgcgacatttgcattacaaatacggcagaaattttgtgaaggatttgttattataaaggcgaagaagggcacaatgtgcagattgaacaaaatatattatgcaattttgtacaatatgcacattgcccgccaaatgacaagttccaccattcaattatacgcaaaaaaggaaggagaaaacctatgaaagtgtgctacaccggcggcgctgtcaaggactgcggaagctattattccgtagccaccaacgctgtagagctgcgcatctggtttctgaccgacgatatactgcgcatccgcgcgggctttgacggcgactgggatgaagcctcctacagcctgaccatgaccgcatgggagtcccgcaccgacgagctgatgaaggactgccgcaagcgcgtccagtccgccgccgcagccctgaccgacggcgacaggcaggccgttatccagggggcgcgtctcaaggtcgtcatcgagaaggaaccgttccgcatcatggtctatgataaggacggcagcctgctgcacgccgatattcccgacctggcctaccgcgaggacagcaaccaccgccgcatccacgccagccagatcgaggcagacgactgcttctacggcttcggcgagaaatccggcgagatcaacaaggccgagaaatacatgaatatggctcccggcgacgccatgggctacaacgccaaggagacggattccctctataagcacattccgttctatatccgcctgaaccgcggcaccaagcaggctgtcggctacttctaccacaataccgccgagtgcgatttcaacatgggccgcgagaagcgcaactactggcaccgctactcgtcctaccgcaccgacgcgggcgacattgacctgtttttgatcgcaggcccgtccatccgcgagatcatcgagcgctacaccgacctgaccggcaagagcgttatgctgccgaaggccgcgctgggctacctcggcagctcgatgtactaccccgagctgcccgagaacagcgacgatgccgtgctggacttcatcgacacgacccgcgaggaaggcatccctgccgacggcttccagctgtccagcggctactgcgccgttgagaccgccgagggcatcaagcgctgcaccttcacatggaaccacaagcgcttcaaggacccggcagactggttcgcccagatggaaaagcgcggcatcgtcgtctcgcccaacatcaagcccggtatgctgctcgtccatccgctgctgaacgagatgaaggagaagggcatgttcctgcccgcctccgacgacaatgcaggtcttgacggtctggctgtcggtacctggtggggcggccccggcctgtttgtggattacacgaaggaatccacccgcctgcactggaagcagtacattaaggatgcgctgctgaaatacggctgccgttccatctggaacgacaactgcgagtatgactccctcgttgacaaggacgcaaaggtttactttgagggcaagggcagcacgattggcacgatgaagccggtcatgagcaacctgatgtgccagctgtccaacgaggccatcgaggagtatgaccccgactgccgcccgttctcggtctgccgttccggtcatgcgggcatccagcgctatgcgcaggtctgggccggtgacaacctgacccactgggataccctgaaatacaacatcgccacgattctgggcatggcgctctgcggcgtgtccaaccacggctgcgacatcggcggcttcttcggccccgcgccggagggcgagctgttcgtgcgctgggtgcagaacggcatcttccagccgcgcttctccatccactccacgaacactgacaacaccgtcaccgagccgtggatgtacagcgacaaaaagcagtacatcaaggacgcgattgacttccgctataagctcagcccgacgctgtattccctgatggagcgcgcgcatgagaacggcctgcccatctggcagccgacgttcagcgtcttccagaacgacccggccacctacgatgagggtgtggacttcatgttcggtgattctctgctggttgcgaacgtcgttgaaaagggccagaccgtccgtccggtctacctgcccgtgaccgagaacgaaaacgagcggttctacgacttctacacccgcgaggagtacgcccccggccagacgattgaggtgccggttgatattgccagcatcccgctgtttgtgcgcagcggtgccattctcccgatgagcggcaacaagctgcacaacctgatgaccgaaaagaccaccgcgctggacatcctgatggcccccgatgtggattccgagttcacgctgtacgaggatgacggccacacgaacgattaccgcaagggcgcgtatctcaagacgaagatcgccgtcaaggcaggcgtcaagaccgtcgtgaccttcacgaatgagggcagctacgagaccgccgtcgagagcatgtacctcgatatgatccaccgcgagaagtccccgttctatgtgcaggtggacggcaaagagctgccgcacttcctgcaccgccgcaagtttgaggaggccgagagcggctggtactacagccagcgcctcaagagcgtccagatcaagtaccccaaccccaagaaggatcacgaggtacttgtctcgttcgaacagtttgatttgatcgggatgtaacccagcttcttgcctcccctagcaggggaggtgccccgtaggggcggaggggttgaaccttgccgcagcccgaaatatttcgggtaatggcacggttctctcccccagccgctgcggcggcagccccctctcagagggggccaaggggaaaacggcatacatacaagaaggagaaaattatgttcaaaaaattcgcagcattggctgctgcggctgcgctcagtctgggtgttatgaccggctgcggcgcgtccggcaccaccgccgactccaccggctacagcgccgagaacccgctggtgctgacgctggcccacggcctgtccgagacccacactgtccacatcgccatgacccagttcgcggacgaggtcgcggaaaagaccgatggccgcatccaggtcaagatcttccccaacggccagctcggcagcgaaaacgagaaccttgagcagctgcaggccggcgttatcgccatgaccaaggtttctgcacccggtctggctacctacaacgatgccttcaacaccttcggtctgccctatatcttcaacgataccgatgacttctaccatgtcatggactcgcaggagatgcaggacttcttcctctccaccggtgacgacggctttgtcacgctgacctattacacctccggcgcacgctccttctacacgaaggatcgcgccatccgcacgcccgccgacctgaagggcctgaagatccgcgtgcaggatatgaagagccagaccgacatgatgagctatctgggcggtattcccgtcgccatgtcctacggtgacgtttacacctcgctgcagaccggcatcattgacggcaccgagaacaacgagaccgccctgaccaccggcaagcacggcgaggtctgcaaggtctactcggtagaccagcacgccatgatccccgacgtcctcatcatgagtgagaaggtctgggagaccatcagccccgaggatcaggaaatcattctggaggccgcccacgattccaccgacgcccacaaggtcatgtgggacaccgctgtggaggaggccgtcaaggaggcacaggagacgatgggcgttgagttcgtctatgacgtcgacaaggaagccttccgcgaggcaacccagcccatgatcgaagcctacgaggagcagtatcccggcgtcaagacgctgctggataccatcgacgccgcaagaggggaggagtaagccatgaaaaacacctttgctgccatcaaattctggatggacaaaattttgagcattgcctgcgccgtactgcttacctttatgacggtgctggttctgattcaggttttctcccgctatatcctcaacagccccgtggctttcaccgaggagcttgtccgctacagcctgatctggaccggcttcatcggcgcggcctacgccttctccacccgggagcacatgtccctgaccctcatccgcgacaaattcaccggcaaggcgcacaccgccctgctggtggtcattgatggtctgattctgctgatggccatcttcgtattcactatcggcggctttaagctggctgtctctgccagccgcgagttctcggccctgctgggtattccccgcagcctggtttactccatcgccccgatttccggcgtgttcatcgtcctggcgcagatcatcaacatctatgaggacatcaccggcgaaaaagttgaatccaaggagggtgcagacaaatgagtatcaccatgaccaccgttatcctgttcgccgtgttcggcgtgctgctgttcctcggcgtgcctatctccatcagcattgtggcgtcgtctatcgtgaccgccatgtccaccctgtcctgggaccagatcacctttatcacgatgcagaagatgaactccggcgtggagagcttctcgctgcttgctgtgcccctgttcatcctggccggcaacatcatgaacaacggcggtattgccaagcgcctggtcaactttgcccagttgttcgtcggcaagatccccggctccatggcgcaggccaacatcctgggcaatatgctgttcggtgcgctgtccggctcctccgttgc

SEQ ID NO: 917 - DNA, 23925 bp, unidentified
  source 1..23925: mol_type = unassigned DNA
taatgtatcaaggttacgaggatcgatcatagcaactgcctcttccggagtcttatgtccctcgtctactaaatcgcaagcgatcttaagtgcagccggagctgttctcttaccgttacggcactgaagcatgtataacttcttgttctcaacggtgaactccatatcctgcatatcatgataatgattctcaagagtctcacaaacttttaagaagtctgcatatgcctcagggaattctttctccatctgagcgattggcataggtgtacgaacacctgcaactacgtcctcaccctgtgcattgattaagaactcacccatcagtttgttctcgccagttgccggatcacgtgtaaatgcaacacctgtaccggactcgttatttaagttaccgaataccataggcattacgttaactgcagtaccccaggaatatgggatatcgttatcacgacgatatacgtttgcacgtgggttgtcccatgaacggaatacagcctcgatagcaagttttaactgctcaacaggatctgaagggaaatctgtacctaactggttcttgtactcagccttgaactgctctgctaactcttttaagtcagctgctgtaaggtcgatatcaaatttaacgcctctctcttctttcatcttgtcgatgagctgctcaaagtattttttaccaacttccataactacatctgagaacatctgaatgaaacgtctatatgagtcatatacgaaacgctcgaatgcaggatccggattacctttgatcattgcagcaactacttcgtcatttaaaccaaggtttaagatggtatccatcatacctggcatggaagctcttgctcctgaacgaacagatactaataacggattctcaagatcgccgaatttctttccgttgatctcttccattttcttaacgccttccatagcctgagccatgatctcgtcgttgatcttgcgaccatcttcatagtactgtgtacaagcctctgttgtgattgtgaatccctgtggtacaggaagtccgatgcttgtcatctctgcaaggttggcacctttaccgccaagcaggttacgcatggtcatgtcgccttcgctaaacatatacacccatttgtttgccattttgataattcctcctaaaataaattactatgtaattatggacaccgtatttgtttccataatcaagccatgttatgtgcctttctaaaacgcacatatttattctaacatattttgtctaaatagcaacattttttttactgtttttccctgtttttttgtaacattttcacaatgtaaaactttgttccgttatgtggaacattttggatttgtttatttctttttccattttgcatacagtgtgattttccccgtgctgcctttcttaatagaggttacctttctggtacattttttatcacggtaccatcctttaaacacatacccttttcttgttggtgctgccagttttatcatctttgaagtaatggtatatgttttcggatttttcttattatttttgcctccgtttaatttgtaggtaatggtgtacttttcctttgcccattttgcatacagtgttacttttccggtactgccctttttaatagcggttacctttttggtacattttttatcacaataccatcctttaaacacataccctttttttgacggatttgaaagttttatcgtctttgaagtgattttatatgttttgggattcttcttattatttttgcctccattcaggttatatgtaatctgatactgtgctgctttccactgggcatataaagttacgacctcatctgcttttttgtcagattttttacataggcattttcctcataaaaggttcccttcccatctggctgcgtattccagcctgcaaatgtatatcctttcttttcaaacttattttttgaaagtttttccttctgacccgccgcacatgctttctcactcattttcccttttgctgcaccatttccatcaaattttattgtataaagatatggacacacgacaaccgggacattcctcttaaatgcttctgcattgattttatctttggagagactggttattacatatattttttcaggtccgtctgtcgtttcccaggaaaatgcttcgctgccaatctctgtaatcgtctttggcagccttatcttcccaagcacgccgccgtccttataaaacgcacagattccaattgtttttaccgcggtctgggaaagatcaagttcccccgttaaatttttacaggataaaaaagcataactgtcaatcgccgttaatgttttggggaatttcacggtttttaatccactgcaggcagaaaatgcactaccgcctatttctgtaaccaaagtctgggataaatccattttctccagtgaactgcagcctgtaaatgtgccaaatccaattttcgttatattctctggcaatttcaccgtttccaatgcactgcacccctcaaatgttccttccaattccgttatccctgtctgggacaaatctgcttcttccaacagcgtgcagtctgcaaacacacccgctccatcattcacttccagcacgtcaatatcttcaaatccgccacactttacctgacggatgtttttattttttacagcagctaagtcgaaataccagtttcctctgctccatctataagaaatcagactgtaatacaatccatccttcagcaagccatcaactctatatatctgatgatttgataattctgcaatctcctccggggacaggtcaaaatacccgtcagaatacccctgatactcccattctttatctaccgaataagagttgcggctgcaccatgtagcatctgcaaaaatccattttccattttcactgtcataaacagcattgtattcatgggcatgcccctctaaatccatgcacggaattccaatggaaatgcacaatgttctcataaggcttgcataacccgaacacatagcacgcttttgctcgtacacctcatacggtgaccaataacttggcttattattataataggcataataatcataataagttctgtccgcaacaaatgccataatcgcttttattttctcatactgtgtagtacacccggctacagcctgtaatgcagcctgtcttaattcctcaaactgggcatctgttatagcattcctttcaggatctgttaaaaagtaatccgggtctgcatatttattaatcagagtccaggccttctgttccgctgcaatctgctcttcacttgcgtcccccttgattgaagtttcttcccgttcttctgtttcttcttccatttccggcagttctgtttctgtgtctggctgctctgtctcctccggctgttcttctgtgtctggctgctctgtctcctctgactgttcttctgtgtctggctgttctgtttcttccgactctggctgttccgtattctcccgtttctcctgttcgcctgcctgtgtctcctgacgttcacgatccatcagatccagttcttccgtatccgcatatttttcatttactttctctgatgccgattccgctttttctgtctctgcaatcacattcgcctgcatatttaccggcatcccaccaaccaaaacagtcgcagccagcaatgccgtaaaagcttttttcatccttcctttcataaactaaaactcctccttcatttgtaccgctatgttacattaccttttctatattataaccgcaatacgactattttcaattgtttgcgaaatcatttctatcatatctccgcagactatctgcctgtacatacttcaaaatatttttcttctcctccgcgaggtgcgcatcccgcccggagggcgttttcattcataggacgtaatttcctatgaatgaaaaacagacggatcattcccacccaacaggaataatccgtctgtctttttctttttattctccgcttcgaaaaatcctagaaatctacttccgtgtcatagtaacagcatttcaacagcttttccatctcctcctggctcggctgtctcgggtttgatcctgtacatgcatctaagattgcattggctgcgatctccggcagtctctctaagaacacttcttccggtacaaagccctgctcggtcggataactgtctgcaccataattcttaatacagtgcgggatcttcaaatcatcattcataccgcgcaggtatttgatcagaagttccactttctcgtctaatgaatcaccgccaagtcccatgaaatctgcgatctcaccataacgtttctttgcagtttcatctttggcgttaaatgcgatcactttcggcagatacattgcgttggctgcaccgtggatgatatgtgcgccgtaatccgcaaatgcagcaccggtcttatgtgccatggaatgtacgataccaagcagtgcattggaaaatgccataccggcaagacactgtgcattatgcatgttatctctcttttccatatccccgttataagatcctaccagatcacgctggatcatcttgattgcatgcagggcaagcggatctgtgaaatcacagttcgctgtcgatacatatgcctcgattgcatgtgtcatcgcatccattccggtatgtgctaccagtttctgtggcattgtctctgcaagttccggatcaacgattgcaacatccggtgtgatttcaaagtcagcgatcggatatttgatacctttctcataatcggtgatgatggaaaatgcagttacctctgttgcagttcccgaagttgaggaaatcgcacagaaatgcgctttcttacgaagttttggaataccaaacaccttgcacatatcctcaaatgtgatatccgggtattcgtatttgatccacatagcctttgccgcatcgatcggcgaacctcctccgattgcaacgatccagtccggaccaaactcttccatcgcctttgcgcccttcattacggtctccaccgatggatccggctcaattccttcaaaaagctgtacttccatgccggcttcttccagatactgttttgcgcggtcaagaaaaccgaaacgtttcatggaaccaccgcctacgcagataatcgcctttttgccttcaaacgtctttaatgcttccaatgccccttttccgtgatacaaatcgcgtggtaatgtaaatcttgccatctttcctccaatctgccgccatcaaaaggccgcctcctgacacatacacatgcctgtattttttgtgtcatttactgtgtgcaacttttatataaccatcacatattttgttaattaaataacaatatgtatggtaacattatatcatatctttcaaaaataagaagcatttttatacatttttaataattcttaatattttctaagcattgtttttaaatccacattttggacagatatttcctcccttatatacataaccacagcggaagcagcagatcgtatcatgtttttctttcgccagataagaaatatttcgcgaatccggtttttcctgtaaataatgaataaattcattcaataccccggcatatgccgtgagctgcttattttctaccgcatatggaattttcgtctttttcccatttttctctgtcacatacacaccacggtttaaaagtcctgtggatgcagtaatctcatctatggacggaacatcaatacggtaagatgtcatcagtgtgctgtaatatagatgttccggtgtcaggataatcccctcttttccactgttgtttctcgatgtgtccaccacaaaaatcggatattcaaacagaccgtttcctgcggcataggatgccatggcataatcgataacctctgtttcctgcggcgctgcctgctttaacagcacttttctcgccgggtaaaaataatgtttctggctttctgtgattcccgcctcttccagttcatttttcagcttatttacaagctgttcacactcatccgtcttgatcttggaaagacgcctgcttaaaagttctaatgcattatcctttaaatccggtaaatatggtccttctgcaatcttctgatacgcatccattccctcatcaaaggacatgtgtgccggatcaccggtaatttctgcgatctcattttcatccatctgacggattttattctcgatctgctcaaaatacggcaaaaccagccccggctcaaactccttttctttcagacgctccttaagctctgtcagatcatctctggtgatttttctcgactggcggatcatattttttatttcctgctgttcggcaagatttttctgcgattctaaccgttcctgatatggggttaaatctactccttcgtattcttttaatttctcccgaagtgcatggtaacgtgccctgtccatattaggcggcattttcccaaccagctctgcgacttcccgctctgcctgtgtctgcattttctgtttcagatttaaaagcagattctgttttttctcctgcggcagcttttcctctgcaatctcgtcatagacacggcgcatcacggcataatttttatctgcgcagctctctgcctttttatttaacgcggcaagctttctgtcctgttctttttcctctaacatatccaggtattgtttccgctcttcgggcgaaattcttgtttcatgcatgagctggtgttttaattcggaaagctggcgctctgacatacggtctgcgactccaaatttagcctgataagtctcgcggactttctgtgcctccgcattatttacctgtgcatatttttcatcggacgattccccgccgatctgcccagcttcgtgcggctgcctgctgtcactctcatatcgggaacctttcacatggcgtcgttcggtttcatcctgacgtgcatcttcatattgctttttgtgctcgttccgcttccatccactttcacccgcgctttcatttccatgctgtttttctgcgtgccggttcttgctctcatcctgctcttcttcatcatctgtgacttcgtcctgatctgatgcaggcgtactctttaactttttacgacgctttttttcctcctgtatggcaggttcgcaggctgcaatactgctttccgggaaaaacccctcttctatcttatttaataattcctcaaagtctgcatctgaatattccggcagatcctcgcacagttcctcaagtggctgctgctcgtcctcgacacccgccggctttctgccgtcctcatactcattataacggctgtttgcctcatgctcgccgttacgccccatcagctcaagataatcttcgtatgcctttttatcctcctcaaaatccatcagataaatatcgccgtctccaagaagtttccatgggcgcggcgtataaaatctgtgacacgctgcacaggtacatgcttttgccaaaaggactactccctcaggcgtctcgattcgaaactcttttcctttcggatacatgatcatatgcagatttcctttgcattttgggcagcggtaaccaactttataaaagttattgccaatcctgccttttgctctttctgacagtgaaagttctgttctctcaaaaacagtatgcgccatcttccattcaactttatgccagagtccctgttcctcgtctgcttcctcttccttctgcactgcttcttttgcctcaagtgccgcctgtatcacatcttcataggtaatacgctttcctgcatgataaaaacgaaaatactgcgtggtatattccggttcaatatagattcctgcaagcacatgcccgaaaagagtattcagctgctccgtatttttttccacacgaagtccctggatcgttccccattttccaaatgcatacaggatcatattgatcacatcccgtactgctgcctcatcggtatctttgatctcatcttctttgatcggcagatctacaatattttccgccacttttctgctgtcaaaatgaaaaaacagggagcgcacttccccctgtaaaatgagataattatcaagtgccacaaaaagacctgtccagtttacatttgcatgcatggtctttatcagccgttcaaatgtcatttttaattcgctatctgcttttaatacgatcacttttttcacctcttacttttcaaatgcagatttttccttcaagatctgtgcaaatcccatatgaagttcttcttttgcccactcaaaatcaatctcctgattgctgtcattcaaacagacgcttccactcttctgatgacctatatcagccacaatcctgctgttatcatttgagacatcataataccggcagagtcttcttacattgccgggaacaaaaccgccagtcagtttctgatactccctgagcacatactggctgacatcctctttctgacggaatttatggctgcacacctcgtttaacaactccggttctaattcccacattttcacaaaagtactctttttaaaaggagacggcccatgaaccgtgtaaaatcctgtaaacaacgggaacgccagttctaacatattataaataaaatacataaacggataaccgggatggaaatatgctcccggctgttttttcatattttcacgtttgtcaaaatattttgccagaagcatggtattattcaggtaaatatatggcatgacctgatcttttgtatttgccacatcaggctgaagagccagcatatccaccggaagatcatttttaaaatactgttccggtctgaccttttttatcagaaacatatcatcattaaaatatacaaaattctctgccagacctgggattctgtgcatattccactcaatggcatgtgaattaaatgtcggcagatatttttctggaataaaatctttatgatttacaatatttaacttcggatgttctttatttaaccaggatggcagatgcccccatgtaacaaagtgtatcctgcgcacccatggtgcaaaacgctccacaccacgaaaccagtacctcagcagatcccagtccctgtatctctcttttctgtcatcctgtttctgcgacagatccggctgtatactgtactccattttctgtttctgccagtccggatcattgccatctacccatgtgatcacaaaatcaatttccggaatgttattgtcgcgtgtcataataatctccatttctgcccagcaaacatctttttcatctgcataataaatttcactgttatcatgataaaacaaatcctgcaaaatgaaaatcccatttatctgcttaatttatatttttttaagaaatactggtttttccctgttttaaggcatttccgtttcttttgttagcactcattaaaaaagagtgctgattttctattgacttttgaaatttgcggttataatattagatttaggcagcagcgaggcggatctgcccactgcattttattacgattataaaggagtgtttgaatatggcagagaaacatggaaatctttcaattaacagcgataatctgttcccgattatcaaaaaatggttatattccgatcacgacatcttcttccgtgagctgatcagtaacggatgtgatgcgatcacaaaattaaaaaaactcgaaatgatgggcgaatatacattaccatctgactacaaaccggagatccacgttgttgtaaatccggaagaaaaaaccttaaaatttatcgataatggtcttggtatgaccgcagacgaggttgaggaatacatcaaccagatcgcattttccggcgcaacagatttcattgaaaaatacaaagacaaagcaaacgacgatcagatcatcggtcacttcggacttggcttctactccgcattcatggtagctgatcaggtaacgatcgatacattatcctacaaagacggcgcaacggctgttcactggtcctgcgacggcggtactgaatttgatatggctgatggcaccaaagaaggcgtcggtacagaaatcacccttttcttaaacgaggattccgttgaattttccaacgagtaccgtgcaagagaagtcatcgaaaagtactgctctttcatgccgactccgatcttccttgagaaggcaaacgctgagacagaatatgagacgatcgacgccgctgataaattagacacagacaccgtcgttgagacgatccatgaggaagcaaaaacagaggagaaagaaaacgaaaacggcgaaaaagaagtcgttgaagtttctcctgcaaaagataaattaaagatcgtaaagcgtccggtttcattaaacgataccaaccctctctgggcaaagagtccgaacgaatgcaccgacgaagaatacaaagcattttaccgcaaagtattcttagattacaaagaaccattgttctggatccacttgaatatggactatccgttcaacttaaagggtatcctgtacttcccgaagatcaataccgagtatgattccattgagggaaccatcaaactttacaacaatcaggtatttatcgccgacaacatcaaggaagtcattcctgaattcttaatgctcttaaaaggtgtgatcgactgcccggatctgccgcttaacgtatccagaagtgcactgcagaacgatggttttgtaaagaagatctccgagtacatcaccaagaaagtagctgacaagctgatcggtatgtgcaagacggataaagaaaattacgagaaatactgggacgacatcagcccgttcatcaaattcggctgtctgaaagataccaagttctgtgacaagatgaacgattacatcctgttcaagaatctggatgacaaatatctcactcttccggaactcttagtcaaagaggaagaaaagaaagacgaaaacaaagatgaagctgaggtattagatgctgacggcaatccgatcaaaaaggaaagcaccgatgcagcagatgagaatactgaggaaaaagatgagcgcaaggtaatctactatgtaactgacaaacttcagcagggtcagtacattaagatgttcaaagagcagaacatggacgctgtcatcttagaccacaacattgatacttccttcatctcacagcttgagcagcgcaatgagcattataaattcatgcgtattgatgcagatgtcacagaatccttaaaggacgagacttccgctgaggacttaaaggctgagacagataccctgacggatgtgtttaaaaaagctttaaacaacgataaactgactgtcaaagttgagaagctgaaaaatgcggatatcgcttctgtcatcacgctttccgaggaaggcagacgtatgcaggatatgatgaagatgtatgcaatgaacggcatgggcggcatggatccgaacatgtttgctgcggatcagaccctgaccttaaacgcaaacaatgaacttgtaaaatatatctttgagcacaaagattccgagcatgttccgatgttctgtgaacagctttacgatcttgcaatgctttccaaccagccactgtctgttgacgctatggcaaaatttgtacagcgcagcaatcagatcatgatgcttttagcaaaataatttttacagaatacaagcccctgcaaaacctgtagatacgagttttgcaggggctttctcatgctgttttttattgtgtttataccggaatttctataaaaatattattttgctgccgtatagattgcgatcatatcttccacatccagatgctttacttttccaagattgcctctgactgccgcattacacttttctgccagttcttttatctgttcttctgtcggcgcaatgccaagttccgttaatgatgtcggcatatggatttcccggtaaaaatcctccattgcagcaatgcctgcctctgccgtcttctgttctgtctcctgcggctccacacccataacgtgctctgcaaactgcacaaatcgttcaatacgctccccgcagacatagcgtgcccagcttccccagatcgcggcaagccctgctccatgtgccacatcaaacattccaccaagctcgtgttctaatttgtgcgttgcccagtcaccaccatccgttccgcagccggtcagtccattatgggaaagacttcccgcccacatgacttccgcgcgcgcatcataattttccggctcttttacaaggatttttgcatttctgatcaccgtgcgcatcagtgcttcgctgatcccgtcggtcagttccatgttttcactgtgattgaaataacgctccattgtgtgcatcaggatatccgtacacccgcatgccgtctgatacggcggaagcgtcatcgtaagttccgggtttaaaacagcaaactttaatcggctgtaatcggtcgtgcatcctctcttcatgccgccatcttcctttgttattacgcaggaaccgctcatctcacttcccgccgccgcgatcgtaagcactacaccgatcggcagacatgcagtcggtttccgtttaaaatcaaagaaatcccacacgtctccttcatttgcaacaccatatccgatcgcctttgcggaatcaatgacacttccgccgccgacggcaaggatgaaatcgacattttcttttttacagagtgcgattccttcatacaccagagaaagtctcgggtttggaacgacaccgcccaattcgacgtaagtgatcccctctttatcaaagattgcctcgatcctgtctaacagaccggagcgtctggcactgccgcttccataatggatgagaacctttttacagttctgttcttttatcaggtttccaactttttgttccgcaccttttccgaaaacaacttttgtcggtgcataataattaaaatcgttcattttgctcctcattcccacatgtaaaagttcttattttctcttttcataactacttctagttatataagctattatcggtaagaaaacgtatctgctttagtctgaacaagctcgcaggaaaccatcaccggttctctgcgggcttacactctcttatcgtatcttcttattatatatctgtctgacaaactatctacattgaaattttatcaagtattccggtcagatgtgcgatcgtcaccccataatttgtcatcggaacctgctgttttttggcacggtcgatccgcgacatcacatatttgcggttaaacatgcatgcaccgcactggatgatcagatcatagccggataaatcctgtggaaaatccgttccactcatgatgtctacggtaatgccctctcctgcgcgcttttttaacatgcgcgggattttgactcttccgatatcttcctgcagtggcgcatggctgcagcattctgcgatcagaacatgcgattcatttgtcagggaatctaacatttttgcaccttccacatagtaaggaagatctcctttatacgctgcaaacaaaacagaaaatgaggtcagcatgctctctttcggcttgtgctcatacacatagccgaatacctgtgagtctgtgatgatcagtttcggcggttcttttaaggctgcaagtgccggcaatagtttatctgttgtcacactcatgaccaggcactttttatccaaaagttcccgtaatgtctgcacctgcggcaggatcagacgtcctttcggcgcctggatatcctgcggcatgaccagtaagacgaaatcttcttccgtgacgagatctcccgtgatcagcctatctccgtaattttccggcacaaggcgggcgagttcttccctgactgtgtcgatccctgcccccgttttggcactgactgtgagcgcctgttttcctgttttttctttgatataagaagcaaattcgtccgtatgcggatcaatatctgctttcccgacgaggaacaaaacaggcgtatttttttctttcagaaactgataccactttaattcttctgtgagatccggtaagttctcctgatttttctcggacgactgttgtaatttttcttttgcatctttcgtctctgaagcatcctctctgcaggcatccgcgccagataccacgatcacagcgatatccgccttttccgctgccagtttcgttttctccacacggcgttccccaagctcagtctcatcatcaaatcccgctgtgtcaataatcacacagggaccaagcggactgatctccatcggcttatagaccggatccgtcgtcgttccggcaacatctgcaacaatggagacttcctgatgtgtgaaggcgttgataaaagaagatttcccgctgtttgttttcccgaacacaccaatatgcagacggttgctgcctggtgtatcattcagtgttcctgccatagtactcctcatttcccttagaatctgaaatcacgttttccctctgcgatatcgtggatgtgctcgtatgcagtctgttttactttcggattcggaattttttcaagttctctgtcgatcagctccataccaagacgttttgtctcttcgcttgcataatcttccagatattcttttaatgtcatcagcgcattcgggtgacagcagtttaagatctgcatgtttttacaaagtgccataaaacggtcaccggttcttccctcgcggtaacatgcagtacagaaacttgggatataccccagtttgatcagccagttcacaacttcatctaaggttctctggtcgctgacatcaaactgctcactggtcacttctccctctttttccggctctgcgtagccgccgacgcttgtttttgatgcaccgctgatctgggaaacgccaagcggaaggactttgtttctcacttcctggctctctcttgttgagatgatcattccggtatatggcacggaaacacggatcagagcacagatctttgcaaatgtgtcgtcagagatgccattgtcaaatgcagacggatcaatgtcatctgcatgcttgattcgcggtacactgatagtatgcggtccgactccatgtactgcctctaagtgttctgcgtgcatcaaaagtcctgcaaactcataacggtaaaggtcaagtccaaacaatacgccaagtcctacatcatcaattccgccctccattgcacggtccatcgcctctgtgtgatatgcgtaatcgtgtttcggtccggtcggatgcagcttttcatagctttctttatggtaagtctcctgaaacaggatataagttccgattccagcttcttttaatttgcggtaattttccacggtcgttgcagcaatattgacattgacacggcggatcgcaccgtttttatgtttgatgctgtagatggtcttgatgcactctaagatatattcgatcgggttgttgaccggatcttcgcccgcctcaatggcaagacgtttatgtcccatatcctgcaatgcagtaacttcttttacgatgtcttcctgcgtcagtttctttcttgcaatgtgtttgtttttcagatgatacggacagtatacacagccgttcacgcagtagtttgacaaataaagcggtgcaaacaatacgatacggtttccgtaaaaatcttttttgatctgctctgcaagtgcataaacttcctggattttttcaggaatctcacatgctaagaggacagatgcctccctatgatttaagccctttcttaattttgccttctcgatgatctcatcgatcagtgccacattgtccttgttggcatctgcataggcaagtgtctctctgatctcctcatctgaaataaactcttctgcttttaatgattttgcgctatacatacattcttcctttctttccggtcagtttgcgcccgcttgctttccggttagtgtatttttatatggacgacagactgctctttttgcagaactgtcgtataaaaccagtagatccgccttaagtctgctggctttttgtcaatttgtgatttctgaagttatcttatgtccgcccgttctgtctcacagatggctgatactttccattctgcttccttatggctgaaaatcgcccctgtttacggctacctgatagccaatgctttccattcgtttctgcatgcagaagcggcactctgctgcctcgtcaccggtgcagatcttattatcatataatttatatttctcccgcacggcaaccggggataaattcggcatgacgacatttgctcccgctaaaattccaagctccctgcccttgggatgaatcgttccaagcgctgtggtcgccgggagaagtacatgcggatggatcagtctgataatggaaagcagccgcagtgtcatctccatagtgcccgctgtctcagtaccaaacggcgtatctttctgcgggataaacggaccaataccgaccatctgcggtttcaatctacggataaactgcagatcttcccacagggtatctacggtctgataaggcgaacctaccataaatccgcatccggtctgatatccgatttcttttaaatctctaagacagcgcatccggttctgataggacatctctgccgggtgcagtttcttataatgtgcctcatctgccgtctcgtggcgcagcagataccggtctgcccccgcatcaaaatatgcctgatagctctctcttgatttttctccgatagaaagtgtcaccgcacagtcgggatattctgcctttatctttgaaacgatctgacagatcttttcatcggtataaaatccatcctccccaccctgcagtacaaaggtgcggaatcccagctcatatccgattttacagcaggaaagaatctcttcttccgtcagccggtagcggtctgcgtggcagttacttctgcggattccacagtaaaggcagtcatttttgcagtaatttgtgaactcaatcagtccgcggatgtagacattttttccatagatgcggtcacctgtgttccgcgcacgctgttttaaatcctgtatcatcgcatcgtcctctgtggcaagaagaaatgcaagctgttcctttgtgatatctgctgtcttttctattgtctctgacagatttctaaaattctgcgctgacatgccatagtttttctgtgtgtttttgtctggtgttctctggttttgtaacataaatttatccctgtccgatcataatggtctttctgctagtgagattgggcatccgacatatatttcttttgattttgcccaatgtgtatattttcaattcatatccacgccagcttatgccatgccaacattcgaatacaccgtctttgccgtgattccatcaagtctgccgattttcccggaaagtgcattgataacatcctgcggcgcatcgattgcaacgctgatgatatgcacattccgctcacggtatggcagccccatccgtccgataatatacgagccgtattcatgcaaaagtttatttagttccggcgtggaatccatattttcaacgatgatcccgatcaaagctactcttgtatccattcgtttcctccctgattatcaaatttatatgattttcatacacgaatctatgatacagattttggaataaaaaaactgtacccctaatttcaggtacagcctaataagagtcgcattgcgcctcttacattttccatttatgccatacctttcatctcaagtgattcttttgatgtcagcgtcttttctttttctaataaacaatcttgtgcaaaaagaactttacatgtgctctttgcaaagatttacaatctcaatttagatgcattttacgggcaaatttcttattataacaataccctctgcatacacaaaaattatacagcaaaattttttgcctatataagtattatgtatacaaagggtatcatgattttttaggaattgcaattatgtttcgattctgtacgatataaaatacaaaaaatgtgttactgttcacacatactgtgtgagcagtaacgattacagcccattttaaatgcatcttcgatgcatggggctgtaatctggcatgatatagtctttggcgcacagcttgacagcaagtgtcaagcttgcgagtgaacagtaacaaaaatgttactctttacggcaccggctcttcctccggcacctcgatctctttgatcatcgtctcatttccacataaaagccaggtatgttccccgccgcactccgggcagatcttaccatgtgctacggtatcatattcgcagccacagtcatcacaatgtgtcactgcatggattgtctcgatatttaactcactgccggataaaacctctgtgcggtccgccgcccagcgccagcagtctgtgagataagacggcacgatgccggacacttccccgatggaaagtgtcacagccgaaacctttgtcagttcattttcctgcgcgatctcctccacgcttttgatcacatgaaatacgattccaagttcatgcattcgcgttatttctccttttttccaaaacggatcttcacttcacgttttaacatataaggaagaattgccttcatcttgtcctccgcttttaccatacggctgcactccggcagctcgcggtgcagatggatcgcatcaaattcacactttgtcgtgcagacaccacagccgatacacttgttcggatcgaccacggaagctccacatccaagacaacgcgcagtctcgatcttcacctgctcttcggtcagtgtcctgtgtgcatcgcggaatgatctgtgcgcatcaatcttgtcatccattgcaggacgctgtctctttgcactgtcatatccttccagggcaagattttccttatccagttcgataaactgacggcggtttcttccgatcgtcatgcttgcgtttttatgtacaaaacggtgaatggactctgcaccttcttttccggctgcgatcgcattgattgcaaaactcggtccggtatagacatctccaccgacaaagatatccggttctgcggtctggtaagtaagcggatctgctactgctccgtttcctcttccaagttccactttagagcctgccaaaaggtcaccccagagaatgctctgtccaatacttaagtatacatgctcacattccacggtcattgtctcattctcatcgaactgtgggttaaaacgtccagtctcatctttgacggaaacacattttttcagcacgatgccacgcactttaccgttttctgtcaaaatctctttcggaccccagccacagtgaacggcagctccctcttctttgacttcttccacctcatctttggatgccggcatctctttttcagactctaagcagaacatggaaacttcgttggaaccacagcgtgccgctgtacgtgccacatcgattgccacgttaccgccaccgatgacaacagatctgccatccacgcggtagtcttcgtttccaccggatacgatatgtaagaaatcaaccgcactcattacacccgcggcatcctcgcccggaatgcctgctttgcggcttccctggcagccgattgcaatataaaatgcctgatatccctgcgcgcgcagttcgtctaacgaaatatcttttccaacttccacgccgcatttgatatccacaccaagttcacgcatcacttcgatttcagcatccacaacatttttctctaatttaaaagaaggaataccgtaaacgagcattccacccggacgttcatttttctcaaatacagtcggtttgtaacctctggttgccaaataaaacgcacagcttaaaccagccgggccaccaccaatgattgcaatcttctgtgggaaagttccacggtttgacggctgtacgaccggtggaatgtaacgtgtatctgaattcagatccagttctgcgataaatttcttgacatcatcgatcgcaactgcctggtccacagttcctcttgtacatgcatcctcacagcggtggttgcagacacggccgcagactgccgggaacggattttcctttttgatcagggcaagggcatctgtgtatcgtccctgtgccgccatctttaagtatccctgtactgcgatatgtgccggacatgccgtcttacacggtgccgttccggtatcataacagttgatgcggttgttatcacggtaatccatatcccatttttccggtccccacttggtattatccggcagctcgtgtttcggataggtgatggttccatctttcgtacagagtttctgacccatttttacggcacccgccggacagtactctacgcagcgtccacatgcaacacagtcctttgtttcaacctttgccacataagcagaacgtgacatgttcggtgtgttaaataactgtgaagtacgaagtgcattacagatatttacattacagttacagatggcaaaaatcttgtcctcgccgtcaatgtttgtgatctgatgaacaaatccgttgtcctccgcacgctgtaagatttccattaccttttcacgtgtaatgtaatgtcccttgtttgtctcgactaaatagtcagccatatcgccgacaccgatacaccagtcttccggatcatccgcgcatccctcgcccaaaacaccgcgggaataacggcaggaacacggacctgctgcatattttccatcatatttatccagccagtgggaaatatgctcgacactgacagactcattttccgtctcgatcgctttctcaaccgggataacgtgcataccgattccagcgcctcctggcggtaccatcggtgttactttctgcaatggtaaaaatgccatgcgctcaaagaatgatgcaacttccgggtgctctttgatctgatctaacttcatgttaaaaaactctgcacttcccggtacatacatcggaaggacatactgcttctcgtgtttcggattctcccagttgtactctaaaagaccgatgttactcatttcctgcaacagttcttctaacactttttcttcttttccggttgcttttacggcctgtgctaatgtcatcggtttgcgcactttcattttcagtgcaacttctgccatctcatccgtcacaagtgcttctaatccataatattccggatcttcggctgtcactgtatgaccgatacggtcggtgatcttctgtcctaattttaagatcagctctctcggctgttccggtggtgtgtactcaaactttttcatgcgtgttcttcctctttccatgcagcggtctcttttttcagccagtctgcccattcttccataccttcacctgtctttgcacagatcgggatgatctttgcattcggattgcgcatcaggatgttctttttacactgctctaagtcaaaatcaaaatatggcatcacatcgatcttgttgatcagcacgacatcgcagatggaaaacatcagcgggtattttaaaggtttgtcatgtccttccggtacggataagatcatcgcatttttcactgcacccgtatcgaactccgctggacataccagattgccgacattctctaaaataaccagttccacatcatctgttccaagtccttttaatccctgtctcgtcatatctgcatccagatgacacatgccgcctgtatgaagctggattgcctttgctccggtctttaaaattgtttccgcatccacgtcagagtcgatatctgcctccatgacaccgatcttcaagtcatctttcagtgcctcgatcgtgcgtgtcagcgtcgttgtcttgcctgatccaggcgatgacatcaggttcaacaagaacacgccgtcttttttcagttcttcgcgaagcaatgctgcctgcttgtcattgctctcgaaaatgctctgttttacttccagaatccgtacatttcccatgataatctccatttcttttgtaacatttttcgccttatctgttacttatagataaattctatcattttagggtggttgtgtcaataaattctggtcataccagtgtgccaattttttagaatttgtttagaattgtctgattgctatcacaggaatgcgaagattttttaattcatggacgtaattttcctatgaagattcgggtgtcaaaaagtggcttccaaattttgacacccgaatcctatgaattaaaaaaacaacactacagtccgcagaaaaacctgtatactgtaacgttgtctgtcttactttagtatgcctttacttttacatatccttcttcataagaatatttcagataagtaataacatttacaacctgtctcttatcatcatcaatgtgtatcctaataagttttgacctctccatttgctcaaatccatccgatctggatctttcatagataatccaatcccccaaattctgtcttttaccgcacattctgcaaggatttgatctttcgtatgtaacaaaccttccctcaatttatcattttgggaaaattttgctataagcccttcataaactacaatctgccttataccattccagtaattttcattatagcctgccaccatacgtcccagttcttttatagatccaacctcatctgtttccaatatcttttcagcaatcacatcgtctctgaaacaaactgcctttttatacatcatatattgctccatagatgaaaatccgattccatttacatcaaactgtgacatataccagttactcaagtatccattttcctcatcaggattatgaaaacataaaatatccattttatgctgcacctaccttttttactgccagatcaagctctaagtcatgcagtccgtgatacgctttcatcaaaaaatttaacggtactttttctatcacctccgagcttggaatattatagtaccattgataatacgcataaaactcgccaatccagtccggcataaacccttctaaagcctttccagctttcaatttatacttttctgtatccgaaaaatatctccataattctttagcatccatggtattaacatacgccatcgactcatcgatatattttctggttttacttttcatatacgcttctataaaatccgttgtatcattttcaggaaatgtctgcgctacaaaatcaaacagttttccctgactctctaccacatcatctaaatatgtctctgaatatgcccgcatttttctctcctcataaaagtgtactaaacacattggttactttatttgcatcagagtcaatcaattctttcatccttttccttgctgtcacatcgcgttcattgtatttttcattaaactcgtcatattccacggaaataagttcttcttttctctcagacagcctcgaatatgccagttctgatttaatacaatactgtattcccaaacctcccaacaaaaggagctcttctaaaatttccacatcaatttcatctctgacaaacgcttttgcaatataaaagtacgatgcatccgctctccatccttttatcacatcatatccgcttgtttcgataccatattttgcaataaacttctgcgacaacattctgtaacgcttagagtctgctgcatccctgtgtttcattaattcagccagccatgataaaatgctatatttctggaaatcaagtactttcagtccttccatatccaactcatatttatgaacccagccatttgtctcatccggtctgcaaaccgcccattcttttgcaagatcaatattttccgtcaaataaaagccttttccgtaatcatgccggttttctcccaatccaaaagctggctttatttctttgtcaggactcccatgatacaagataatcttacccatatcgtcatcctccctatacaaacataatttagaaattgcaatctgttccgcttttttaagctaagttcttttagcgtacccaataatgctttattcccctctttgattgcctgatctacctcttttcctagagcaatacataaaaaggtcat

SEQ ID NO: 918 - DNA, 22398 bp, unidentified
  source 1..22398: mol_type = unassigned DNA
ttatttctgtgcaaaaaagtctttgaccacctgcaccacggctgcgcggtcggcttcggtcagaccatagtacagcggcaggcgggtcaggcggttgctttcctttgtggtgtactcatccacaccgtcaaagcggccgtattggatgcccgccggggcgctgtgcagcggcacataatggaaagacgatgccacaccgtgggctttcaaataggcaatgaacgcggtgcgctgttccaggtcccgcagcttgacatagaacaaatgcccgttatgcacacagccttccggcacggtgggcagctccaataggcctgcttcagccagcggtgccagctcctgtgcgtaataatcccagctgtgggtacggtctgtattgatggtatcggcctgttccagctgtgcccacaggtaagcggcattcagatcactgggcaggtagctggagccataagaaacccaggtgtatttatctacctggccgcgcagaaaactggcgcggttggtacccttttcccgcaggatttcggccttggtcacggtttcggggtcattgatgaccagcgcgcccccctcccccattgagaagttcttcgtctcatggaaagagtagcagccaaaatcaccgatggtgcccagtgccctgcccttatagctggccatcacgccctgggcggcatcttccaccaccttcaggttatggcggcgggcgatctgcataatggtatccatatcgcaggccacaccagcatagtgcatcacgcagatgactttggttttttcggtaatggcgggttcaatttttgcttcgtcaatgttcatggtgtccgggcggatatccacaaacaccagcttggccccagctaaaacaaaggccgttgccgtggaagagaatgtgtagctgggcaggatcacctcatcgccgggctggatgccgcacagcagggcagccatttccagcgcggtggtaccgctggtggtcagcagcaccttgcccgcatggaaccgctgttccatccattcatcacagcggcgggtaaaagggccatcgccgcagatcttattgttggccatggcctggcgcatatagtccagctctgtaccaacctgcgggggaatattaaaaggaatcattgttttactgtcaactcgcaatctattataaccatccggccgttatcactgggcgcggacaacatcactttccggcgtttcgggttcaaaattcagccgcttttcttccaccaccagggggcggtccataatacgggcgttcattgccatgatgtactcgcccaaaaatcccagaaaggtcagctgcacaccacccacaaagaacacagcaataatcattggggcataacccgcagcaaaggtattccagtggatcagctttgccaccaggaacacaagccccaggataaagctgaccgccgcgcagaaaaagccgaagaactccgccatccgcatcccaatcttggtgtagctggtaaagctgagcatggcggcatcaaacaggctgtaccagttgttgtgggtcttgcctgcccggcgcttgggctgggtgtattcaatctccttgcgctcggggccaagctccgccacaatcccgcgcaaaaacggggttgggtcgtgcaaatcacgcagggtctggataaagcttttatcgtacaggccaaacccggtaaactgctcgatcatttccacattgctcatctttttgatggttttgtagtaacagtcccgcaaaaagtacatgaccgggttttcctggctggtggtctttttgccgattacaattttgtagcctttttcccattcagccacaaactttggaatcatctccaccgggtcctggaagtccgcgcagatggtaatggtgcagtcccctgtggtatggatcataccgtaataggggctgttgaactgaccaaagttcttgctgttaaaaatggctttgaccttggggtcctgcgcgcagatgtccgtaatgatccggcgggtacgatcctggcttttattatcaataaaaaggatctcatagtcataatccgggcagtccttccgaatctcatcccgcaccgcctcatagatggggcgggcgttctcctcctcgttataggtagggatcataacagagatgacttttttcttctcgctcatgcaggtttcattcctttaagtttagtctttggcccactgccgcaatagccgggcagacccttatcactatacactattttgcaaaataggtaaagaacaatttattttcgcagttttgcgtttcaaagttcaggcttacagggcggtccgccagggtgtagggctcctcgttttccaggcagaaagtcccctctttggcaatgtggcagatgccgcggtaaatttccatggccggggtgcaggcaccgatcagcagcgttgccgccagcagaatggtcacggcatgctgtgcaagcgtaccgtcccgccatttggtgcccaccaaggcgataaagtaccgggcacagagggtcatcaggataaagatagccgggatggacacccgcatgcagaaatcgcacccctgtcccaccttaaagaacggaatgatgaagagcgacacggcgcaggtataaaacagccagctgcggcggttctgccgccagagcagcagcagatagatgccggcatccagcaggtaaaataccagcatgcctttttgcaggctggtcagaacgttttggccaaaagtctgctgcgctgcctggttcccggcgacagtttcgcccagaacgctgtagccaaaggcgttattggccaaaaaataactggccgtaatgctgagcaccacaaccagcaccagcacattggccggggagaacgccgattgcagcacgcctttttgatgctgtgccagtagaacaatgccgcgcaccaccataaaaataaccagccccacaaatgggaaggggccgcacatcaggcaggccgtgcccagcagcaggtagttgcggcagtctttctcctgcaaaaagcagacggttgccagccatgcccccactgtctggttgaacacccagaacaggcaggtcgtcagggagctgaactggaaatcattcgtccaccattccaggtgcatagcgtcataggccagcaggtccggcagtcggctgctgtacagcgcgcccagaatatccatgccgctgaagaaaatcaaaaacagcaggccgatcccctgctttttgccggtatcggcacgcaggtagaccaacaaattcagcgccaccagataggtgcccagcgccgtccacccccaaagggccatacgggcgaacatccaggcggcatccagcccaaacagggcgtataccggtttggtcagcgccgccgggaccagccagtgcccgatataatacaccagcgccgtatccttttgcgggtaatacaccggccagctgtttatgatcagatcccggtaaatggcgttgcggtaaccccagtccgagttctggtaaaaaaagcccgtctgaccgcccaggtagccccacaacagcatcagggcaaacagcagcaccagctttggcaccgaaagcgtaatgccctgctcttgttgccccacttgcttaacctgcggcgttttgcacacggcataccaccaggcaaaggccagcacggccaggcccgcaacggcaaacggcgcgcggagataccccgcaaaaaacaccgccagcggcgcggtgagataggataaggcaaacggctttaacttttggtaggtcaactgcataaatactgtctggctcctgttcgtccatgcgggtcctgcccgcacggacggggttattccttattggcttaattggtttgcttttgcgtttttgcccacgcaatggtggcgcggatgccatcggcaaaggcggtgcgcggcgcaaagccggtatccgccgcaagctgggtgatatccgcctgcaaaaacatgacctgctgcggcccgtaagggattttgcccaggccaagcggcagggccaggtcgatggcatcacgcagggtttcaatatattcccgcagggggcgggcggtgccgctgcccaccgggtacacggcaccgctgcggccatggcaggccatgcggtacagtgcatccgcagcatcggcggagtaaagataatcccacttctgctcccctgccgtcaggtccgggcactgcccggccagcagtttttggatggtggcggagatcatcgtgttgggaccgtcatgcgggccgtaaaccgaaaggatacgcgcccacacatggtccatgcccagggcggcggcctcggtacggctcatctggcctgcacacagcttggccatgccgtacccgttttcggggtttgtgggggtatcggcccgcagaacaccgtccacacggccatactctgcctggctgccggtaccaacaaacacacggcagcccattgccgccgcggtgcgcacggcatcaatggtatagcggatattctcaatctgagccggcatatcattgcggcccgcgccaatggtgtgcgcccacgccaggtggaaaaaggcatccgcctgcacgggcagcccggctgcggccatgcactgcggcaaatccgccaggtgggcggcatcgcaggcaactacatacaggtttgcatccttgggcagcgctacggcccgcgggctgccggggcggcagaccgccaccacggtacacccggcctgcagcagccggctgcacaatgctgtgcccacggccccggtggggccggttacgattgcggtttgtatctgcctttcgattttttccattttcaacaccttatttgtttttcgcaatgatctctgtgcaaaaagcatgccagctttttttcatttgcctgtctataattttccctacataatagacaattcctgccgctattgcacagcaggcaaaagaaagaacaagcctttgcagttcggtcacttctacgctgtacattgccagtatattcggcaaaaattgtacgcaatacaaatgactcaagaaaactggcatggttgctttccccagaaatctgacaaagccgttgtcaaattttccgtagaaaagcgattttccgcttgccgtaatggtaaatgccgcacccaacgccaaaaccacaatgccatccagcatagcacgtgtctcattcattgaccatatatggtaaagtacccacgcatacccagccaattccatggctgtcatcatcacggccatctttttccctacatcaatttttttcagagttgatgcagccctgtttgctactacccctcccagaattcctgcaaaggcacgcagcattccggtattaacccagccaaacagaagtgtacatggggcatccagtgaaccacagttctgcaggatcacgcccagtatcagcaggattgctaccggggtcgcctgcacagtcaagccataatgcctgcgcagcagcggatacagcacccagaccgcaaaagtcattgcggaaagataccatagcacccctgttgtggaggctacagaaaacccaaagttctgtaaatacaggaaatctgccggaatcagctgtaaattcaacagaattgtagcgctgtcccactgttgtgcataggcacgcactataaaccccaaaacggttgccacaagaaagtatggaaatatcaaacgataacgcttgagcacatcccatgtcgcttctttcatggcattttctaccgaagggcaggttgtttctcttgcgtttaaccggcatatcttttcggcaagaaaataccctgttacgataaaaaagaattcaacgccgatatatcccctgcgcacgtaccacgcatggaacaataccactcccacgcaaaatacaaaccgcagcaattcaatattgccattccgcgcttttttcattttttattttcttacccttccggcaccagggggataaacatctgcttttccagctcttcccgcggcaggaacggtgccaggtcctccagcggcgggctgactagtgtgccgtccggcaggcgcttggtggcgctcttcggctcccagacctgctgggtatcggtaaagatctcgcagaaagtcgggccttctgcggcaagggcggcatccaccacctgtttcatctcggcgttggaatgtgcgcaggaatacgggtagccgaacgcttcggcaattttgcggaactccgggaaggacagatccccgctctccggcccaatgccgatcttgcaatggtctttgaacaggttgttctgggtcaggcggatggagtggtagccgttattgttgatgaggaaaatcttgatcggcagcttatttgtcaggatggtctgcaattcctgcaggttcatcataatggaaccatcgccttccaggcagatggtggtacggcggccgcctgcaatgcaagtgccaatggcggcgggcaggccgtaccccatgctggcaatggcgctgttgttggccatgcggctgcctttttggatgacatacgcctgattgcccaccacgcagcaggcgccgttggaaaccgcggtcaggctgttttccggcaggcgggagctgaggtagcgcacaaaggcgtacacattggcggtggtgccgttttcttcccactggcgcggcaaaacggcgggggaatcctttttccagcgctggcaggttgccagccagtccgctgcctggctgacaggggttagcggcgctgcggcgacatccagcttttgcagaaagtccttggcatccgcccacacggggtgctccacatgcagggtgtgctttttcatctcggcgcggtcaatatccaccatgatgacttccgccgcgcgggcccaggttttccagttatagcccacctggcggatggaaatgcgggtgcccacagccagaatcaggtctgcgttctggatggcccagttgccggggcggtcgcccatattgccggcacgaccgcagtaaagcgggttttcgtcctcgatcaggtccacggcgttccagtaggtcacaatggggatgttcagctttttcgccacggcgcggaacgctgcgtacccgccggaaagccggatgccgtatccggcgtggagcaccgggcgcttggcgttgcggatcttttccagcaccatctgcacggtggcatcgtccaccgggggcggcagccgggcatcgtcctgcgccgggtcatagccgggcaggctgtcggtttcaatgtagccgccctgatagttgaccgggatatcgatccacaccgggccggggcggccggtggttgccaggtgccaggctttttccagcacatagcggatctggttcgggtcttccagcatggtggcgtatttggtcatgggggcaacggatttggtgatatcgtactcctggtcgcccaccgcgcgcaggggcagcccatcggtaaactgcgcggcatagcgggccgtggtatcataccggacctggccggagatcacgaacatggggatggaatccagccagccgcccaccacgccggtcagggcattggtgccgccggggccggtggtaacgcacagggcggcaattttgttatcaatacgggcgtatgcttccgccgcaatggcacttgcctgctcgtgatggttataggtaacatgcagcgccgggtggtggcccagtgcatcattcagatgcatggcgccgccgcccaccacgctgaacacatccgtaacgccatgcgccgcaagaaaatcggccacataatcggccagacgctgtttcattgggggtgtcctccttttatttaatccgttcaagctgcggctgaaccattacaaaatacaaagttctggaatcctgcggggcatcgacccgcttgccgctgtagctaatatcgattgtactttcaccaaaaggaatatccacggtatagcggattttcatgttttcctggctgaccacaaaggtctggctactgtcaccgaaggtaatggtaatgctggggcggtcagaaatatcaaagaaataatcccccactgtaaagataaaggtgtacctttccgtattcagctgcgggtttaccagtttgatctccgcacttttcttgcaccagtaaaacggcagctctttgttggagttttcaggagtataatattctgtgttataaatgccatcccccagctgcatggtaatagacggcgcattatacagcacccacacgccatagaaaacggcaagggaaactgccaatgcccccagtgaagcgccgaaagtaaccagcgtgctgcgtgcagcttttttatctagttttgattgttcaggctttttggttttcagcgctgccaacacacaatttactgcctgtacaacgccccagatgatagctgtcagtattgccaactgtacaatggtgttgcgaatataagagttacgctcttcaaagattggaagcggcagattaaataccatcaaaaccgcaaaaggcaatatattttgacgtgtcatcaccttttcctgggcaagaaaatacgccagcggaatcagcgccatgcagtaaatatagttgccctggctttggtacatcatagccacggtaatcagcagcaacgcctgccattcctggcggcagagcagagcacacacaaccagtaccgccgccacagcaaaggctgctgcaaaaaaagataccgttgcattgctggttccggcaatcaggtccaccagatgcgccccatgtgcgaacatgctgttgatgccattgcctacccaaggtgttttacttttacttccaaaagagaacaaaatcttcagccaaagctgcaagccgtacacgccctcctggaaggcaaacaccgggagcaccaacgctgcaatgccataaaacaccgtgcggattgctgctttgaaatcccggtttcttaaaagcataacacctaagaatgcgggataaattttaagcccggctgctactgccagtgcaaccaatgccagttcccgcacccatgcgcgctttgaacggtgatacatgacgaaaaaaagcgaaagccccgccgccagcaaaataatattgccgcggtctaccgcattaagcacaccaaagctgaataaggcaaaaaacgtactggccctggcccactgggcattttgcatcacgtcacggagcaaaaccgccagcaaaagaaccgccagcaccacaaaaaagacgtatagcaaaaagcacgactgtgttgtgcgtaaatcagtttctgtgccgcgcatggcaactgacgcctcaaagtcataggtccagttatcagataccgaagcaggcaccagtaaaaacagggcataaaagaacaaatttgccaagggcggatacagtgtgtcaaacaccgcatacggctggcgtccacgaacatattcaatgctatggaaaaaatccatgccgacatccagtgtatcatggtataaaaagtacgaaagaaaatcaccatgggtaacatacagcgttaccataaccacaatggcacacactgcgctgagtacacagtacagcttggccgtttttttccagaacggattgctccctcttccttttttaccaaaaaggccttttccccgtttcgtgttattctctttcagcacgcgctggctgttgcattcattctggccataattcagtcccagctgcaccgatttgttatcttccggcaacagctgatctaatccaatgctgataccagatttattctcgttatttgttgtcatgttgtccatacacagccttgccctatttctgttcccggttatgtatcagatattcccttgtttcccatattttttaccgatatattttgcagtcttattttcaacaataaagcaccgccaaccaacctcgttgagtcggatgatggttagggatcccgataccgcacttttccgtgccggataagctccacatcgttgacaggaaacattttgtcgtttatctttccttaaatgtccacaacttgttgatgataaaattcagcggaatcgtaaccagcaaatttacaatcggcgcaatcgttttgcttacgctgaagaacgtaacctctatccaaagcaaaacattagaaaggattgatgtgccgccgtagctgacgtatgtttttccaaggcgtttcagtttactgcgccaatcgtttgcattcccggtaaacacaaacttatcgttccaaaaaaaggcattggcaatgctcagaattgttcccagaacgctgcctaccatatacaggtctgggctgatccacaaaaagatataatacaccgccatcgataccgccgtgttgcttacgccaacaaggccaaacttgataaactgtgcaagcagcgcaacaaattcctctttgctttttgctcccaacagtgccaacaatttctgcatggatcccgttcctttattattctttataagcaatcaaaaagcaaagcctgtattgataatttaccgcagtgcagcagccattttttcttatcagcacggctttgctttttcttattggttcatcttatcagcgctttttactggttcaccgcttcaataatgatctttgccatatagtcgatcatctcatcggtcatgccggggtacacgccgacccagaaggtgttgttcatgataaagtcagtgttggtcagctcccctgccacgcggtaggcgtcggtgccgcggatctggtcaaagcaagggtgcttgatcaggttgccgctgaacaacaggcgggtctggacattgtggtcctcaatatagcgggtcacggcgttgcggtccaggccggattccggcttgaccgaaatcaggaagccgaaccaggacgggcggctgttggcggccggttccggcaggatcagcttatcggcggccggttccagggctgcgcgcaggcggtcccagttatggcggcggcgctcgataaagctggggaactttttcagctgctcgcagccgatggcggcctgcatatcggtcactttcaggttatagccaaagtggctgtaaacgtacttatggtcatagcctgcgggcagttcgccatactgaccgtcaaagcggtggccgcagaagttatcatggccggacgggcagatgcagtcgcggccccagtcgcggtagctcttgatcaggcggttcagcagcgggctgtttgtatacacgcagccgccctcgcccatcgtcatgtggtgcggcggatagaagctggaggtgccgatatcgccccaggttccggtaaagcgggtttcgccgttgatggtgtactgggtgcccagggcatcgcagttatcctccaccagccagaggttatgggcatcgcagaaggctttgacggtggacaggtcaaacgggttgcccaaggtatgggcgatcatgactgccttggtcttgggggaaagagcggcttccagcttggtcacatcaatgttgtactgcggcacggtcacatccacaaacaccggcacagcgccatactgcagcgccggggtgacagtggtggggaacccacatgccacagtgatgacctcatcgccctttttgatctggcggtcgcccagttccggggcggtgagcgccataaaggcaatcaggttggcggaggagccggagttgaccaggttggcgaactttacgccgatccacttggcaaactctttttcaaattcatccgcaaagcggccggtggtcagccagaaatccagcgttgcatcggtcagggcgcacatttctttttcatcaaacacgcgggatgcataagtaacgcggtcgccgggcttgaaatccgtctttttctccttaaagtcatggtaatattctgccaccagcgccttgatctgctcgcgggcttcggcctcattgctccaatttgccatcgtctgctcccttactcactcaaaaattccttgatctctttgtccatctccgccgggatatccccaccggaaagccataccttgctgaacgcaacggtcttttgcatacattccgccatatgccagcgcggtttccagccgaaggtggatttcaatttgctgcaatccagcttcaaaaagtttgcttcatgcggggcgtttgcctcagcgcggttttcccatacagcaccatcgccccacgcctggcagaacaggtctaccagggtgccggtcgtcacacagtcgcagtcatccgggccgacattataatagccggcgtaccggttatcctcatactggcgctgggcgatcagcaggtacgccgccagcggttccagcacatgctggtatgggcgggtggaatacgggttgcgcacaccgatgctctccccttttgccatcgcgcgcacgcagtccgggatgatgcggtcattggcaaaatcgccgccgccaatcacattacctgcgcgggcagtggagatggccacgctgccatccgcaaaaaagctgtttttatagctgtgggtcaccagctccgagcagcttttgctgttggagtaggggtcgaagccgtccaacggttcgttttcgcggtagccccagcaccattcattattctggtacaccttatccgttgttacgttcagcacagagcgcggcggagtttgggcggtgcgcacgcattccaacaggttcacggtgcccatcacattggtttcataggtatagcgcgggtccttgtagctgtcccgcacaatgggctgagccgccaggtgcagcacaatttccggctgggcggcatcaaaggccgctttcagggcggcaaaattgcggatatcaccgatcacgctggtcattttgccttccagccctgccagagagaagaggttgggggttgtgggcggttccaggctgtaacccgttaccactgcaccggaacccaccagcatgcggcagagccagctgcccttaaaaccggtatgcccggttacaaacacgcgtttgccgcggtaaaattccaagttcattgttggttccacacttcccagggcgcacagccagacgcccacattttttccagcatacttttttcgcgctcggtatccatgcactgccagaatccgcggtgcacatagctcatcagctggcctttggctgccagctcgcgcagcggggcctgctcaaaaatggtatcatcgccactgatggtatcaaacacttccggttccagcaccatatagcccgcattgatgatagccccatcgttgacgcttttttcacggaacgcctgaaccgaattgtcctggccgatatccagcacgcctttctgctgttcctgcaccacggcggtcagggttgccagcttgccgtgctgcttatggaacttgaccagttcggcaatgttcacatcgcagacgccatcaccataggtcatcataaaggtttcgttgccgatatatttctgcacccgcttgatgcggccgcccgtcatcgtgttcaggccggtatccaccaccgtcacgcgccacggctcggcgtgctggtcatgcacgatcatctcgttgccctgggtgaagtcaaaggtcacatcgctggtatgcaggaaataatccgcaaaccactccttgatcatatgctgcttgtacccggcgcagatcacaaaatcattgaagccatagtaagaatactctttcatgatatgccacaaaatgggcataccgccgatttcgatcatcggtttcggcttgaacttgctttcttccgaaatgcgcgtgccatagccgccggcaagaattacaactttcatatttttcactcccgtaagcctgcagcggaaccctgcttgcagtcccgcaaaaactgtccgtcccaccagcatttcaaccgccggacagtttggtacacacccagcctattttttattactatgatagtatatcattttcacgtattcagtgcaaccgttccaggaaacttatcacacctagtaggcttgctttttattccgcgttttgctctttgttatcacattttaacgccgcttttgttgccgctgtgcaaacaatattctttacgttttttcgtgcgtattttgtccctgccaggcggcccactttacattagtaggcaaaacaggtataatagtttagttaatctgtgatattgcgccattttgccatattgcgggtgcaggcggtcttattttatccttgctgcctgtggattttttgcggcacgccgtgcgttgtgcggtaccgctcctattaggtctggaggttgcgctcatggggctgcaaagcctgcaatactgtgcatttttggtggttgtggctgccgtttacctgcatttgccggtgcgcatgcagccggtgtttctgctgggagcttcgtgggtgttttatgcgctggccatgccggccatgctgccggtcaccattgcactggcggtgttcacctacctgtgcggccgcggccttgcctggcggggcggcgcacacaaaaccgcctttttgcgccttggcgtgatcggtatgctgggcattctggccttttttaagtataacggcctgttgggcggggtgctgcacggctggcgcgcggtggccatgccgctgggcatcagctttaccagttttgccgcaatcgcctacctgatcgacgccgcccgcggcgactgcgaggtggaaaccagctttatccggctggcgctgttcctcaacttttttgccaccgtcacccaggggcccatctgccgcgccggtgcgctgctgccgcagttgagcgccgagcaccgctttgatgccgcccgcacggtgcgcgctttgcggctatatgcgctggggctgttcaaatacattgccgtggcggatgtgctgaacatggtggtggatacggttttcccccactatgcggattacagcgcccccatgctgattttgaccgcggtgatgtacactttttatctgtatttcagcttttccggctattccgagatttcccgtgccaccggccttgtgctggggctggacctgccggaaaactttaagaccccgttttacgccaccaacttttctggcttctggagccgctggcacatctcgttttcttcctggctgcaggattatctctttatgccgctggcctgggcagatcttggctgctttggccgcctgcccaccgagctgtgcgtgttctgcgtgttctttgcttccggcttctggcacggcagcaccgcgccattcatcatctggggtctgctgcaggcggtttatcgcgtgggcgaagagctgctgcaccgccgctttggcaaacccaaaaagcgcggcaccccggcccgtgtgctgtggggcaagcgggttgtggtatttgttttgtggaccatcagcatggtgttcttccgcgtggggtccggcaacctttccggcatggccgaaaacctgggcgttggcgatgctttcggctacctgggccgctgcctgatgaacagctggtcccccgcccgctttgccggggagctgtacagcacagcgtataccggcttttacgccgctaccattatggtagcggcttattgggcgttcgctgcgctggcgctggcgcttggcatttggctggatcaccggcgcaattttgcctgcaaaaacaaaccggctgaggttgccctggcaagcgccaagcaccgcaatgcgctgtatgttgttttgatcgtttttatcctggtggggtacatcatgcagagcggcggctttaacaccaacgcgttcggcccctatgcagggttttaatcttatggaaaaaaggagatttccggcgtgaagcatatcatcaaaaaattggcgctgctgttcgtgccggtctatctgtggtttgccttttttgtggcgtttgagccaaacaattattttggcatcaaaaaaacagcctcttccagccagccggtggcccgtgtgcgcgcctatgagcagagccccggcaccaacctgatcatcggggacagccgcctggcccactttgatatggaccttgtggactccctgaccgggcaaagctggcagaacctggcctttggtggtgcttccctgaaggaatgtgtggaccttgccaactatgtgctggattccggcaaccaggtggatcgcattctgtttgagctttcgttctacaccttaaacagcagctataacaccgaccgtttttcggcgctggaagctaccctgcgcaacccgctggtctactgcctgaacctggaatacaacgtgaacgccctgaccgtgtttatggacaccgtaaagggcacgccggacaccattgaatccggcgactggaccgcggcggattacctggatgatgccgggaacacgattccgctacacaaaaagctgtatgagtacccggcgctgatcaccacccgttgccagaactggacactgaacgaaaccgagctggcggagtttttggctatggcccagcgctgcgcagaccgcggcgtggagctgaccattgtgctgccccccatggccgccaatgtgcgcaccgaggtatgcgatgcctttggcattaccgccgtgatgcaggacgaagttctgccgctgttggaaaagcagaattttaccgtgctgaattacgaatggggcaccagctgcattaccgatgatgacacccagttttttgacgggttccacctggacgaaaaatacggcctgccggactggacagccgaactgtttgatgatatgcagcgctgatgctgccccaccccaaaaaggaggtcccctgtggcactggactttttgattttgtacgaacacactgttcgggaatatgagagcgatcttttgctcaaattggagctggagcgccgcggctacaccgtgcgcatccgccagctgctggatgccaaagatctgcgcctgtttggcaaagacaagccggaagttctggttgccagctgcatgtatgacaacgaagccatcaacagccatgtgtacaacaacattggcaaatgcagcaaaatcgtcaacctgcactgggagcagatgctctccgacacgcaggaggagggcgattggttcaacatgaacggcaacgccaagcgctgcgtgcagacttgctggggccagcgcactgcccagcggttacaggcccatggcatggatgccaagaacacccccgtgaccggcgctgtgatgatggactttctgcggccggagttcaagggctactttaaggataaggaaaccctgtgcaaggaattcggccttgaccccgccaaacagctgcacctgtacatttccagctttggctatgccagcatgaccgaccaggaagtggccgagctttccaaaatggcgggaacggatttttccggctttgcccgcaccaaccgcgtttcgatggaaaaaacgctggcctggtttgaccgctacctgggtgaccacccggaggtggaactggtataccgccgccaccccagcgaatggaaatgcaaagccctggacgagctggccgccaaacgccccaacttccatgtgatttttgcggattccgtcaagcagtggattgtggcggcggattccatctccatctggatgagcaccgctgtggccgaagtatacatggcgggcaaaagctgccatatcctgcgcccggtgcccatcgagcacgagtatgaccccgtcatctacaaggatgctcactatgtgactagctacccggagtttgccgctgccatggcgcagccgaacccgccgttccccattgcacgggatgtgattgagggctattttgacccctcccctgccccggcctacaagcggatggccgacctgctggaggaagtatacaaaaatcccccgcgagatgaaccgatggggcccggctttacgccgcacttcaacctgctcaagttctgcgcactggcgggggtacacatgctgtaccgccacaagtgggaacccaaacgggtgtttgccttctgcccgccgctggccaactttgcccagcgcatttacggttatgtggacaaagcctatatcccgccggaggagatccagcgcatggaagcgcgcatccggccatatgtaaaataaagttgtttttccggcgcgctgcggtgcgcccgctgcaaatgggagcctgccatgtctgaaccgaaaagaactgaaagctttgccggaaatgtgatgaaatactccattgccacctaccttggctttggcatttccggcgcagcgcttatcatcaagggcgtcctgcccgccgaaagctacgccgttcctgcttccttcatggcatacaccatgtcgctgatgaacgtgggcatgcttgggctggaccaaagcctgctgcgcttttaccacgaaccgcctgccggttccaccgggcgcagcatgtttgccgcgtgtacccggctttcggtgctggtcatgctgctggcgggcggcatcggcagcatctttttcgccaagccgctggcggcggcctttggccttggggccaacggtgccgggctggtgccgtttttgttcctgaacgctgctctgtacatgctggtgcgttacctcaacgtgctgctccggctggaaaacaatgtgcgcgcctacaccaccgaaacgctgtggatgcaggcctgcctgaacctgatctacctgctgcccggctttgttacccaggatgcccgcgcttttgtgctgggtgcggtgtgcagctttgcgggggtcgcagtgttctattggcggcgggcttctaaaggtcaaacgaaagaggcccctgtgcgcggcctgcgcccctatgcccacatttaccgggcggcactgccttacggcattgtgttggcacctgcggccatcctgatcccgctgtaccgcgccatctgcctttcttttttaggcaattacgcccccgcggcggagcagggttcgtttgatttcgcttacaccctggcccagcttgtcaccaccattcaggccggtttttccacctactggggcccctatgtctacgcgcattaccgcaccgagcaggagcgcattggccgcatccatgatctgctgaacctgctgatcttcggctttttctgtctgctggtcatgtttgaggatatcatcttcatcatcttcccggccaaatcggcctgcctgccctactttccgctgatgatgctggccgtggtgttctccatcctgtgcgaaggcacggtgtacggtaacaccattgcccgcaagccgttccaggatacgattggaaccgccgtgggtgttgcggccaacattgccgtatgcgccgtgctggtgccgcgttttggcgtaatgggtgccgcggtcggcctggtagcggccaatgcaacgatgtttttgtaccgcactgtgaccgggcagtattactaccgcaccatccccagcttcagccggacgatctgcggctttttgctggcggtgggtgtggccgtgatcggcgtggtgttcgcccacaattttatcatcaagtttgttttaactgcagcaatcctgtttatttactgtaacatttaccgtgcccagctgtacaagctgtggcagatctttatgggctttgcgcggcggtatctgctgcacagccaagcataactactgcaaaggaaaggttgtatatcaagatgaagcattgcggcacacaagagttgaccaccgagcggctggtcctgcgtcgtatgacaaccgacgactgcgaaatgatgtttggcaactgggccaatgacccggaagtgacccgctacctgcgctgggagccccaccgtgactgggtggtaacgatggcatatctgaacgagattgtcaaacaatatgaccgcccggatttttatgattggggcatctgcgataaagtgaccggtgtgctgatgggcagcatcagcattgcccccgccgaatcctgtgagcgtgaaaagccctatgcctggaaaaacgtgaaaaccgagctgctgggcggcatgtatgagatcggttacaccttgggcaaaaagtggtggaaccagggctatgccaccgaagccgccgctgccgtgcgcgattactggtttggcatggtaggtgcgccctggctggccgggttccacgccagccagaatgtggcaagcagccgcgtgttggccaagaccggcttccattatgaccacgataccgttctgcaccgctttgacggcaccgaggtaccctgcctggcctggtacctgctgaaccccggcagccagaaatccgatgaaccggcagccgctgcccccgctgtacaggcagaaccaacggaaccagcggagaatgccgagacaaccgtctgacattcactcccctgccccatacttttgctgacctggccgaatacggccagaaaggacccctatggacgaaatgaaggaccccatcaccctggactttaccgctacccaggccccggcagaggacgcccctgttgggcagaaggctctggacagcgagcgcccaccggtgcgcgttgtgctgctggcgcttgaccagggcaagtttgactcccagcgcagcctggatgagcttgccgccctggcggaagccaacggcatgcaggccgttgctaccgtgtgccagaagcgcagcacccccgaagccgccacccttctgggggagggcaaagtggaggaagcgcgcctgatatgcctgaataccgatgccgaggccgccatctttgacggcgagctgaccggcagccagatccgcaacctgagcgcggctttgcaggtggaagtgctggaccgcacgatgctgattttggaaatcttccgtgcgcgcgccaccaccaacgagggcaagctgcaaactgagctggccaccctgaaataccgcatgccgcgcctgcagggccttggcgaggcgctgagccgccagggcggcggtggcggcggcggtggcggtgcccgccgcggtgccggtgaaaccaagctggagctggaccgccgctacctgcgcagccgcattgaaaagctggaaagccgcctgaaagagctggaaaagcgccgtggtgaaacccgccgcgcccgccagaaaaacggtgttccggtcatctcattggtgggctacaccaacgtgggcaaaagcagcctgaccaacgctttgtgcggcgcagaaatttttgaagccgacatgctgtttgccacgctggatcccaccgcccgcaaatgcacgctgcccagcgggttacaagtgatcctggtggatacagtcggctttgtcagccgcctgccgcatgatttggtggatgcttttaagagcacactggaagaagctgcctgctctgacatcatcttgaaaattgccgacgccagcgacagcgaagccgccgagcagctgagcgtgaccgatgaagtgttgaacgacctgggctgcggggatatcccgcaggtgacagtctacaacaagtgcgaccgcaccggtgttgccccctatgacccggatgtgctgctggtaagcgccaaaaccggctacgggctggacagcctgctggccaagattgacgagattctggcacaccgtgtgcgcaccattgaggtactgttgccctatgacaagctggccctggccgatgtgttccgcacccgcggcagcgttctggctgaagaataccgcgaaaacggcgtgtattacaaggcaaccgtaaaggtggatgacctgcaccggtttgaagcgtacctgctgtaagcgcaaccgttcgctttgtgcaagataacaaatactgattttattgctgattgtagacaaaaagacctccatccctgcacggttctgtacttgggatggaggtctttggtttatttgtgtgtaccctgcgttacggcaaaattattccgccgtcagcagtttaacagcgcgggaggtgcccaggcggtctgcgcccagatccaggaacttttccatgtcctcaacggtggaaatgccgccggctgccttgatcttgcagcggccgcgcacgcagcgggcaaacagctcaatatcatggaaggttgcacctgcggtagaaaagcccgtgctggtcttgatgaagtcggcaccggcttccaccacgatatcgcacatcttctctttttcttcatcggtcagcaggcaggtttcaataataaccttgagcaccttatcccccacggcccgcttgacggcggcgatatcctcgcgcacagcgtcatattccttgttcttcaggcggccgatattgatgaccatatccacttcctcggcgccgttttccacagcggtctttgcttcaaagcacttggaagcagtatccattgcacccagagggaagccgaccacgcagcacaccgcaacacggcccgccatatactgcacagcctgcttgacatagcaggtgttgatgcagacggatgcagtatgatacttgatggcatcatcgcacagggcctgaatctggggccaggtagcctccggtttcaacagggtgtggtcaactttggaaaggatttcctccttggtgtatttcat

SEQ ID NO: 919 - DNA, 8519 bp, unidentified
  source 1..8519: mol_type = unassigned DNA
atggcagcaagaatttcaaaggctgatttcgatgaaaaagtattaaaaagcaagcttccggtaattgttgatttttactcggattcatgtgtggcctgcaagaagctggcaccggttctcggagatatcgaggatgattatgaggataagcttcacgtatacaaggtcaacacaaactttgacggagagctcgctgatgagtatgaggtgactgcgaatccgacactgcttttcgtaaaagacgcagaggtcttagacagaaagatcggcgtacaaaagcctgccgatttgaaggcgtgggttgaagcattattatagtttttagattattatataaagcagtctgatacaggataataacacttacagataccacaatctgtgacacaggaggaaataaaatgactatcacagtagcaggagagaagaaagaatataaggatggacttacattaccggagcttatcgagcttgagaatgtagatatgcctgagtatgtaacagtttcaataaatgaggaatttgttgccacagaggataagccaaagacagtgcttaaggatggcgacaatgtagagttcctttacttcatgggaggtggatgctaatggcaatgactgatgagcagatcgagcgctattcacgccacattatccttaatgaggtgggcgttaaaggtcagaagaaattattaaagggcaaggtgcttattatcggtgccggcggacttggagctccggcagccatgtatcttgcggcagcaggagttggcacaatcggtattgtggatgcggatgaggtagatttatccaacctgcagagacagattatccacggaacagccgatgtgggcaaagccaaggtaaagtcagcaaaagagacaatgaacgccatgaacccggatgttcaggtcaatacataccgtatgtttgtagatgcgtcaaacatcagagagcttatcagggattatgatttcatcatagatggaactgacaatttcccggcaaagttcttaatcaacgatgcatgtgtgcttgagaaaaagccgttttcacatgcaggaatcatccgtttcaagggtcagctcatgacatatgtgccgggagagggaccttgttacagatgtgtattcaagaatccgccaccaaaggatgcagtgcctacatgtaagcaggcaggcgttatcggagctatgggcggagtaatcggttcgcttcaggctatggaggctatcaagtatttaatcggtgttggagagctgctcacaggatatctgcttacatatgatgcactcaccatggagttccacaagattaagcttccaaaggatacacacaactgtgcagtctgtggcgaccatccgaccattctcgagccaatcgactacgagcaggaggtctgcgaggagacagcgggcagatttgatgcacctcgtacacaggaataaaaagacagtaaggaaaggaacgatatgagtatcataagaatgaaatatccgtttctggatgaaatagcaaaatatgctaaagagcatctgccggaggaggcgtgcggtctgatagcaggcagtgaggacgaaaacggtcgtctcatcacaaaggtatattacctgacgaatacagaccatgccgaggaccatttcacaatggatccaaaggagcagctggcagccataaaggacatgagagcaaacggccttaagccgcttggcaactggcattcacatccgtctagcccttcaaggccatcggatgaggatataaagcttgcatatgatccaaatgcgagctacatgataatgtcgcttatggcagaaaatcctgtaatcaactcgtttcatatcgagggtggacaggtcacgaaagaggatttacgaatatattctgatgaatattacttctaaatcatatgttaatgttttgagtcgcagcgaaagctgcaaagaaaagtcagcttcatcgaagatggcttttcttttttagagaaagatgttattatagcatgtatatttaataaaacgaaagagcgttcgaaaatgaaattaaaaacgaaggaacttacaacatgtgcgctttttgcggcacttatagcagttggagcatttatcaagattgatattccgcttcctatgtacaccatgcattttacattacagtggttctttgtgctgatggcgggatttctgctcggggcaaaactggcatcgcttagcgtgatagtatatttgtgcatcggactggtgggagtgcctgtatttgcggcaggcggtggtcctacatacattttaagaccgggctttgggttcctcttaggctttgtgcttgcagcatttttaatcggagcgattacagaaaagcttaaaaagaccaatgcgtttatactcattcttccggcaacggtcggactggtggcatattatacagttggagcaatatacttttactgcatgaagaatttctatgtggcaacacctgtcagctggggcatcgtaatagtagattactgtctgataactgttgcaccggactttatattatgcgtatcggcagcagtgttttctgctaagcttcgtcctgtttttgaaggaatgctcaatggatacagtgtgaagcataaggcaaaaaataaagcataaagcgtataataaagtataaaataaggcatgaaataatgtatgaaataaagtatggatatagtattacagggagataaaaatggcgtattttccgatgtttgtggatatgacggaaagagagtgtctgatcgtcggcggtggaaatgtggcataccgcaaggtgatcgtaatgctggattttggtgcgaaggtcacggttgtggcagaggatatatgtgatgagctgagaaagcttacaattgatgatatagcaagcgaggataaaacgggctcatatacggcaaataaagaaaacaatcagacggattcggatgcagcagatagaattacgttcataaagagaaggtttgaacgaaaagactgtgacggcatggaaatggttatcgctgccactgatgacaatgctttaaatcatgagattgcagagtattgcaaagctaaggacatcatggtaaatgcggtcgatcagaaggctgattgtagctttatttttccgtcatacataaaggaaaagaatcttgttgcggcattttcgagcggaggaaacagtcctgtgctgactcagtatctgaaaggcaaagagcaggagattcttactccgtttcttggtgagctgaacgaatacatgggacagatccgcgaaaaagtaatagcgcaatatgacactcaagccgagagaaagcgtgtgtttaaagaaatcttgtgtgcagctattgataatggaaggattccggaaatatagtttaaagtatggtattacagattttaagttgttgttcatttataaatgataaatggaaaatggcatgatccgtaggagagtaaaatgaggtatttaataggaacgagaggctcaaagctagctcttgttcagactgattacgtgatagataagttaaaaagagcatatccggatgatgattttaaggctgttatcataaagacaacaggcgatttagagcagaaaaaggcactcgataagattggatcaaagggtatcttcgtaaatgagatagaggacgagcttttatcgggaaagattcatatggcagtccattccatgaaggatatgcctgatgaaccggcagcagggcttacatttgcaaaggcatggaagcgtgaagatccaagggatgttttggtactaaaaaatgccgcttcactggatgagcttcctcatggtgccgtgataggaaccggaagcaagcgcagaaagtatcagcttttaaagctgcgtcctgaccttaaggtggttggcatacgcggaaatatcgatacaaggcttcgtaagctatatgatggtgaaattatatatgaagagattgccgataatactgtaaataacaatgagatagctaacgaaaaacagaataagtataacgaatacaggctggatggaatcgtacttgcagcggcgggaataaagcgtatcggaagagattctgagatcacacagtacttttcagaggatgatatgattccggctccggcacagggcacactggcgcttgagctacgtgctgacaatgctaagctgatggcaaagcttgatgctttgtcagatgagaaaaccaatctgtgcgcaggcattgagagagaatttttaaagcgaatcggtggaaactgtcatctgcctgtggctgcatactgtgatattgtaagtgaaaaagaccgcggtaatgacagcaacaaaaataacaggctaaagcttcttgcgatgtttggctcagaggatggaaaaaagcttgcaaggacagagcaggtatgggatattacatcagacagaaacaatattgtggagcgtgcggtgcacgatattcggtataaattagaaatcgactaaaaaaatatcaagtcataatttttaatcataataattcagtagaaaaataattaggaaaatcatgagagaaaacacaggaaaagtagtattagttggagcaggaccgggagatacgggcctgctcactttaaaaggagaaaaatatataaaacaggcggattgtctggtgtatgacaggctgtcatcaccagagtttctttcaatggcaaaggcaggctgtgagcttatttatgtgggcaaggaaaatcacaagcatgtcatgaagcaggatgccataaacgagcttttgtacgagaaatcaaaatatcatgagcttgtagtccggttaaagggcggagatccgtatgtatttggaagaggcggagaggaagctctctacctggtagatagaaatgtagaggtagaagtggtaccgggtgtcagttcatcggttgcagcgcttgcggctgcaggaatacctatcacacacagaggcatagcaaaaggctttcaggtcatcactgcgcacagcagaaaggatgaggaggcagatatagactattcccttcttacagatgagacaatcacctgcgtatttttgatgggacttgcgcatgtaaaaagcattgcagcagggcttatgaaagcaggacgaagagcggatactccggcagcagtgatatcgaacggtacacttgccgcgcaacgcaaatgtatcggaacgcttgcggatatcggagaaaagattgaggaagcaaagctgacatcaccggctataatcgttgttggagatgtggtttcactgaatgacaggcttgatttctttgaaaaaagaccgctgtttggaagaaaaatcacagtaccgtatatcaaaacaaacgaattgatagcaaaattacagcagcttggagcagacatcacaccggttaagacaggcataattaaaccagttataattcctaaatttgttgataaagtaagatcggcagactggatagtttttacaagcaaaaatggtgtaagatcatttttctataatctggatctggcaggggcagacatcaggcttatagcaaatgcaaggtttgcagtagtgggaaaagctacagaaaaagagcttgcaaagcatcacataaatgcagatattattccggcagaacagaccggaaaagaacttgcaggagaattgagttcgtatatgggcgataatgatgaaatcaaagtctgcattttctcagcaaaggaggcttcacctgacattgaggcagggcttaaagaaatatgtcaattagaaaaaattgatgcatatgtaaatgagcaggcatatgagggtattcctgaaagcattggaaacatggtaagtgaagctgtttttacaagcgcatcaaatgtggaaagattttttcatatgctgccggagaatgcatacgtggaaacagcatactcgataggtgaaaaaacaacagcagcattagagcagcacaatgtcagagagatactgcaagctgatgacagcagctatgaagcactggtagataaaatatcttataaagatgcttttaaagattaagaatttatggtgacaaaagttatataaagttatataataaatgcaaagttatataagactatataaacttatatacgaaacaaaaagttatataaagttatataagaggaaaatcaaaatgcaaaatccatttacattatcattcgggaaaaaaccactgcaatatatatcaagaatctcacagaccaatcagatagtagagacatttaggtcagaaaatcctgcaaaccagctttttatgataaccggggtaaggggatcgggcaaaacggttatgatgaccaatatagtatcagagataaagaaggatgaggaatggctgacagttgagcttaaccctacgagagatatgcttcagagccttgcagctaagatttacagtatgcctcagatgaataaaatatttgtcaatgcaaaactggatttttcagcgtttggactgggcgtttccatagaaaatgcagcaccggttacggatatagaaaatgtgctggaattgatgcttgaaaatataaagaaacataataagcggttactcatttcagttgatgaggttacgaactgtgaatttgtaaaagtatttgtcagttcatttcagatatttctgagacaggattatcctatttttctgcttatgacggggctgtttgaaaatatatatgatctgcagaacgacaaggcacttacatttttgtacagggcgcctaagataatgcttgaaccacttagctttacagcagtcaggaaacactatatggatatttttgaactggatcaaagagaggcagacaaaatggcagctcttacaaagggatatccttttgcattccaggtattgggatatctttactgggaaaacagggatgatcacacgatagaagatattttaccggaatatgatcagtgccttgatgagtatgtgtacagtaaaatctggtcggagctgtcagagcttgataaaaaaatattgttggaaatatcagtaagtggtgaagaaaaggtaaaagaaatcagagaaaaactggatatgaattcaggattattctcggtatatagagaccggctcaaaagaaagggggttatagatacctctgagtacggtaaaattactctcacacttccacgatttgaagaatttgtcaaaacgcgccaaatgtaatatactatatctaactgaaacattaacataataaaggagaagcacaatgaaagaatacagtataggtacaaagtgtgtacaggcaggctatgcagccggaaacggagagccgagacagattccgattattcagtcaactacattcaaatatgacacaagcgaggacatgggaaagctttttgaccttgaggcagagggctatttctacagcagactgcagaatccaacctgtgatacggtagcaagaaaaatcgcagctatggagggtggcactgctgccatgctcacatcatcaggacaggcagccaatttctatgccatgttcaacatatgtgagtgcggagaccatatcgtggcatcatcatccatctatggaggcaccttcaacctcatcgcggtaactatggcaaagatgggtattacagctacattcgtatctcctgatgctacagaggaggagctgaatgcagcattcagaccaaacacaaagcttatgtttggtgagactattgccaatcctgcgcttacggtgcttgatatagagctttttgcaaaggtggcacacgagcacggagtaccgcttatagtggacaataccttcccgacacctgtaaactgcagaccaattgagtggggcgcagatattgtcacacactctaccacaaagtacatggacggacacggagccacactcggcggagcaatcgtagacagcggcaaattcgactggatggcacatgcagataaatatccgggactgtgcacacctgacgacagctatcatggcatcacatatgcagagaaattcggcaaggaaggtgcgttcattaccaaatgtacagcacagcttatgcgcgattttggttctatgcagtcaccacagaatgcatttatgctgaatcttggccttgagtcacttcatgtgcgtatgccaaagcatgtggaaaatggacaggcagtggctgaatttttggaaaatcatccaaaggttgcctatgtaaactactcagggcttccttcaaacaaatactatgagagagcacagaagtatcttccaaacggaggctgcggagtcgtatcatttggcttaaagggcggcagagaggcagcgtctgcatttatgaaggcattaaggcttggtgcaatcgagacacatgtggcagatgcgagaacctgctgcttaaatccggcaacaagcacgcatcgtcagatgaatgatgagcagcttaaggaagcaggagtgccggcagagcttatcagaataagcttaggtcttgaggacaaggtggatttgattgcagatatctcaaacgcactcgacgctataaaataa

SEQ ID NO: 920 - DNA, 11698 bp, unidentified
  source 1..11698: mol_type = unassigned DNA
ttaggcggtgcattgtgtaaggcttggcagctcattttcagttgtttttctctgtgtgcccttgtcaagcgatgttttcgtgcatgctttaacatcgctaatttcccgtccagcattgaacagtgcattgattgtcgatgattttccaacacctgtaaagccaatcaaagcaattttaggaggttcaacatcttcaaccgcttttctaagctttttttccatctcaaatatttgagccaagctcattcctgctttttgcaacgtcggtttaatttctccaaaaattctaccgaaagatccattatcaaacatctttctgtcctcctttttgcttttgtaatcgtatgaaatagttcaacttcaaatgggcggacatcctatttacttatttagcatcacctctaactctatcttatcatactactattttcgatttaacagtgatttgtatcttccaatttccagaaaccatatggttccatattatacaccgcaaatgatgtctcgacaatttccttaaaaagtcacatgcgatgttccgcttttagccggatagaaatccgttgcctgccatccgccacgtagaggcagcatatctagacggcgtagccatgctttgagcatggcttagtcataatcacgcaaagaactggtcttccagcatcaggcacaggcaatgatagataggcaaatgcagttcctgaatcatataggtctcggtctgcggagccttgatgcacacatcgctcatatccttcagtttgctgtcctttgctcccgtcagtccaatgaccttcattcccttagcgtgtgcggttgtcgccgcatacaacacatttttactgttaccactggtggaaatgccaaggaacacatccccggatttaccgtaaccattgacctgctgcgcgaagcagagtagtggttcacagtcattcatataggctgtggacagagcgggatgaccatccagtgcaattgcaggaagtgccccctgcagattttctgccaaaacagaaccaagctcctgattttcttcaaccagcttttctgcgaaatctgcttcaggcttacgaggcagtttgaaacccttcattagctcaccaacgatatgctccgcatctgctgcagaaccaccattgccagccacaagaagctttccaccgttcttataggactcctccaacaaaaggtatgcggcaacaatatcattctttgccgattctaaagaagggtatcgttctaccaacaagtcgatatgtctcatcaatcggttatccagttcacacatagtcgtactcccccctcttatttcaggtactgttctacaaagtccttcaaagacgataccgtcacagtttgtccgcaggactcagagccaatcaaagcagtctgacatccggcattctgacccgccttgatatcattttccccatcgccaatcatccaagactgcgacagatcaatgttaaaatcccgtgctgcattcagcagcattccaggtttcggtttgcggcaatcacagtcaaacttcagatctgggcgctccccttcatatcccttatgcggatggtgtgggcagaagtagatggcatccagatatgcgccttctttgcctagaagtgtctccattttgttgtgaatctcttcgagttcttcaaaggacacttcaccacgggcaatcacaggctgattcgtaacaacaattgctagataaccggaggcgttgatttttttgatcgcatctgcaacgccgtctatcagttcaaactcgtctatgttccgaaggaaacccacatatttattgattgtaccgtcccgatcaaggaacaccgctttctgcttgttcttcagattcttaccggaaacacgaccagtcttgtaatcctcgcatacagagtaatagcgttcgggtgtccccatgtccttcacatattcaggactatcgtagcagaacatctttccggttcctgccaacggcttaaggagctgacggtccaagtcaaccttgatgggtttcccgttctctcccatcgcaccaaccttgtccgcattaatcctagaatgatccaaaatgctcggattgataacatgaagtccagcattgacacgattacggtagtattccggacgttcatcttccttagccagccattgctcgacagttccatttttatcagcaataatgagtccgctgtcataaggatggctattgggatgcgtgaatagagtaaccaaaccgccatgctgtttatgaaatgcaacgaaccgattgaaatccacatcgaacaccgcatctgcattcagcaatagaaaatccgaatcaagcttgtccctgattttgaaaagcgcaccggcattgcccaaaggttccttttcaagatagtattcaatatgaacaccgaagggcttccctgtcacaggggaaattccagagccgtccccgaagtagtccataatgatgtttcccagatgagaaacagtcataataatgtcggtgagcccttggtcacgcaggcattccagctcatgttccagaacaggtttgccttcaatttttatcattggtttggggatgtcgctggcaaccgaggaaatacgtgttcccttgccaccggccattattactgttttcatcttaaactttcctctgcttctcatttagctcttttcttaagtacagaaaacactttgaactctttatcggcccataaaatgctaagaacgcacaaaattagtacagcaccccatctaacaacaatctgtccccttaggaaaagtgaaagcgccgcaacaataataagtgccccagaatagactattagcttcattaagtcaaatatctgccgtccatgaattttaacagccaaaaagtagtgaatcaaaaaataaattaaatagataattaaggttgtatatgccgctgcaatacttccgaaatatttaataccaaagtagttcatgattatgtttaagactgccgccgcacatgttccaccagcaatataattggttttttcatagtagtactcaatctgtgcaggcaggttgtataaaaaagcaaaataaccactcacaaccaatggtgcaatataaaaaacagaggaagcatagtcttcagtgcctagaattcccaccaactctgggctcacaaggagaactactgcgataaaaagcatcatcccaaatgcaaaagagtttcctctcttacgaatcaggtcatatttcttttcaaccattttttcatagaaccacggcccccatacattttggagagatgtcgatgtaacaaaaacaagattataaatattatatgcgaagctgtacacaccagcattttccgctcccgtcatcgactttatcatgatgcggtcaaactgatttaaaataacctgagaaactccatgaaaaatcaatgggacactaaacgttagcccaaaccgccatttttcggcatcaaatttcaatccactttttgtcccgcagaggaagtatgcagcaatgcacattccaataataatcgccggcacggcatttcctataacgcgtccaatatatctatcatcggagaaccaggttgtaataagaaatattgatatcgccgttgtggatacagcattcactaacgaaactgcaaaataacttttatatttatactctaggctcacatacgaattatacagagtcagcaatgccgctgcatagctctgaattaagagcaaattaaacacaagtcttgttaaatccaacatacctgccagcatcggatatatgatgttggcaagaaccatgattgcagcagtcgatataacgcccatttgaacacatgccgccatatagctgctgaattctatcttcgaactatatcgaatttttgcgtttttcaggcttgcatgtagcgccagaccaagtacaactgatagcatcgactcatacgctacataggtattaaaattaccataatcagctgttgacatcagtctaacgtatatcggaagtgtaataaatgacaaaccctttataaagtaatttgcaaaggtgtatcctattccagctttaatgtattttttatcgctgcttttactattcatattttccttaatcacacttttattacggttgttcatctaagattttctttataacacccgttaactttgtacttgaaattccatctgtatgggatagatatataatttcgaccccatgcggttggagctgtttctcgtacttttcccattgtggagttccttcccaatccgagccaacaaacatcttgtcaaaatgatacttttcccacgctcccagcttattcttatcctcttgaggtacaaccttatcaacatcccgtaatgctgctacaattgcagctctctcttcatatggtattacaggtgttttgtttttttccttctgtaccaattcatcagtgctaacacctacaattagataatcacactgttctttagcccgatgaataatatttaggtgtccaatatgaaacatatcatatacacctgtcgtatatcctattatttttttcataaaaatcttctttcctcaatgatgcataagcattactcagaataatatgctcatagcgaaatttatttaatacctatatgtctctttaattcccatccacttctggtccttatcgctcagattcagtgtcgtaccatctttcagcatatagccttccgcacttgcacttcctttgtactcaccctgtacttccggccactcaataccgatttcagggtcattccaagccataccgccctcatcattcggatgccagaagtcgttgaccttatagcagaactctgcctcgtcgctcagcaccagaaatccatgtgcaaagccctccgggataaggaactgcttcttgttttcagcagacagcgttacgccataccacttgccataggtttccgagttgcttctcagatcaactgcaacatcgaacacagtgccatgcactgcacgaaccagcttgcactgcggatactgcttctggaagtgcagaccacgcagcacgccctttgtagacatggactgattatcctgaacaaagtgaacgtcaatgcccgcttccttcatgtctttttcattgtaggtttccatgaaatagccacgcgcatcaccgtgaacagcaggctcgattacgcaaagcccctcgataccgcctacatttttctcaactttaatctgtcccattttcaagcctcgatttctttcagatatcggctcagcgcatcctgccaagtcggaagcggcgtgaaaccagcttccaccagtttgctcttatccaaacggctattaaacggacgagccgccttgctcagaccgtactccgccgtagtaacaggaaccacttctgtcttatatccagcctgacgatagatttccttcgtgaaatcgtaccagctgatatatccgccctcgttggttgcatgataatagccgtatttctcggtttcgttcatatcaaccaacagccgagccaaatcatatgtataggtcggtgtaccaatctggtcattgaccacccgaacagtatcgtgggttttgcccacattcagcatcgtctcaataaaattcttgccattcagaccgaatacccatgcgatacggacaataaaatacttttccagtgtctggctgacagccaactcaccttccagttttgtctggccgtacacattcagcggcttatagtccttgcagtccggcttccaaggttccgtcccctgaccatcgaacacataatccgtgctgatataggtcattttgcagtccagcttcttacagacatccgcaatgttctgtgtgcctcctgcattgatggcacggactttcgccaccttatcgtcatcttctgccatatcaacagcggtccatgctgcacagtggatcactgcatcgggatttacttctgtgataactttctcaacagcttctttattcgtaatatccagggcaacatacggtgcttttgttactgcggaaccgtctgccataccactgtaattttcctgaatatcagagccaacgccctcatgaccgcgcttcaaaagctcgttcattacgtcatgtcccagctgtccgccaacgcctgttacaaaaaacttcattccgattcctccctaggctttagcggttactgtacattttctcgtagtagttctgatactcgccggaaataatggtctcccaccactcacggttatcgagataccactggatggttttcttgatgccatcttcaaacttggtttccggcagccagcccaactcattatgaatcttggtcgggtcgattgcgtaacgcatatcatgccccttacgatctccaacatgagtaatcaagctctccggcttgcccagttctttgcagataatctttacgatctcgatattctgcttctcgttgtggccgccgacattgtagacttcaccaacgcggcccttgtggataatcagatcaatagccttgcagtggtcctccacatacagccagtcgcggacgttcagaccctcgccgtaaacaggcagcggtttgtcagccagtgcattggcaatcatcagcggaatcagcttctccgggaagtgatacggaccatagttgttggagcaacgagaaatcgtcacaggcaggccgtaggtacggtggtaggccagaaccagcaggtcagcggcagccttggagctgctgtacggagagctggtgtgaatcggagtctcctcggtgaagaacaggtcaggacgatccagcggcaggtcaccgtaaacctcatcggtagaaacctgatggtaacgctgaataccatatttacggcaagcatccatcagcacactggtgccgatgatattggtctggagaaagatgcccggatcttcgatggaacggtcgacatgagattctgccgcgaagttgaccacggtgtccggatgctcttcttcaaacagcttatccacagcttcacggtcgcagatatcggccttcacaaaacggaaattcggattgtccataacagatgccagcgtggacaggtttcctgcataagtcagcttgtccaagcagatgatccggtaatccggacacttctccagcatatgaaaaataaaattggaaccgatgaatccggcaccgccggtaacaatgatagtcatttgatttttacctttcttaatatcgaatttttccatccgcaactgctttcaaatgcattccatacggactcttgccgtatctggatgccgattccagtagtttttctctggaaatccagctatttcggtatgcaatttcctctggtgcggaaattttaatgctctgacgcttttcaatcatctgaacgaaatcagcagcttccaccaggctgtccatcgtcccagtatcaagccatgcgaacccacgccccaaaagctgaacatccaagagttcttcctttaagtacatctcattcagcgtggtgatttccagctctccacgcgcagagggcttcaccgcattcgctctttgagatactcctgcaggatagaaatacaggccggtaatagcataattgctcttcggcttctgaggcttttcttcaacagatatcactttgcctgtttcgtcaaattcgacgattccaaagcgttccgggtcgttaacataatatccgaaaacagtagctctcttctcctgctcggcattcttaaccgctgccttgagaattcggctgaagccattcccatagaaaatgttatcgcccagcaccatagcacaggcatcatcgccgatgaattcttcgccaagaataaaggcctgagcaagtccatccgggctaggctgcacctcataagaaagacgaacaccgaactggcttccgtctcccagaagtgcctcaaagcgcggcgtatccattggcgtagaaataatcaggatgtcctgaattcctgccagcatcagcgtggacagggggtaataaatcattggtttatcatataccggcaaaagctgtttcgatgttaccatcgtaagcgggtacaatcgggtgccgacaccaccggcaagaattatgcctttcattgttttttctccctctactatattagtgaattttcttcaatatggccttccaaatttcctggcatgtccagttgtcatacttccagaagagttttcttatcttctcggcttttgcatcgtatttcgtagtaccgctcattaatgcaattagctgctcttgcaaatcgcttggtctttccactttttgggttatgcatattgaatcatagtccattaaaaatcctctatcttttgaaatataatatgtataatccggaacgtaatacaatatcttctttctaaaatacagcgcatctagcattgcagatgagtaatccgtgacaagcatatcaatgtatgggaacaggatattaatatcaaaatcactgttcaacagtagataattttttccttcacgtttttcaacggaattgacattagaatcagcagaatgcggcttttcgatccataaataattagactcttcaatatatgtacgcacggcctcaatatcaagtggatggataaactcttcataactatccctgaaggtcggtagatacaagataaccccatcaaagccgcctaatccattcagtactttttcttcttccggcaaatacttctcacatcggcatgttctcggataagccgcatctatgcaataagctttatttgcgccaaacttgatttcaaaaaattcagcatccaagtcgctcttacacaggagataataattcccagaagtccatccgccgcttgctgttacacaacgaagaattttatggaatctagtttcgtgagttcgattcatattcgttccctcaacacgctttattccatttccatgccataattgtacttttttgctgaaagcagatagagaagtatcgatatcagcagtatactttccttcatcgccatagacattgcatataatatgaatacccgatttacaatgccaataaaatgacttcaatgttccaattaagacacactcatacccgtaggactctagtaactccaacacctgtctcgatctcgttgcccaaacaacatgatttatatttagttcttttttatggttacttagatattgaaagagaaatctcgaattatccgcaaatttatcacccatccaagcaccaaccagcaccgtccgctcatttttacctaaaagaatccctaccaatcccacaaaaaggttctttgcaagattaaataatcgttttccaactcttagcatttcacatctctccaacaacaatccgctttttaaagattatttattgcataactctttggattttttcaaggcttctaagtatttaagtccgtatctctcatccggctccagatgtgcaccttcagcccattcattccacgcattaataaaaacaataccctcctgaccagcacgaatagacttcataatctgtgcagtcaaatactgttcaaaacgctcaggagttgaaccatcatacacaatagaatttttccctcttcgtgcagtattgtcccatcctgtgaatgcaccaacccattctttatcatcctcaattggacgctttgaagatgccgtagcagcatcattatagtaatattttttgtacgttctaatattcagcagttgcaatactttagtaaatccaacttccatggcatatttagggcatattctaaaagctttcaaaaaattatcgcctagtatagctgttgttgctgccggttcaaaatcaatccaatgatcaaacttgtctcttaagctccgatcattttgtgggtattggcaagcaaaacaaaccccagaaaaaccagccgccatgactgcttctcgccactccgccaagagtacatccaaattgtcgataagttgcggcttataaatcaataagataggtctccctttttcatccctcaaatatcgttcatctgaaaagaatttcatcaaatattcgatatgattttttctatcttctccatcaccataatcctgagcaattagaactgattgttcacttccatcccaacgccttgaccaattctcattcgcccaacataagcaaaacggcatatttaaagatttgtcagctaaaaacctttcaataggtttttccatcaatttctttccctgagcaaaccaatagtgatagaagcagaagccatccactccatattcttttgccagtctaatttgctctgacaaaacattttcattctttacaagatcataataatttccattcaatggtgtatgcggttgataatgtcctgtaaaattaggttttcctttcttagtgtttgtccattcagtgaatccctttccccaccatttatcattctctggaaatgtgtgaaattgtggcaaataaaacgctataattttcattcctcatatcctcgctcaaatctttcaacctgattttcttcgacataatccaattttgcttttgcataagacacaaaaacaaagaacgtcaaatatgttttggcatataatatcggagccccatataaagcaaacatcaccagcataaatcctatataaattgccacaccatcatgtaacttcatgcttttcaccaaaattttaatgaggtaaagcaaacatccgactgcaataactggtgaccagagcagcaaataactaagtaatacagaatgcgggtattccatgctaaactctcttgccgactccctctctatcgcatacagagagaatggcaatccatgtgggttctttttaaggattctaatgctaccttcaacactgcgaagtctacctaaatacgaatcatcagttgtaatattttgtaagacatttccttgaattaggtcagtcactcgacttaatgactccatcttaattcccttatttgtgatcagcattaagattattaccacagtccctgtaactgtcaataatagtattttctttccatttccatcttctatctgtttcttaagaaatcttccgacaaaagtaacaactattaatagtaccgcaaggagatttgttcttgaccctgtcaggacaattgtaaccaaagctgtcaaaacgggtataactctagtctttccttttctcgcaaagaaagtccacaccagatagtgagcggcaatatttgctgtttggccgcttcccattccgattgcagcataccttccgttcgctccagatgcacccgataccatgctaaccatcactaggacaaattgtagtattgtaaaccaatccatgattgtctcaatatcttcaaatgaattctccttctccataatgacagcggccgccgaaaagccggttatcaaaataagaaacatttcatatgaattcagagtaattacattatcgagattaaaaagccaatacgccacattcaaaacaattagcagtatgtatatctttaaaaattttacaatgttactgcatctatatttatataaaccaataagaataacagggatttccaaaagtgaaaaatagtagttatatgtgtaggtcacatttattccacaagtggtcattttataaagcgcagtcatattctttattccatctggcagcgataggacaagaaagacatacagcagcacacatatatatcctaattttcttttttcaataaccagcttcat

SEQ ID NO: 921 - DNA, 5602 bp, unidentified
  source 1..5602: mol_type = unassigned DNA
tcacagcaatttgatcctcaaatctcccagcagcgacactgcctccggcagggagaattttgcgtcctgcagcttgcagccgaaaatgtcgactttatacccgctggcctctttgaagtttgccttgcgcatatcgcactggaaaaactcggtgtccagcaggtcgcatttctcaaaatccgcgctgacgagattgcacttggcgaacatcgagcgctgtatgacactgcccgcaaatttgaactttgtcaggttcatttcggtgaaggtgttgtatttcaggcggcagtcccgcaggctctcgatggggtcggcaaatgcgccgtcgccctgaagggacatccagtcgatgttgttcagcgtacagttctcaaaatctgtgaattttgcgcgtgacatagtggtttttaaattagtgaccgtgcagcgcaggaactgacattcggtcaggacgctgtggtcgagcttgcagtcctcaaacgtgcagtcggcaaaaacgcagtccgaaaagtcgcagtcgtaaaacgtttccccggtgaaggtcaggcgctcaaagcgttcgccctcgtggtattcggcacgcatcaaatcaccagcccgccgttgacaccgagcacctgccccgtgatgtagccgctggcctcgtcagcgagaaagaccatcgtgcgggcgatctcgtccggctcaccgaggcgctccacaggggtctcctccgccagcgcggcgcggtcctcatcggtaaagccggccatcatgtcggtgttgatgacaccgggcgcaatgacgttgaccgtgatgccgctggggccttcctccttggcaagggccttgccaaggccgatgagccctgccttggccgcgctgtaggcgacctcgcagctgccgccggtctggccccacatgctgctgacaagcaggatgcggccgtatttgcggtggatcatgccgggcagcaccgcgcggcaggcgtagaacgcgccgtccagatcgacggccatcatccgccgccagtcctcgtcggtggtgtcggtgaacagcttgacctgcgcgatgcccgcattgcagacgagcacctgcagactgccgagttcctgctcggcccgggcaacggcggcgcgcacctgggcggggtcgcccgcgtcggcccggatggcaagatagaggccgccggggttgatttcttcggcctgacggcgcacggcgtcggcggcatcggggtgggaattgtacgtaaaggcgacgttatagcctgcccgggcaaaggccatcaccgccgccgcaccgatgccgcggctgccgccggtgatgaaaacgttatttgtcatggtaaaacctcaattcattgcccacttgcttgcctccctctgggagggaggtgccccgaaggggcggagggagagagccttgccatggcccgaaatatttcggatgaccgcaaggctctctcccccaccgcctgcgggcggagccccctcccagagggggccaaggaaaaaggcgctatttctttttgcgtttttcccgcagcatcacaaaaaaattctgcagcagggcctgcgcctcgtcctccagcaggcccgattctatgacaggatggtggttgaacggcagggcgaacagatcggtcaggctgccgcaacagcccgccttggggtcgcgtgcgccgtagacgacccgctttaaacggctgttgatgatggctccgctgcacatcgggcagggctcgagcgtaacgaacagctcacactgccacagccgccagccgcccagcgccttgcaggccgcgtcaatcgccatcagctcagcgtggtaggtggcatttttgccgctctcccgcaggttgtgggcgcgggcgacgatctcgccgtccttcgcgaccaccgcgccgacgggaacctcgccgagggcggcggcgatctttgcctcgtccagcgcggcacgcatcagttcttcatcggtcatactatcccctcaatgtacaaaaatggcggcgtaggccacgagaaacagcaccgttgcgcagtagaccgggctggtaaaaacggtcagcacatccacgccggggcgcagtcccgccgaaaagctgaacccctgacggcgggcgttgcagatcatccatgcgccgaacgccgggaagaacagcaaaatgaacagctccacaccgaaggagacctccgccggggcgtaataccgcagatagatcgttaaaaatgccagcgcgttgttgacaaggtgcagcagcattcccggcaggatgctgcccgagcgctcggccagccagcccaaaaacacgccgcaggcaaaggccgtcaggccctgcgcaaggtcgagatgcagcacaccgaacagcagcgccggggcaaagatagccgccgcgctgccgcaggggcgcatcaagccctgaaacgcaccgcggaacagcagttcctccgcgatggcgggcatgacgcagagcgccagaaactgcatgagcagctccggcccgccgctgggcagcatttcactggtcgcggggctgcctgtcaggcggttgatgagtgcgcccgccagattggcaaggttcgccacgccgagaaaaaccggcaggcagaagccggggctccacggtgcgggcagcatgatccgcaggtctttggttttcagccgcgtgacctttaacagaaaaaccagcgtcagcacgatggcccccagcccgatgagcagctgaaacagcgccgtgctgaccccgctgaagcccagcggcttggccagactggcaccggggtgggccagccccatcagtgcgctgaccagcagcgtgagcaggccgcgcaccagaagatataccagggatgccaccgcgcagccgcctgccgcgccccgcaccccgcgagattttgtcatgattttttatcctccatataaaggcttccccctccggggaaggctttattatcatcataccacaatccggccaataaaaaaagccccaccggtgtgcgggccggcagggcaaggttggagggagaggagtctattcattacctgcgttgtgcgccgcaggcattgactttctgttactataatagtacagtataggcatgaagtaaagctacactttttcatacatcacatgaatttttttcaccacaggagatgcagctcatgacactgacagactgccagctgttaagcattgtagcacagctgggtacctttgccgccgcggcggagcggctgcacatcacgccgtccgccgtcagccacgcggtatcgggcgtggaggccgagtgcggctttccactgttcacccgcaccaaaagcggcgtcacgctgaccgccgccgccgaaaagctcatgcccgccattcagcagatgctcgccagcagcgagtcgcttgaccagtcgattgcccagatcaacgggatgcacaagggtgcactgcggctgggggtgttcaactcggcctgcgtgacctggctgcccaagatcgtgccgggcttccgcgcagcgtttccgggcatcgacgtgcagatttaccaggggtcgtatgacgacatcacgggctggctgaaaaccggcgcggtggagctggggttcctctccaactccagcgcccacgatctggattttgagccgctctatgatgaccggctcatctgcatcgcgccgcccgactaccagccgcgccgccccggcgtggtgcgggccgaggagctgcgcagccagccgttcgtcagccagcagtccgacgtggatgccgacatccagagctactttaaaaagaacgacctgcatgtgtcgagccggtgctacatcgtggatgaccagagcatgatcgcaatggtcgcctgcgggcagggactggcgctgatgcccgagctgatgttcaaggagggcgcagccagcgcggggtgccaggttttgcagctggagcctgccgccaagcgcacgattggtctggcgtgcctgtcgcggacagcgctttcccccgccgcccgggaatttgtggagcacgcccgggcgtttgcaaggaagcggtgacccacgcggtaacggcctgaacccttccggcctgcttcgcggccacctcccctgatggggaggcttttctcgcgggctttgcccgcgcaaaaggctcctcgccatgcggggagctggccgagcttgcgaggcctgaggggctttgccgggctttgcgtcaacgcctgttaccgagccgccgcgtcaacttccacggcggccagagggctggccgccctacatgtgtcccggaaatatttcattgcgcagtgcagcaaaacacccccgtgccgttaaatcggcacaggggtgtttttacttagtttccctcatcgtactccgctacgggcacattcgcgtactcgtcggggaggtcggggggcagggtctgcatgtactcgtgcatagcctcggccacgttcttgctgtaggcgacggcctcgacgacggtgcgcgcacccttgacggcatcgccgctggcaaagatgccggggatgctcgtgcggcccacctcgtcggtctcaaacaggccgcgcggggtggttttcagattcttcgtgctgtcggtgatcgtcgtgcaggggccctggctgatggacacaatgacactgtccgccgggtagagcttttcggtgccgggaatctcggtcagcgtgccgtcctcggcctcgttcaggtcgataaagacgacgcccttgtcggtgatctccaacggctttttgttaaagatgaagttcacgccctccagcttggcatagcttgcctcgtactcgctggccgtaatgtggctggacagcgagaagcactcgagatgccgcgtgccgtggcggatggcggtgcgcgccacgtccatggccgcgttgcccgcgccgatgacgatgacccgattgcccaggtggtagacatcggggttctgcagatagttgatggcgtagtgcacgttgccgaggctctcgcccttgatgtgcagcgtgttgggccgccagacgccggtgccgatgaagatggctttgtagccgtcgcggaacagatcctcaattttcagcgccttgcccacgtcggtgttggggcggaccttgatgccctttaagcgcagatggcggtactcgaaatcgtccagcacggtcttgggcaggcggaactccgggatgccgtagcgcagcacgccgccgatcttatcgtggctctcaaagatcgtgacgtcgtagccgtagcgtgccaggatgaccgcaatggtcaggcccgccgggccggagccgatgatggcggcctttttgccgttggacggcgcgggaccctgggtcatttggctggcgtaggtggacgagatgtagttctcgatgaccgagaagtgcaccggcgcacctttgatgccgcgcacgcaatggccctcgcactgattttcgtggttgcagaccagcgagcagaccgtcgtcagggggttgttctcaaacagcatacggcccgcttcgtcgagcttattggccttcaaaaggcggatgacctcgggaatattggtgtggatcgggcagccctgctggcagcggggcaccttacagccaaggcagtggtttgcttcgtccattacgtgcagcgccat

SEQ ID NO: 922 - DNA, 11121 bp, unidentified
  source 1..11121: mol_type = unassigned DNA
ggaagagctgtaagggctgcttgtgtggatcggagtttcctctgtgaagaacaggtcaggtctgtctaatggaagatctccgtaaacttcatcagtagatacctgatgataacgtttgataccgtatttgcggcatgcatccatgagaacagcagtaccgataatatttgtggtaaggaaaacttccgggttttcgatggagcggtcaacgtgactctctgcagcgaagtttacaaccatatcagggtgttcttcctcaaaaagtttgtaaactgcttcgcggtcggtgatgctttcttttacgaaacggaaatttgggttgtccatgacaggtgcaagagtggaaaggtttcctgcataggtcagacagtccagacagatgatgcggtaatccgggtatttttttaacatgtgaaaaataaagttgcttccgataaatccggcaccgccggttacgataatgttcatagtgattctccttaaaaaatatataatatgaatatctgtaagattctgttatagagtcaggcagataaaattatccgccttgctgcatggcgggtgatatatcaaataactgtttgaaaatttgatatatcactcacttgactgcgaattcgcttgtacaggtctaaaagcttcggttagtgcaatacatccagatatttaccgtccagaacgtcttttaagtactgaccatactgatttttcttcagtatttcataaaccttcagcacatcttcctttgtaatccagccattgagatatgcgatctcttccaggcaaccgattttgcggtgctggtggctttccattgtttttacaaagttggtggcttccacaaggctctcgtgtgtacctgtatccagccatgtgaatccctgtccgagaagttctacgtttaattcgcccttttccagatagatgcggttcagatctgtgatctcaagttcgcctctggcacttggtttcagattttttgcatactctacgacgcgattgtcatagaagtataaacctgtgacacagtagttgctcttcgggtgctccggtttctcttcaattgagatagccttgccttcatggtcaaattctacaataccgaatctctccggatcatctacatagtatccgaaaacagtggcaccctcgccggattctgcgttctttacagcagctttcagtcttttcttcagtccatgtcctgcgaagatattatcgccgagaaccatggcaacagtatcatcaccgataaattcttctccgatgataaatgcctgagcaagtccgtccggacttggctgtactgcataggtgagatggacaccgaactgatgtccgtcaccaagaagttcctcaaaacgaggagtatcctgcggagtagagatgatcaggatatcgcggattcctgcgttcatcagtacagacatgggatagtagatcatgggtttatcatagattggcagaagctgtttggatgttaccattgtaagcggataaaggcgtgtgccggaaccgcctgctaaaataatacctttcatgtgtattctcctttgttatttggcagtatgcggtcggagcgatattctgtcagttatctttgtaaatgataagcaaaatatcaggcgactgcggtactaatcaacgggtttctggattatcagtctgagttacgatatcatcctgactctggtgattgtattataaaaggtgaccttaggtcaccttcaagtactttttacaaaaaagttaaattttggttatttttcacaaagaaaaatgccggcatccttggtaataaagaacccatcctttgtctttcgcgatacaaatcctcggaaatctttgtatttgtccagaagatactgattctgatttccatggcaggagaggatataggaaatcagcggttctgcatcggggacaagaagagagtccttatagctttcccagaaaatacgggaaaaatacggtgccaggatatctgctccgttttctctgccaaaacgctcatagagtctgtctgcggagaggacgatccggtcgtcaaaatcccggaccagtctgctgacttcctgcatgtgtttttttccataggtactgcagatcagttttccgcccggagtgagcacacgttgaatctcgctgcatacagcggggatatcttcacagtaaaaaagcacatggtttgcaatgaccagatcaaagcttctgtcttcatgaggaattcctgcacagtcaaatgcctcgaaggaaaaacggctgtctttgcgtccgatagcacgtctggcatcacgaagcattccggatgaaagatcagaaagagtaacggaaactttaccggggaggctggaaatattctgtgtccacagaacaccgtcgccgcatccaagttcaaggatacgcatccccggatgaatctggcactgctcataaacccatggaaaccatccctgtttattctgggaataaaggctgtgcagattaatgcgtgaggaaatgttggaggcgttctggtattgatttttcatgcttttctccatgcctgtcaggtggatcaggtcaagcatctgattccagtctatggcatgatgggagcggatcgcatctgtggtatcctggattgccttttccaccagctgcatctgctcgatacggtcacgtaccagctttaactggatgttcagggaattttccataaaatgatagtctgagtcgtcaatggtcatttcccgtatgtcatccagggagaaacccagatatttcagaagcaggatctgggaaagtcttgcaaaatcctcatctgtataaaaacgtgcgccggattctgttacataggagggtttgaggatattctgtttgtcataatagcggatagtgcggagtgttacatgtgccatccgtgcaaattctccggaagagtagtagccgtcttttttcattgtaaaaccttctttaagaaaaatagtcttgcccgcaaatgcggatagaaacagttgttcagcctgcatttgcgtattgctgatatgtgtagagtataacacagctgaccggcaggctacaagcatcaggtattaccggatggataatactatactggctgaatggtaagtcagatggtgatttttgacattttttggaggatgctaatccttgtcttttgacagaaattatggtatgttaaataataacaatcaaaactgattttcatacaaatcataatctggcagttctgccatattttttccaaaatacaataaatattaagagagaacagtaatgacaatatgaaaggtgcagggacaggaggagcctgatgattaatttattcgattttacttactgcggcgattataaccggcagattcagaatcttgcaaggatggtgccggagaaatggagcttttcggatacagatgataacggaattctgaaaggatacctggaacatacatttaaacgcctttatgaagaacagaaggtgtgggagaaaaagaattatgccatatttaatacaggactctttaattactattatcagccgatttatgcgtattttattcccaatctggtcccggacaggcagccctggtttctggatggcttttatacagaatactatttgttaaaagaaggaatcacctgtctgccggaaaaggcatgctatgtggaaaatccgtcagatcttgtgtttgatacaaaacttccggtaattccacagtacgagcatattttcggggatgaggaaaatgctgcccgtcttccaaaggaagtacgtgacagcagcatgaaaatgcagctgtttgacggcgcgctgaaacagacaaaaagaatgcttgaggcagattacagaacggcaattccacagtattataatcactcaatccaactgctgctcccaatctgtctccgccatccgggaaaacccgaccttgcactggcgtgtatgaaaacttcggacggaagcaaatatctggggcgtacctgcctgactctcagaatggcctatcataatgccagactccttgcaagggtggaccgaagctggctgatgacttctgtatctgcctgaggtttgacatgtgtggttcgctttgatatattatagcagcgaagcggatgattttatctgtctgactgaaatgatgtcaggtcagacatttacggattgttctgctgctatagatgaaacaacagaaaaaggtgggtgagaaatcaaatgcgaaataaaagtctggatgctgtaaaggccattgctgcgtgcctggtggtatgcatccatgtaagctttccgggacaggccgggcagcttgtaaaagtactggcaagatgtgcggtgccgtttttctttatggtatccgggtatttctgttattatcaaaattgcaatgcctcaaaaagaatattgtctaaaatcctgcatatcatgaagctttttgcagtttcagttgtgttttattttatctgggaatgttttatgaaagcctggaatggggagagagtatggacatggataaaagggcttgtgagtacagagtatctgaaggaatttttcgtgtacaacagtacttctccggtaagagcacatttatggtttcttcctgcattaatttactgttatctgcttgctctcctgattgaaaaatggagaatgcgtaaggctgcatattgtatggcacctgtattgctggcaatacttttatggagagcggagttttgtgtcttttttgacagattttatcacactatggaatacagaaactttctgtttacaggaatgagctttttccttacaggtcagatgatccatgaatatcaggataagatagtatgcaaacgtctggagcaatggatgcaatggggattgaaagcagggatgagtttcggtgtggcactcagcatgatggaatatgctttccgaggagcaggagaaatttacacaggaaattgtgttgcagtgatctgtctgtttctgtggcttattttatatggaagggaaataaattttccctctgtactggtggaaaccggaagaaaatatgctttcctgatctatcttcttcatccggcagtatcagatcttctgaaaaaatgttcagaaggtctgggagtcagcaactgtcagatttatttttggctgcgtccggttttggtatatatgctgacagtggtgacagtttctggcatatctgcggtctctgcgtatgcaaggcaaaatattttgcagaataatcatgtatagtcagggtatgaaaatccggaatgaattttggctgcgttactgagaatggaatgaacagtaacatagtaacgttatctccaggaaccgcgggaattataactgttcacataatggaaaatgtgatatagtaatcagtaaatcttatgaacgtaaccgttcggtgtttcacagaatggaggattgctgaacagttaccgaaaatcattatgcagaaaatacaaaggagagagaatggcagataaaaatcaggacaagaaccagagtaagaacagagcagaacaggcagaagagcacgatgaaagcgtgctgaatccggagattaagaatgaatcggatttgtcaaagaaggaaagacgtctgattgagaaagaaaaattaaagggaatggggccaaagaaaaagctggaatatatctggatgtattataaaccggctattttcggagtgatcgcagtgattgctcttatattcggaataaaggattactatgaacagtccaaaataaaaacagttctgtccatgacagtggtaaattcaatggcaaatgatacggaaactcctgagcagaaaatcaaagaaacacttgggtacaaagatgatccctatagtaaagtagagataggcgtgaatcttactacggactctgaaatggcagaatttgattataatgcacagatggcttatgtggcacagatccaggcaggttccattgatattatggttatgccggagaagctttatcagactttgaagaagaatgagccatttgcagatttgaaggaattgatgggtgaggaagcttttgagaagtttggaatgcagacagatactacgcacatttccattactgacagtgagcttgaacaggaattaggtgtaatctacgatcctgtatgcattgcagtgccatattcagcaccgaatcaggaaaacgcagtaaaatggataaaaagtcttgacagcaggaaataaattgtgatatgtttatcacaccaaaactggtgtggatttttcagtcttgtgacaaacatgaactcttttcgccgcacgattatcatacagcaatgtagagataattgtgtggcgttttttgttgcaatgaaacagagaaaggaaaaaagaatgaacaatacttttatgaagaaaaaaccgattctgccgcttctggcatctatggcaatgcctatggtactgtctatgctggtgaattcactgtacaacatcgtagacagcttttttgtggcaaagatcagtgagcaggcgatgacagctctgtctctggtatttcctgtacagaactttattaatgcagttgccattggtttcggtgtgggaatcaatgcacagatttcttttcaactgggagcaaaaaatattaaaaatgcgaatatagcagctacccatggtatgctctttaatattatccatggaattatttttacagtaatctgtattccatttatgcctgtatttctcggtatgtttacaaaagagcaggaagtgatctcgcctggtgtgcagtattcaactattgcatttgcattttccacagtgatcatgatcagcttgtccttcgaaaagatttttcaggctgtgggcagaatgaaactgacaatgatcagcctgatgatcggttgtatttccaatattatcctggatccgctgctgattttcggagtggggatttttccggaaatggggatcagaggtgcagcactggcaactggtcttggccaggtatttacagttattgtatatctgatcgcatataagaagtgtagtattccggtggagatcagcaggaaatatctggaacttaacaggaacctggacgggaagctgtatatggtagggattcccgcaatcctgaatattgccctgccgtcagttctgatctctttcctgaatcagatattatcggctttttccggaagctatgtagtggttctgggaatctattataagcttcagacttttttatatctgcctgcaagcggcattgtccagggaatgcgcccgttgataggatataattacggagcaggggaaatacagagggtaaagaaactttttgggatttctgtgcttctgaatggtatgatcatgctggcaggaacgatcatctgctttacagcatcagagacattgatgggaatgtttactgagaacccggaaactgtaagacttggcactgcagcattacagattatcagtatcgggtttatcccatctgccatctctgttacagcttccggtgcattagaaggactgagcaaaggtgctcagtccctggtgatttcgttattaagatatattatagtgatcattccggcagcttatctgctgtgccattttgccggggcagatgctgtgtggaatgcgttctggatctgtgaatttataactgcagtggtagtaggtatcgggataaagtattactggaaccgtctgctgcagtagacgatagtgataaagctgctaagtcaggctgcgcctgcttcagcagactcagcatcagactctgcttctgaggcattttcatcagtaacatcttcggcatcggaattgcttccgccactgagaacataagtgatgacttcgtccggaacgcctgcattggacaggttgtccataagtgtagtggggtcgagtgtagctgcgtaggcactcatatcatcttcattggttacgtcataaacatctccaagagccgtaaggtccggaatttcaacagattcgcctgcaccggaagtaacagtgaagcttccgagagtgcttcctgcactttcaacggacagtgcaacagaaccagaatcttttgctgaatttaaatctaatacaagtgcaaagttctcgagcatggaaagagaagaatctgtatcttctgaagaatcagcagggaaggtgatagtatagttaccgtttaagtaaccttcttttgcagattcggtgtcgtagtctttaacttcgataacagctgcggctgtatcatcctgagaaattttataggttccgtttaatttaccgccatcaatctgaccggatccggacagggagagtgtgccggaatcatctgtttcaatggagagaagatagccaaagtctgagccgtccctggtcatctgccagttcagaacaggagttattttatcaccttcctgaaactcaattttacgtcctgcaattctgccggtctcatcaacccagattctggtgttgagatgagaatcatcggaatcaccggtatctgcatctttcagaaaatcaagaccgtcttctacagctttggtaaagctttcatgcaggtcctcgttacttgagagtttctctgtccaggtatcgaggatgttctcaatatcactgtctgattttgcttcttccaggattgcagttgcagtttttacagcgtcttcggctgaaatctggccttcatatactgtacagtcctgactgatatcacctgctgtcagagtttcctgactgctttcgccttctgttatattgtcaaaaagcatagatccgtatttatccagaagtgtttctactacagaagcttctggagctgctgctgacagatcagacatcatggaaacagtcaggctgagactgtcagaataagcggaagcgaaattgtctgtcggaatatctgcatctgaatcatcaggggttaattcttcaagatcattttcaatattggcagcctgttggtctgcggcttcttccagattggtcttgaaatatttatcagagagttcagggatgcgcatataaatatcctggctgtccggatcaagataatattccagagtacagattttattatcattaagaaggaccttcatcagaataccttcttttccttctgtaaaagagatatcattggaaagtgtgacattgtccagccaggagacatcaaatggtgcgacaaaccccagcagtgagcgtccggaatcttcaaatttcagaatcatgtcactctgcattcctgacatcagagactggctttcttctatagatgtagcgtaagaagatgccatttctgtgaccttttttgcccatgcatctttttcaatggaagcgtaactgtctgctgcaaatgctgtagatggaattgcagcagtaccaagaagtgctgcagtacagatagcggttgtttttcttaaccattttttccttgttttcataaagggcctccttccgttctgttatgaatcttatgtagtggaattacatttcaggacattcattttcagatatgtcgtttgactgaaataataatctatagcagtccttgtaaatgatttttcaaatacgctctatattaagatgcattattttagaggattgctatatatcaattttaccagataaagatagaaaaagctatgttttttcgacaatatagaaaaagatgttgattttagactaaattatttctatagaaaaataacaaaatatagacaaaaactatatgtgtatataaataattgatataagaaaatttattgacagatttatgtgaaaaatatatactactattcatatcgaaacactatggaactgctaaaaacagggaaacgatatatcacagaaaacataccgttagtccggagattattatattttacaaggggaatatgctcatggaatttcagactaaattattacacggaaaagcagtagacaattatgcgaatggttcaacagtgccgcctatcagcctggcaaatgcttttgcatatgaatcttcagaacagttggaaaaagtattccagaatcgggcaccgggatttgcatataccaggattgcgaatccgacagtagatgcgtttgagcgaagagtaaatgaattagaaggcgggattggaggtgtagcctgttcctccggaatgtcagcggttacattatcattacttaatatcctgcaggcaggggatgaggtaatcgcaggaagtgcattgttcggaggtacactggatctgcttcatgatctggaggcattcggaatcaaagtacattttataccgagggtagagaaggcgctgatcgagccgtttcttacagataagaccagagcagtgtttggcgaaatagtaggaaatcccgcactgaatgtaatggatgtccgggaaacagcagattttcttcatggaaaaggagtaccgctgatcgtagacagcacaacttcgactccttatctgcttaatccgattcagtatggtgcggatgtagtggtgcattctacttctaaatatataaatggaagcggtgatgccatcagcggaattatcattgacagcggaaacttttcctggagtccggaacgttatccgggaatgaaggaatataagaaatacggaaagtttgcttatcttgtgaaactgaggaacggaatctggcgaaatatgggtggctgtttggctccgatgaacgcttatctgaatattatcgggatggagacactggggcttcgtatggagcgggtctgtaacagtgcgttccggcttgcacaggcactggagaagctggaaggtgtatctgtcaactatccactgctggagtccagtccatatcatgaactggcagaaaaacagcttagtggaaagggcggagcaattctgactatccgtgcaggttccaaagaacgggcgtataaactgattaatcatctgaaatatgtaaagattgcaaccaatatcggtgatgtgagaactctggtgatccatccggcgtctacgatttatatccacagtacgccggaagcaatggcagaggcaggagtgtacgacgatacaatccgcatcagtgtgggtatcgaagatataaaagatctgatacaggatttcacagaggcagtggagagccttggagaagaataa

SEQ ID NO: 923 - DNA, 8711 bp, unidentified
  source 1..8711: mol_type = unassigned DNA
ctattcctcagcctgtgattcaaaaaaagcccgcttttctcgaagtcggtatgacggtccctttattgaaacaatctgcgagtgatggaatagcctgtctaaaactgcatttgccaaagtaggcgaaccaaatatttctccccatttagagaaaggggtgttggtagttattattgtactgtttctttcgtaacgcttggctataagttgaaagaacagatttgctgaatcctgatcaattggcatatatcctatttcgtcaatgattaacagtttatatttggcaaagaactttaaacgtgactctagtctgttttccatcagtgcttttttgagctgtgttattaatgactcaaaagacacaaaataagttgaaactcgtgaccttgcgcaggtaatgcctatggctgtggcaagatgtgttttaccaactccactggagcctacaaacaggatgttttcttttttatccagaaatcccatcctgttaagttcaagcagttcttttttgttaattcctggttgaaagtcaaactcaaaatcatccattgttttaaggaaaggaaaagctgcagttttcacacaggcattttcagccctgatttggttgttgttttgttcaatttcaatcagttcttccagggctacactaaatgatttttcgcctttattgactaactcaatgtatgtatctaaatattccggcatcttatgtatgcctaagtcagtctgcccatttataatctttgcataggttgccattttatctcctttcacaggaagtcatccatttgtgccagattagcttctgccatttgcgcaacaatgtcattgtccttaatgtaatgcgacagcaactgtgaatagtgctctttattataattaagtttttttgtacttaattcatgtttggcaacaagttcagttttataataaatttccaaaatatcagatttcactcgcaaatttacaggttttcctatatactcaaaaggaacggaatatctgttgttcatgtacgatattatggaatccttacgaactgtggtttggcgattgtggctcatatgagactctatgatttttaaattcggaagtggctgcaggtattctttttctttctgaaataagagaagtggcggtacaccggtttcctgacaaatgtaagtattgactttgccatttacctttttaagaatatccattaaatcttcctcagtttcaaactctccctcataggatttcatccatgagatgaacttgtttataacctcaactttgccttttgtaaaagcatgtcttggtttgcagagttttattttgaaaccaaaatcatttgcaaatgccttcattttttcatttacatgtcggcaattgtcctttaaatccacaacagatgccatgttgtcaaaaaggagttcccttggtactccgcctgttgccttaaatgaagctatcagacagtcaaagacatcctgtcttgttttgtaaagtttgtaagtaaagtggcagtatctagaatgccccaatttataatcaaacacctgaaaggtgaagatttcgccatgtttattggctattgatacatcttcctttcaatcaacctgagcctgaattccgggagcagtttcatatcttggatgccctttggtagtttttattggctttaggtttctggttttgatgtatttattaaagttggaataagttccaatttcagaatcaacttctgaaataatatattcataaacagctctgacattatctccttttatggctagtttttgaactattatgtctttatgcttgtcaagcctgcttggcatattatggtgtgtaggtttgcctttgtatccgtcataatactttttaacagttctgctatccatgtcatatagcctggcaatctcggaaaaatttggttttatattgctcaatcgtaagattttaagctgagtaattaatgcttgattcatggttgttacctcccatgaatacattagcataagcaatggaaatgtacatttttattttccacaaaatgtacatttaaatagtatcatttacataccattcagttacaaactccacatcagttttaatatatgattttaatatataaaaatttgaatagtatcaaatttagaatctacctcatatcccacacaactatgttcatatggggcagatataggaaaatttcaatagcatcaaacttaaaatctacctcatatcccacgtaactatgttcatatggggtggatatgtaaaaatttgaatagtaacaagcttagaatctacctcatatcccacgtaactatgttcatatggggcaaatatgtaaaaatttgaataataacaagcttagaatctaccacatatcccacaaaactatattcatatggggcagatattgaaaaattcaatagtaacaaccttagaatcccccactaaacacaaaaatccccgcgtcttccgacgcggggattaatatatcaactatatattatatttgattatttattagcttctgctgctttgatagctgctgtaagctgtggaacgatcttgtttaagtctccaacgataccataatcagctacgtcaaagattggagcatcttcatctttgttgattgcgatgataagatctgattcttccataccagctacatgctggattgctcctgaaataccaattgcaaagtaaacctgtggacgaacagttttacctgtctgtccaacctgtctgtctactggtaaccaaccgttatctgtaacagctcttgaacatgaaacttctccaccgagagcttctgcaagatcttcaagaagcttgaagttttcagctgaaccaacaccacgtccacctgatactaaaatcttagcgtccataatatctactgtttcagcaactgacttaattacttcctgaatttcaacatatttgctgttcttttctaatttagcgtcaaagttaataacttctgcctttgcgcctggctttggttctgccttctgcataacaccggcacgaactgtagccatctgtggtctatgatctggacatgcgatagtagcaattgtgttaccaccgaatgcaggacgagtcataagaagctgattgtgtttctgttctctacctggaattgggttgattgggaaatcaccaatttcaagaactgtacagtcagctgtaagacctgttgctactctagctgaaactgtaggacctaaatctctaccgattgctgtagcaccaactaacataatttcaggcttgaattcattaataactgctgttaaagcctgagcatatggttcagttctatatgtttcaagttcaggattatcaacaacgataaccttatcagcgccatattcagctaactgatcaactaaatttccaacgtttgatccaagaagtactgctgttacttctgtatttaatggttttgcaagtcttcctgcttctccaagtaactcgaatgcgataccgcttaattcgttatctacctgctgagcgaagacatatacgcctttataatcttctaaattaatgttctgcataattataatctcctctctactaaataacgtgctttgttaataatttgtccatgatgtaatcaactgcttcatcaggtgaatcaggagtaaccttttctccagcacccttacgaactttgtcagaagccttagcaatctttgtaggtgaaccctttaatccaaggtctccatcttctacgtcaacaagatttgctcttccccaagttgtgatttcagcatcacatgcatcaaaaattccacctggagtcatgtaacgtggctcgtttaattctgaaagagctgtaattaatacaggcatttttgctttaagcatatgatgtctatcttcatactgtctcttaacaattacgctatctccgtcaacttcaataccttcagcatatgaaattacagggattccaagatgttcagcgatctgtggtccaacctgagctgtatcaccatcgatagcctgacgtcctgtaataatgatgtcgtaatctttaatatttctaattgcaccagcgattgtagtagatgtagcccaagtatcagcaccacctaaaactctatctgttactaagattccattgtcagcacccatagctatagcttcacgaagaacatcttcagcctttggaagacccattgtaagaactgtaacttcagcgccgtactgatcttttaatctaagtgcagcttcaagacctgctttatcatcagggttcataattgtaagcattgcacctctatctaatgtaccatctgggttaaatttaactccaccctttgtatcaggtacctgttttacacaaacgataattttcacgattagtacctcctattattttaataagtttgcagagattaccatacgctgaacttctgaagtaccttcgtagatttctgtgatcttagcatctctcatcattctttcaacgtcatattctctgatataaccataaccaccatgtaactgaacagccttagttgtaacttccattgcaacttctgctgcgcataatttagcctgtgcagcttcaaaagagtatgtcttctgtgtagccttagccattgctgctttgtaaacaagcatcttagcagcttctaccttagtagccatatctgctaactggaactgtgtattctggaactgtccgattgatcttccgaactgttttctttcctttacatattcgatagttgtttctaaagcgccttctgcaagaccaagagcctgtgcagcgataccaatacgtccaccatcaagtgtatgcattgcaatgttgaaacctttacccttcttaccaagtaagttttcagctgggatacggcaatcttcaaaaattaattcatatgttgctgaaccacggatacccattttcttttcttttgttccgaatgtgaatcctggagttcctttttcaacgataaatgctgaaatttctttcatcattctaccacgtttttcaactttacctgttacagcgattacgatataaacatctgcgtacttaccatttgtaataaagcacttagaaccatttaatacccattcatttgtagcttcatcaaaaacagcctttgtctgctgtccctgagcatctgtacctgcacctggttctgtaagaccgaaagcacctaacttttcaccctttgcaagtggaactacatatttctttttctgttcttctgtaccgaatgtcataataggatcgatacaaagtgatgtatgagctgatacgataacacctgttgtaccacatacttttgataattcttcaacacacatagcatatgttaaaggatcacatccctgtccgccatattccttaggaactggaataccaaggaaaccatattttgccatcttttcaactgtctcaacagggaactgttcattttcatctgtttcctgtgcaagaggtttaacttcattttcagcgaattctttgaaaagagttcttgccatttcatgttttttgcttaaagtaaaatccatttatctttcctccatatttattgtttgccctaattactgagcatcaactggtgtttttgtacgatctgcgttataaacgtagaatcccttacctgatttaacaccaaggtttccacctctaaccatcttacggattaatggacatgcacgatatttgctgtcacctgtttcattgtaaagaacatccataattgcaaggcagatatctaaaccaacaaaatctcctaattcaagaggtcccattgggtgatttgcaccaagtttcattgctgcatcaataccagcgatgtctgaaacaccttccatcttaatgaaagcagcttcgttaatcattgggattaagattctgttaactacaaatccggcagcttcatttacctgtacaggtgtcttgccgatttcttttgaaatcttgatgatttcttctactgtttcgtcaggtgtgttaacgcctgcgataacttctactaatttcattctatctgcaggattgaagaaatgcataccaatcataggacgtgtaagaccatttccaatctctgtaattgaaagagatgatgtgtttgaagcaaagatacattcaggcttacaaatcttatctaattcgccaaatgttgttttcttaacttccatattttcaaaagcagcttctacgattaaatcgcagtcagcacataagtcttctttaatacctggtgtgatgcttgcaagaataccatcaacctgctcctgtgtcatttttcctttctgtacaagtcttgcataacctttagcaatcttgtcttttccaccttcagcccattcctgcttgatgtcacataatgctactgtgtatccatcaacctgagcgaaagccttagcgattccctggcccattgttccggcaccaattactcctaccttcatcttttttcctccaaaaatacttttgcgaacttgtcgcttatttattctgtaatggattaaaccattaccttaaatatgtgtgaagaaattcttcccacggttaaaaccggaaaatccggtatttaaaacaatattagctgtgccaaagcacaattacaaactattagcagttcttaaatggaacaactttaagtttcttttctttatccttttcaaggaagttacccattccggctttctgatcttctgtttcgaagcagcttccgaataatttttcttcgataacgatagcatcatccataactgcatcaagtccatcattaattgccttcttgcaagctctaacagcgataggtgcattctttgcaatacctgctgctaacttctttgcagcatccataagttcttcctgtggatatactgcatttacaagaccgattctgtaagcttcgtcagccttaatatttcttgctgtataaatcatctgcttagccattccaggtccaacgattcttgcaagtctctgtgttccaccgaaacctggtgtaattccaagacctacttcaggctgtccaaaaatagcgttttctgaacaaattctaatatcacaactcattgagatttcgcatccgccacctaaagcgaatccgttaactgctgcgattactggaatttctaatgtttcaagctttctgaaaacatcattacctttcttaccaaaagcttcaccttctgattttgtaagtgttgacatttctccaatatcagcgcctgcaacaaaagatttgtctccggcacctgttaaaataagtgctctagtttcattaacatcaattgcatcaattgcttcgtttaattcatcaagaacctggctgtttaatgcgttaagagcctttggacgattgattgtaagaattccaacgaatccttcctgttcatatgtaatgaattccattgttttttctccttaataaaaataactttttaagtattgaaacttaattataaaaagtgtttattaacaccataaaagctggcagtttcactaccagccctggttatatttaaaattagtcacgttcaacgattgtagtacatcccattccgccaccgatacataaagtagcaagacccttcttagcgtctctcttctgcatttcgtgaagtaatgttacaagaatacgacaacctgatgcacctactggatgaccaagagcaatagcaccaccgtttacgtttactttgctcatatcgaattttaagtctctagctactgctactgactgagctgcgaaagcttcgttagcttcgattaagtccatatcatcaattgtcatgttaacttttgctaatgctttcttagttgaagctacaggaccaacacccataattgatggatctacaccaccgagtgctcctgttacgaatgtagccattggcttaacacctaattctttagctttttcttcgctcataactacaactgctgctgcaccatcattgatacctgatgcattacctgctgtaacaacaccatcaggcttacctgaacaacatcttaacttgctaagtgattcagctgttgttccggctcttgggccttcatctgtatctacgataactgtctgttttctctgttttacttctacaggaacgatttcatctttgaacttaccttcagccatagccttttcacatttctgctgtgagttagctgagaaagcatctaattcttctcttgtaagtccccactgttcagctacgttttcagctgtaatcatcatgtggtagtgattgaatgcatctgttaatgcatcgttaaccattgtatcaacaagtgtaccattgttcattctgtaaccaaatctagcctgtggtaaagcatatggagccattgacatgttttccataccacctgcaacaacgatatcagcatctcctgcctgaatcatctgtgcagccatgtttacacagttaagacctgaaccacatacaacgttaactgtaactgctggtgtttcaattggaagtcctgccttaagtgctgcctgacgtgctacgttctgtccaagtcctgcctggataacacatcccatatatacgtgatcaacctgatcagctggaacgcctgctctgttaagagcttccttaataacaatagatcctaaaactggtgctggagttgtgcttaatgctccacccatttttccaatagctgtacggcatgcgcctgcgataactactttctttgacat

SEQ ID NO: 924 - DNA, 7469 bp, unidentified
  source 1..7469: mol_type = unassigned DNA
  misc_difference 7037: note = a, c, g, or t
  misc_difference 7038: note = a, c, g, or t
  misc_difference 7039: note = a, c, g, or t
  misc_difference 7040: note = a, c, g, or t
  misc_difference 7041: note = a, c, g, or t
  misc_difference 7042: note = a, c, g, or t
  misc_difference 7043: note = a, c, g, or t
  misc_difference 7044: note = a, c, g, or t
  misc_difference 7045: note = a, c, g, or t
  misc_difference 7046: note = a, c, g, or t
ctaaaacggaagcttgaacctgccgcgttttgcacccttgcctcccatcataccagggaactgtttcatcatcttgcgtgtctgttcgaactgtttgaccagtttgttgacttcgctgatgtccacacctgcaccttttgcgatacgtttctttctggacggatttaacagatccggattggaacgctctttcggtgtcatggagaggatgatcgcctcgatgcgtgccatcttggactcatccaccgcagcctcgatatctgctgctttattgccaatacccggcatcatacttaagatactggatatgcctcccatatttttaacctgagccatgctctccagataatcatcgaaaccaaactgtgcttttttcagtttctgttccatttctctggctttgtcttcgtcgatattggcctgtgctttctcgatgagcgtcatcacatcgcccatgcctaaaatcctggatgccatacgctccggatagaactgttccagatcggataacttctcgcccataccaacatagaggatcggtttgccgcaggttgccttgatcgagagtgccgcaccgcctctggtgtctccatccagctttgtaaggatgacaccgtcaagctcaagtttctgattgaagctgtctgccacattgactgcatcctgtccggtcattgcatccaccactaggatcgtctgatcaacatgaacggcttctttgatgttctgtaactcctccatcatcgcttcatcgacatgaaggcgtcctgctgtatcgaggatcacaacattaaatccgtgactctttgcatgttctacagctgctttggcgatattgaccgggttctgtttgtctcccatggagaaaacttccaccccctgcttctcaccatttatctgaagctgcgtgatagctgccggacgatacacgtcacacgctaccagaagcggctttctgccttttgatttgaatttgcctgcaagtttcgcagttgttgttgtctttccggctccctgaagacctgccatcatgatcacagtaacttcacttgccggacgcagtgcaatctccgtcgtctcagatcccatcaggtttaccagctcgtcatttacgatcttgatcaccatctgtcccggattcagtccgttcatcacgtcctgaccgattgcacgctcctgaaccgcttttataaactgcttcacgactttaaagctgacatccgcttccagaagagcaagctttacttctttcagtgctgtcttgacatctgcctctgtcagtcttcctttgccgcgaaggtttttaaatatattctgcagtttatccgataaactttcaaatgccatcgtaacctccaccgtcagtcggttttataattctttcagcagctcatccgaaatcttccttacttcttccggatcatctgccgccatccttatggcttccaccttttctttcagacttacaaatctctcaaccagatgcagttttgtctcgtaatcatccaggatatgtccgcaccgtttgatcagatcgtgcacaccctgtctgctgattccctgattctctgcaacttcgctgcaggaaatatcgttgaatactacatcctcgtatattttctgttgatgctctgtaagcagttcaccataaaaatcatacaataatgtctgctctaaaatcttttccactgcaatcaccttggttatcatacacgaaagaagccaccgtgtcaagtgttttttcttgacatgatggctttttctttttttatttcagatcaagctttttccttctttttcttgtaaaatttcatgcctctgttgatcacgatcgcaatcccgatcagcataaattcagcaaccgtctgccacagtctggtcacaagagaaatgatcacagcatattctttcggcatgatcagtccaagtcccagcaaaatgataccttcccttactccaagaccggacggtgtaaacaccgccaggataccgatgatacaggagagtccgtcaatgccggccacatagagaaactgggaagccggaaccggatagatggagcataccagcatgtaaaaacctacaccgacgaccagccagttgcagatgaacagcagtaccactttgatcatctgcgggtaggtgatcgggatggaaaggtctttcttgataaaccgctccaggatcctcaggaaaaagttgatgatcttcggattgatgcagataaagaacaggatcaccagaccgatcgtcatccatttataatcgttgagcaggtcgttcgggaaaaagaacaacgagatcagaaacaaaaatgcagctccgagaagcgtacagatattctcaaggaaaaagcagaccgtcactttgcggatcggcactccgccttcttcatacagcggcacacgtgccagcagcataaaaacctttcccggaatatattttcccggaatcgaatacagatacgctgtgatcgccttgaaatattgaatagaacactggttcagtttcgtgatgtagtgccataaagaagccagcgtcacctgataaatgaaataaaacagcagtgccccggcaaataccggccagttgatctcaatatccagattcttgtaggaatcataatttttataaaaatagcgaattagaaaaacggcaaccagcagcagaaatccgatcctgacatatttcttccatttcttttctccgttttgctgtgcgttttccagtatttccgcttcttctttttttacctgtgtgttttcttccataaccgattcttctcctaccatgttatctatgatttcagaaaccatgtttttctgccgtctgtcatccggtataagcagtcagcgaaacgcctcgctcttccagtgcttctttcagttttgttcctttgacatagacaaaatcttcttttttgttgtcgtacgcttcaccgtcgatcagataatatgcaccgctttttaattccttttcattcggcagcttttttgcgatcacaaacacattgtctgtatcgttaaagctctgatactcttctccgatcaggtgataatccatcagacgtacctgataagacttgatcggtgctgccgtctcttcggcccatacataagaataatctttataaatatcaccaaacgacagaatcagactggatgcagaagaaatccttgcctctcttgtattattttctgaaatggtgatgttctttacattatagccaaacaacagtacagagacaaacaatatcagagtgcacgcctgacagcctttctttttctggcacaaaagcagaaccagtaaaagcaaaagcagtgccacaacgccaaacaggatcactcctccggaaacatgtttcccttcaaaggtcagttttccggcatgggttttcacaaatgtgcagagcatacccatatatttccgcacaaagctctggttgttcagatacggagccgtgatctttgaaaacagcacaagcgtaagcccgcatcctgccaccgaaagcattttcgcccgaatcccaaacagatcccttttccagatcagcacataaagtgccaccatacagagaataccgaaggcacagcagatatagcggtcatatacaatacggtccacacgaattttggaagtaccgtaaaagttctttttcacacttttcaggaaaaatacagttccaaggacaaaacttcctgcataagataaaaatccaaacaatgccagtgtaccttcctgcgatgtcaccttcttcgaacggcggatcatcagaaaaacaatgatcacacaggcgatcagtcccacgcagaccagtccaaacgttgaactgaaagaattatacagccagccgattgccatccgaatgtaggatttgatccccgttccctttgtcagcagtttcagcgttcctttcgggatgccggtcgcatgagctgcaccgtttccccagatagcatgcctgaaatacttcaccaggatcttgtcgatcacaagaaagactgccatactgccaaagaaactgatatacggaatccttctttccctttcctttgtaaaaaacgggatcagcagtacagtcatcgcagaggcaatcaccataacgattcccctgctgtggcaggcataggcgtacactgcacagaaactcagcaatatcgtatagatctgacgctctttttttgtttttgcatacatggcatttaaaataaaaagtgcacaaacccagttgagtacgatcagcatcatatctccacgcagatagattgcctggaacatcacactgctgatgatcgcagaacctgccgccagaagagccgcatctttttctttttcgagcttcagatagcgtctgccaatatagtaagccatcaccggtgtcgttgccataaacaaggcattgacaaaagacgccgctttgtaaacgatgatcggatctttaaaaatcagaaacggcagaagccacacaaaagccattccataacggtaataatatccaccattacttaaaatccctgttccccagtttctcccggtcaaaagggctgtgttagtcagagtaccaagttcatccacaacggtgttcgtactcagacataatgccggcactcccataagcaccagcattaccgcaaacagtgagatcatacaaatcctgtcctgtttcgtcattgtcattttatttttcctctttctctctgtcataatccagtttacgtgcatgatactgtacatcttccaaaatcttgcgatttgccgcaatgatgtctgccagcagtccgatcacaccggtctggaagcccatcagcatcaggatacttgcaagaatcagggactgcacatgtccgtttccggttccggtcgcatagtaaaccagaaaacgcacgccaagcagtgccccgcaaagaaagagcacactgccgatcccgaggaagaaccgcagcggtttgtacatcataaaggaacggacgatcgtcaccatggaacgcttcacataaccaaacatactggaaaacagtctggatttacgaagctccggattggtacggatcggcaccgactccattgccattctggtgcgtcctgcctggatgatcgtctccagggtgtaggtatattcattcgttacattcagacgcatcgctgcgtcacggctataagcacggaaaccgctcggtgcgtcaggtatatcggatttggatgccacacgcacggtccagcttccgaaatgctgaagctttttcttgagcggtgaaaaatgctcagtatcatcgatcgggcgttcaccgatcacaatatctgccttttcctccaggatcggacgcaccagtttttcgatgtcatctccgcagtactgatcatcggcatcagtattgacaatgatatccgcaccgtttcgcaggcaggcatccagccctgccatgaacccctttgccagtccgcggttcatccggaaattgactacatagttcacgccccagtttttcgcaaccttgacggtatcgtcacggcttccgtcgttgatgatcagatactcgatctcatcgatcccgtcgatatgttttggcagatgattcagtgcaatttccagcgtctgtgcctcgttataacatggcacctgtataattaatttcatcatttatctctcctcatttttccttagtccctgaaatacagatctcttgtatagactttatccatgacatccgcaatctcatcactgcagcggttggcaaggatcacatcgctcatttctttaaattccttaagatcacggatcacacgggagttaaagaacgtttcttctttcattgccggctcatatacaaccacttcgatccccttcgccttgatccgcttcataactccctggatcgaactctggcggaagttgtctgaattggttttcatcgtcaggcggtatacgcctacaatctttggatttttttcaataatgcgctctgcaataaaatcttttctggtacggtttgcttctacgatcgctgccactatgttatttgggacatcatgatagtttgcaagcagctgtttggtgtcctttggaagacaatatccgccatatccaaaagacggattattataatgcgtgccgatacgagggtccagtcctactccttcaatgatctgtttactgtcaagccctcttacctctgcataagtatccagttcattgaaaaatgcaacacgcatggcaaggtaggtgtttgcaaacaatttgactgcctcagcttccgtaagatcggtaaagagtgtcgggatctcctgcttgatcgccccttcctgaagaagtgcggcaaatgcatgtgccttgtcacgctgattctccggcgatccgacaataatacgggaaggatacagattatcatacagtgcatgtccttctcttaaaaattccggtgagaacagaatatggtctgtatggtatttttcacggattccttttgtatagccgaccggaaccgttgatttaatcaccatcacggtatccggattcaccttctgtaccagttcgatcaccgtttcgatcgaagatgtgtcgaaataatttttcttcggatcgtagttcgtcggggttgcaatgataacaaaatcagcatccttataagctttttctgcatctgtcgttgctgtcaggtgcagatcctctcttgccagaaattcttcgatttctctgtctacgatcggtgacttccctttattgatcagatcaatcttgctttgcaggatatcgactgcccacacatcattgtgctgggagagcagcagggcattggaaagccctacatatcccgttcccgctactgctattttcatattgctcccctccttttaaagattcgggcgaatcactttcggattatagccatgctctttgagggcattgacgatgcgctctttgtgatccgttccaaatgcttccagtgtgatcttcagctctacggctgcattgcggttcgtgcttacaaactgattgtgatccagtcggatgacatttccattctcttttgcaatgacannnnnnnnnnaaccagctctcctgctttgtccggaagcagaacagatacggtaaagatacggtctctctggatcaggcctaactgtacaacagaagacatcgtgatcacatccatgtttccgccgcttaagatcgataccacttttttgtctttcacatccagatatttcagggctgccacggtcagaagtccggagttttctacgatcatcttgtgattttcaaccatgtcaaggaaagcaacgatcagatcatcatcttcgatggtgatgatgtcatcaagatttttctgcagatacgggaacacatttttaccaggtgtcttaacagccgtgccgtctgcgatcgtattgacatttggcagtgtcacaacttctcctgcctgaagggaagctttcatgcaggcagcgccttccggctccacaccgataac

SEQ ID NO: 925 - DNA, 41237 bp, unidentified
  source 1..41237: mol_type = unassigned DNA
cggacgtccacgccctcagcggccttgcgggccagcacttcgaggatcctgccccacatgaggccctcgtcgatgatgaagtactcgaggaagatatacttctcggccttttccagttggcgaagcagctcttcgaacttggcctcgccgccggggaagtaggtgacttccgtgttcctgtagaccgagaagccgccgccctttccgtggagataccgcgccagcgaggccgcgccggggtcggcttcggccagctcctgggccgcagccagcggctggggctgtaagccccgggcctcctcagtgaggtgggtcacccgctttttcagggcgttgtggccgatgttgctcttgacgtagaaaaacagcggcacccccacgaccggcaggatggcgatggtgaccatccatgtgattttggcgctgttgtccatctcgctgttgaggatgtagaccaccatgaaggccgacatggccacactgccgccgaagtaatggggcagcagtccgccgaaccaccggaacacgctccacagcacaccgacctgcagcagcatgagcagcagcaccagcccgaagcggctgaagatcgcgtggacgatgcccttctgaccctttttcaggagccggaggccgccgtcctcgaactgctgcatcctgtctttcatgttctgctgaaattcttcttttttcatgcttctcctttcgggcggagggtgacggcgaacagcccttgggccgcgtggcagtcctccaccagctgtttcggctgcgggcagacgccgtggtcatgccacgggtcgttgaaccagtaattttcgtcatcgtagcccaccagcagcaggcagtgctcgttgcacttccatgcaaagtcggtgccatcggccagcagccagtggtcgcgcttttccggcacgggctggaaatccagcgtcgcccagaacaccaccggcatcccggcgtcgatataagagcaaagctctgccgccgtcttgccgctctcgtccacgacttcgaacttgtcggctgcgccctcgtgctccagagcgctgttcagggccttgacgatgcagggcgaatagcagccgtagccggtgtggtcgtgggggtcgccggggtagacctgccacgggtcagggccgtagagttttccgtcctgctcccagtaaggagcgtggggcaggtcgcgggcgatgaaggtatccgggtcgatgtcgatgcccacggcctggagcagcatgacgctgctgatgctctcgcagccgttgacccagcgctcagtctggtcgatgtacggggcaggaacgatttttttcatcaaaatgcctcccagcggagattcggccctgtcaaaacagagcgaagtgtgttattatgtaggataaggatattataccctactctggggattttttctacaacaatcggcacgcggaggtttttggaacatgaacaatctgatcatcggcatcgcaggcggctccggcagcggcaagaccacactggcctgtcggctcaaggcacttttcggggaggacgaggtgcgcctcatctcccacgacagctactacaagcgccacgacgagctgccctttgaagagcgctgcaagctgaactacgaccacccggacgccttcgacaacgccctgctcatctaccacttacaggagctgaaggctggccgcgccatcgactgcccggtgtacgactacgccgaccacaaccgcagcaacgaggtccagcacatcgaaccggcccccgtcctcatcgtggaaggcatcctccccttcgtggagccggagctgtgcgccatgttcgactacaagatcttcgtggacaccgacgctgacgagcgcatcctgcgccgtctggtgcgggacgtcaaggagcgcggccgctccctcgacagcgtcatcaaccagtacctcaccaccgtcaagcccatgcacgaggctttcgttgagcccagcaagcggaacgcggacatcatcgtccccaacggcggcgagaacaccaccgccatcgagatgctggcccaccatatccgcagcctcatcgagaagacaaatatgctctaaaagcttctgatacagcaaaaaccggagtccccgcggagactccggttttttgtttcagctgttaatccttgatggaagtgcgcaccagtgcgcgcttgaggcgggcctgtgccatctcgtactcgcggcggtcgaggtttttgcgggccaggatctcttcggcgcgcttttttgcggcctcggcgcgggtgtggtcgatctgctcagcccactcccatgtggtggctaccagacgcacctcaccgtccagcacggtgagcatcccgcccatgcaggcggcacggcggcggctgccctcggcatcaacgatgtgggcctcgcccatgcccagcgcggtgcagtagtcgccgtgcttggccagaatggcaaggtcaccgtcgatggcgcggcagaccacacgctcggcctgcccctcaaaggcgcagccgtccggtgtgaccaccgtcagatgaaaggtcgtcatggtttaccccttcttcgccttagcgaacacatcgtcgatggtgcctgcgaacaggaaggcgctctcgggcaggtcgtcgcactcgccgttcaggatcatgcggaagccgcgcagcgtctctttcagcgggacgtactggccgggcataccggtgaactgctctgcaacgtggaagctctggctcaggaagcgctgcaccttgcgggcgcggctgacggtgcgcttgtcctcctcgctcagctcgtccatgcccatgatggcgatgatgtcctgcagctccttgtagcgctgcagcaccttctggacggcacgggcgatctcataatgctcctgacccacgacctccgggctgaggatacggctggtggagtccagcgggtccacagcggggtagatgccctgagaggcgatgtcacggctcaggaccgtggtagcgtccagatgggtgaacgtcgttgcgggggccgggtcggtcaggtcgtcggcggggacgtagacagcctgcaccgaggtgatggagcccttgcgggtggaggtgatgcgctcctgcagagcgcccatctcggtagccagcgtaggctggtagccgacggcggagggcatacggcccagcagagccgacacctcagagcctgcctgggtgaagcggaagatgttgtcgatgaagagcagcacgtcctgattcttgacgtcgcggaaatactccgccatggtcaggccggacagtgccacgcgcatacgggctcctgggggctcgttcatctggccgtagaccagcgccgtcttgttgatgacgccgctctcggtcatttcgccgtaaaggtcgttgccctcacgggtgcgctcgccgacaccggtgaacaccgagtagccgttgtgctcggtggcgatgttgtagatcagctcctggatcaggacggtcttgccgacaccggcgccgccgaacaggccgatcttgccgcccttggcgtaggggcagatgaggtcaacgaccttgatgccggtctccaggatctcggtggtggactgctgctcctcatagctgggagcggggcggtggatgggccagtaagcctccggggtgggggcgggcttattgtccaccggctcacccagcaggttgaacacgcggcccaggcactggtcgccgacggggaccttgatggactcgccggtgtccacggcctcggtgccgcgcaccaggccgtcggtgctgctcatggcgatgcagcgggcgacgttgtcaccggtcagctgcgccacctcgaccaccagcttctggccgtggttgtcgatctcgatggcgttgagcaggtccggcagctctccatccttgaactggatgtccagcaccgggccgatgacttggatcaccttgccgatgtgtttttcggacataggctacaactccttctcttttaatggaatgctctttgtcagcgtccttgccctctcaggccgcttcgcgtccagctctcccagagggagagcctgaaacgtatcggtcagctttaagcctctccctttgggagaggtggcattgcgcaagcaatgccggagagggcaagccgccttaattttccgcaccagccacgatctcggtgatctcctgcgtgatggcggcctgacgggcgcggttgtaatacagattcagatgctctatcatctcgccggcgttcttggtggcggcatccatggcggtgcggcgggcggccagctcactggccacgctctcgcacacggcgccgtagaggacacccgccacatactcggggatgatagcgccgaacacttcctcgcagctgggtttgtacaggatctggctccggcgggcctcggccttctgggcctcggtgggctcgatggtcaggggcagcacctcgagggtggtggccgtctgggtcatcatggagtcaaagcgggtgtagcagagcttcaccgcgtcgtactcgcccttgaggaagccttccgttatctggtgggacagggtgaagcactcgctcaccgacacatccgccgccatcagcacctcgggggtaaagaggccggccccgtggtgggcgaaatactctgcggagcgcttgccgatgggcagcacggtgacggggccttcggcggcgtcggcctgcttgaacacattggcgttatagccgccggccaggccgcggtcgcccgcgatgaccaccagcagagtccgcctgatgtcgtcccggcgcagatagggattgcgggcgcgggggtctgccgccgctatcttggtcagcgattcgtacagcgtctcaaagtaggggcggctgtgctccacccgatccttggcacggcgcattttggaggaagccaccagctccatagccttggtgatctgcatggtactctctacgcttttgatgcgcagcttgatgtccttcatggaacctgccatgcgttacgcctccttcctgtcagtgtgccttgataaagttctcggtgtaagcggacagcacacccttcagagcttcctcggcgtccttttccagcttgccggtggtgcggatggtctccatcacggaagcaccggccgcgtcggtatcgagatactcgtacaggcccttctcgtactcggccacggcaggcaccttgatgttcacgaggtagtcgtggatggtcgcgtagaggatggccacctgcttttcgaccgcaacgggagcggagcggttctgcttgagcacctcgacgatgcgctcgccctgtgccagacgggccttggtgtcggcgtccaggtcggagccgaactgcgcgaaggactgcagctcacggtactgagaatagatcagcttcaacgtaccggcgaccttcttcatggccttgatctgggcgttgccgccgacacgggagaccgagatgccggggttgacggccggcatgacgcccgagtggaacagctccgtctcaaggaagatctggccgtcggtgatggagatgacgttcgtggggatgtaggcggacacatcgcccgcctgcgtctcgatgatgggcagtgccgtcaggctgccgccgcccagctcgtcggagagcttggccgcgcgttccagcagacgggagtgcaggtagaagacgtcgccggggtaagcctcacgtcccggaggacggcggatcagcagcgacagggcgcggtaagcgacagcgtgcttggacaggtcgtcgtagatgatgaggacgtgcttgcccttgtgcatgaaatactcgcccatggcacagccggagtagggagcgatatactgcaggggcgacagctcggatgccgttgccgacaccacgatggtgtagctcatggcaccggcctcggtgaggctctgcacgaggtttgccacggtagagcgcttctggccgatggcgacgtagatgcagatgacgtccttgcccttctggttgatgatggtatcggacgcgatggtggtcttgccggtctggcggtcgccgatgatcagctcacgctggccgcggccgatggggatcatggagtcgatggccttgatgccggtctgcagcggctccttgacgggctggcgctcgatgatgccgggagcagagctctcgatggggcggaactccgtcgtctcgatagggcctgcgccgtcgatgggctggcccagtgcgttgacgacacggccgatcagtgcctcgcccacagggacggacacgaccttgccggtgcgcttgacggtgctgccctctttgatgccgacgtcggagcccagcagaacgatggagacggtgttctcctcgaggttctgggccatgccgtactcgccgttttcaaactggagcagctcgcctgccatgcacttttccagaccgctggcgcgggcgatgccgtcgcccaccagaatgaccgtgccgacctcgctctgctcgatgacattttcgtaatgcttgatctgagcacggatgatcttggagatctcttcaggtttcagttgcattgttgtgtcttcaccactcaattctttgtaaactttcgggtggatagccctctcagtcaaagcctgatggctttgccagctctcccgtggggagagcccttggcaggccggtcttgccgcatctcatcgccttacggctctgagagctgccgggcttcgcgtttacccgagggcttcgtattcgttacagtgttgctgctgcgatgctgctgcgcaggccggcgaggcggctgcggacggtgccgtccagctcggtgccttcgatgtccagccggatgccgcccagcacagcaggctcgaccttcgttttgaggtcgatgtgtctgccggtgactttttccagcttttcgtgcaggcgcccggtctgctctgccgtgagaggcacagcggaaacagcggtagcctccagaatgccgtgagcctcattgtagcgcagacggtaagcccgggcgcagcccggcagctcccgcagagcgcctttttcgcacagcagcttcataaagttgagcacatagaggtggacctgcccgcggaaggcttcgtccaacagcgcacagcgctctttcttggggatgctggggatgctgagcagatgcagatactcggcgtccccgttcagcagggcggtcacgccatccagttcgcccagaatgcgctcgtccagcccttcctccgcggccaggtcgtacaggcttccgccgtacatccttgcagtctcggtcatgatgcttcacccacgtttttgataaattcgtcgatcaggtcctgatggtcggtctctttgatctcgcgctcgaccaccttggaggcgatctccatcgccataccgccgatctcgtccttgacctcgttgaccgccttcttgcgctcctgcgcaatgtcggcctcggccttctgcttgagggcagcggcctgtgcgcgggcctcgcccagcagctcttcgctgcgggcggcagccgtcttctgggcggcggccacgatctggttggcctcggtgcgggcattctgcagattctgctcgtactccgccttcatggcctcagcctcggtgcgcagcttttcggcgtccgcgatctggctgtccgccttggccttgcgctcggcgatgacttttttgaccgggttcagcagcagctttttgaagatcaccagctggatcatcaggttgcagacctgggccagaaacgtccagccatccagcgtgatcaatgcctgataaagttgcataagcgtctcccctttctcttgaaatcaagctctgaaaggagcgcttactgcaggtagttcatgaacatgccgggtgcgaggaagatgagcagcaggccggtgacgaagccgtagataccggtggtctcagacagtgcgacgccgaggatgagggtgctggtcacgtcgctcttgcactcgggctgacgaccgacagcctcacaggcagcagcggcagcgttgccttcgccgataccagggccgatacctgcgatcagtgcgcagcctgcgccgatgccgcagccagccagagcgataccacgagcaaggaattgaaagtcagtcatagtttgtgtcctcctgaagatgtttgtttttgggggatgccggggcgggaggcttactcctcaccggcagcacgtttgatgaagatggtggtcagggtacagaagatgaacgcctgaatgcagccgccgaaccagtcgaaatacaggcccgtgaaggccgggatgccgatctggaacagctggagctggctcaggaatccgggcagccagccaaaaatgacgtggctcaggctcgccagcgcccagtacagcagggtggagataacggtaccggacaggatgttgccgaagtgacggaaggccatgctgacaggggtggacacctccgacagcacgttgatgggcgccatcaggaagatggggtccagcaggcccttcagataggcgaggatgccgttggtctttatcttgtagtacatgatgatgatgaacaccacgatggcccaggccgcctcggtgttcaggtctgccgtggggctccacaggcccaccacactgatcaggttgcagccgatgctgagtgcgaagatagcacccaccagcgggatgaacttatcgaagtgccagcccatgttgtcgtggacgaactggtccagccgttccacgatgaactcggcggcggcctgccgtttggagacgttttccagtttaaggtcacgccccagccagaaggccagagccgagagcagcgccatgacgatccatgtgctcacaagcgtctgggtgatcttgaaatcgcccagcacagggatattggtatggatggtatacaggatctttgcgccgttcagttccatttgttacgtttcaccccctttttcatcgggtgcggactgctgcgcgtcggcaggtccggggtcgtcctccaccgagacgtccacaggctctgccttcagcgtgagcggtttgtacttgcccgttatttgcagataataaatggtgacacgggggaaaaacagcggcagcacactggcaaagggctggaagcagggggccgcgacggccaccaccacccacagcgcctgcagcagcatccggctgttgtaggaaagctgtaatgttgccttgcggcgcttctcatccggctcgtcgatgatcttttggaccacgaagcagatgcccgcaaagttgccgatggcgacggctgcgcccacgaggctgccgaggacgaccgtatagtcgaacttcacccagcccaccagatgcagcgccgcgaaaagcacccacatgatcgcggtgcagaatgccgtgccgcccgcgatgcggagcagctcctttttggattccggctgtaatttcatagatgcagctctcccttatctcataaatgcgagttaaagcctgtccggcggggcttgtcctttttggagcggtcgagccgctctttgacgaagacccagaagttctgcgccccggcggcaagccccagcagcacagcgggcagatacacccacatgggccagccccaatggctgacggcccaccagcagccgcccagacacatcaccagcggcagcagcatattcagccccagctgggtcagccagaccagatcttccagtgccttgtaccagcccttcacggtccggctcccctccctctgcgtgtgctccgggccgctctgtcttctttgcccggtccgcacgttaaactttgaacaaaggttctttactccccattatactcaaaacggctgtaaaattcaatcaattttccactgcttttttagcaaaattctataaacgcagagaagttcgtcgcttccaaccaaaagtttttcgcttcagccgctcatcttctccgtgtcatttatcattctgccccgtttgagaaagaaaaagcgtttcctgttgggacgattttgccgaaaggcacaaaaagccccggcgggcgctgtcctaaaacagtacccgccggggcggaaatcgtgctttggtctatcttttaccagaggtttgcggtctcattgtagaggccctcatagctcttggcagagacatcccagctgaagtcgcactccatgtcgtacttgataaggttgttccagtcttccttgctgtagtagcggtcctgtgcgcggcagcaggcgtcgtacagctcgtgggcgctgtagcccgcgaaggtgaagccgttgccctcgccgagggtgcagtcgtggatggagtcgcgcagaccgccggtctcgcggatgatgggaggcgtaccgtaacggcaggcgaccatctgggccagaccgcagggctcgctcttggacggcatgatgaaagcatctgcgccggcatagatctcctgcgacagggtgggctcgaagccgatgtaggtgcctacgcggcccggatgacggccgcacaggtcggagaagaagttctcgtactggctctcgccgctgcccaggatgaccagctcgatgccgcggtccacgaggccgtcggccacgctctgcacgagatcgaagcccttcatgccgaccatgcggctgaccattgcaaagacggggctgccgtccttgtcgaggccgaacttatcctgcagagcctccttgcactttgccttgccctcttcgaagttgttgacatcgtagttgaaggcgatgtgggggtcggtggcagggttgttggcctccgtgtcgataccgttcaggatgccgcagagcttgtactgcttctcgcgcagcagagcgtccagaccgtagctgaaccacgggtcgaggatctcctgtgcataggtggggctgacggtggtgatcttgtctgccgtctcgatggcacccttcatgaagttggcgcagccatcatactccacgatatgctggtcgcggcggccgatgccgcaggtgtcttccagaatatcggtgccatacttgccctgataggcgatgttgtggatggtgaagatggtcttgatgcggttgaacttgtccagatgacgatagtacaggttcaggtacaccggcaccagagcggtctgccagtcgttgcagttgatgatgtcgggggtaaagtcgatgtagaacagggtctccagcactgcgcgggagaagaaggcgaagcgctcgccgtcatcgtagaagccgtagaggccgcggcgcttgaagtaatactcgttgtcgaggaagtagtaggtcacaccatcgacctcagccttgaacaggccgcagtactggctgcgccagcccacggggaccgagtagttggtaacgtattccagcttatcgcggaacttcaggtcgccatacagcggcatgatgacgcgggcgtccacgccgtccttgaccagcgctttgggcagggagccggccacatcggccagaccgccggattttgcaaagggggttgcttccgaagcagcatacaggatcttcataagattcgctccttcctgataaaacggattcatatcttctcccgctgcggcaaaaagagcgggcgggggtacacacagtacccccgcccctctttaagaggggctaccggggagggagccgcccctatgggagattctcaaacggttcagacgatgtggctcttctgaacgtaaacagggaagctcttggtgccgctcagcttcttgtctgcggtgatgcggacgttcttgtccgtcacgacgcagtccagctcagcgccggcctccaccacggtatcctgcatcaggacgcagttcttgacgacggcacccttcttgaccttgacgccgcggaacagcacgcagttctccacggtgccttcgatgacgcagccgtcagccagcagagagttgctgacgctggagccggtgacgtaacgggtggggttgtcgtcgcggatcttggtgtaaacagggttcttcttggggaagagggcgttcagattcttctcatcaatgagcttcaggttctcgtcgaaatagctcttcatgtcgcagacatgagccacatagccggtgtactccagcgcatggatgttcaggatgttgacgttgtgagccaggatgtcgcgctcgaagtagatgaggccgcgggcggtagcgtccttgaccagcttgatgagggtctggcgctccatgacatagatgtccaaatcgaggttctgcttgccggggcggtaatcgttgaacagcagctccgtcacacggccatcggcatcgacggtcagggtgtagttgtcgttcttgcggccctcggggatctcgatcttctggtaagccacggtgacgtccgcaccgctggcctgatgagcagccagcagagcgttgaagtcgtagttgatggcgatgttggcatcgctcatgaccacatagcgctctttctgcacctcgaggaagctcaggatggagctcagagcctcgacgcggccggagtagatgcgcacgcccttttcagcaaagggagggacgatgttcaggccgccgtgacggcgggccatatcccactcgcggccggtacccagatggtccatcagggagtggtagttcttgcgcaccacgacagacacgttggagatgccgcagttggccatgccggacaggacaaagtccaccatgcggtaacggcctgcgaaggggatcgaggccattgcgcgctcggtcaccagctcaggcacggtgttatcatagctgttggggaaaatgatgcccaacgcattgttgttctggctcagcatacttcctcgccctccttgacggaatcaaatactttggcgccctctttgacggcagcgcctgcgccgatggtcagaccggtgccgacatgtgcgatggggccgtcgccgccgatcttggcgcctgcgcccaccacgacgttctcagcgaggatgcagcgcttgaccactgcgcctgccttgaccacgacgccatccatcaggacggcatcctcgaccgttgcgccctcttccacgacgacgcctgcgctcagcacagagtgcttgacgcagccgtagatctggcagccctccgtgaccagcgaatcctgcacgacagcgcgggggccgatcttctgggcgggcagcacggggttgcggctgtagatcttccacttctcgtcgaagatgtcgatgccggagttctcggggtccaggacctccatgttggcttcccacaggctgtcgatggtacccacgtcacgccagtagccgttgaagtggtaagcatacatcttgcggccgtcgcgcagcagcgcggggatgatgttcatgccgaagtcgttcttggagttggggtccgcctcgtcctcttccagatacttcttgaggatatcccagttgaagatgtagatgcccatggaagccagattggacttcggcacagggggcttctcctggaattcggtgatcctgtcgtcctcgtctgcgaccatcaggccgaaacgggaagcttccttccagtcaacttccatgacggccacagagaactctgcgcccttctccttgtggaagtggaggaagtcggcgtaatcctgcttgcagatctggtcgccggacaggatgatgacgtactccgggtcatagctgtcgatgaagctgatgttctggtagatggcgtttgcagtgcctttgtaccagtcggtaccctttgcctgctcataaggaggcagggtatggacgccgccgtacagacggtccaggtcccagggctggccgttgccgatgtactcgttcagcttctggggctgatactgcgttgcgatgccaacggtatcgatgttggagttgacgcagttggacagcgggaagtccacgatacggtatttgccgccaaaggacaccgccggttttgccgttttctgtgtcagcgcgtacaaacgcgagccacgtccgccggcaaggatcattgccacgatttcttttgccatagctttattctcccctttaacatttcctgatatttggtggaaatggttcaacaatgttggttcagccctgccttatttttcggccttgtccgccttcctggcacagggcttgcgggcgggcttttcagccggttccgccgccttttctgccttgggcttacggccgcgctttgcgggagccttttcttccgcaggtgcggcttctgccttgggtttgcggccgcgctttgcgggggccttttcctcagccttttcggcctttgcggtcctggaagccttcttgggcgcagccttttccgcggccttctcctcggcggtcttgcgggcgcgctttgcgggcacctcgaaataaagcacactcatgggaggcagagtgatggtgatgctctgctcgaagccgtggagcggcttcttcttggagcggacagccttgttgtggacagtgccggcaccgccgaacgcctcgtcgtcgctgttcaggatctccttgtaggtgccggagttcggtgcgcccagggtgtagccctcgcgcaggacggggttgaagttgcagaccacgaggatctgcttgccgtttgcatccttgcgcaggaaggccacgacgctctggcgggagtcgtcggggacgatccactggaagccctcccagctgtagtcgatctgccagaaggcgggatggtccttgtagaacttgttcagggtcttgacgtaggtctgcagctcggtgtgcttgtcgtagcccagcagcatccagtccagagacttggtctcgttccactcggtgaactggccgaactcctgacccatgaacagcagcttcttgccggggtgagccatcatgtagccaaagaaggtgcgcaggtttgcaaacttggcctcatagtcaccgggcatcttgttgatgaggctgcccttgccgtggacgacttcgtcgtggctgatgggcagcacgaagttctcgctgaaggcgtagaaaaagctgaacgtgaccttgttgtggttgcccgaacggaagagcgggtccgtcttcatgtagctgagcatgtcgttcatccagcccatgttccacttgaaattgaagcccaggccgccgtcggaagcgggtttcgtgaccatcggccaggcggtggactcctctgcgatcatgtacttgtgggggtggcggcccagaaccgtatcgttgagcttgcgcaggaatgccacagcctcaaggttctccttgccgccgtccttgttgggctcccactcgccctgcttgcggttgtagtccagatagagcatggaagccacagcgtccacgcgcaggccgtcgatgtggtactgctccagccagtagagcgcgctggagatgaggaagctctgcacctcgctgcggccaaagtcgaacaccatggtgccccactctttgtgctcgccgcgcttggggttcgggtcctcgtagcaggcttcgccatcgaagttgtacaggccgaactggtctttcgggaagtgagccggcacccagtccatgatgacgccgatgcccgcctcgtgcatcttgtccacgaaagccatcaggtccttcggggtgccgtagcggctggtgggggcgaaatagcccgtcacctgatagccccagctgccatcgaagggatactccatgacgggcagcagctccacatgggtgtagcccatctcggtgatgtacgggatgagctcgtcggccagctcggagtaattgtagggcaggccgccctctttctgcttccagctgccggcgtgcatctcgtagatgttcatgggtccgttgatgacatcggccttcttctgggcgttctgccacgcctcgtcgtgccagacaaagccgttcaaatcgtagaccttgctgccgttcgaagggcgggtctctgcgtggaacgcataggggtcagccttgtagacaaggtcgcccgcccgggtggtcacgcaatatttgtaaacgtcgtattccttcatgcccgggatgaacagctcccacacagcgtcattgtccaccttgcgcatcgggtggctgcccggtttccagctattgaaatcgcctactacgctgatggccgtcgcgtgcggtgcccagacgcggaacaccacgcccgtctccccggcccgctgctcgatgtgtgcgccaaaatagcggtacgcttcacagttattgccctgcttgaacaaatacaccggaaggtccgatggattgctgcgggtcttttcctcagtcggtttcataaacagctcctccccgcacaggccccatgggcagtcctgtgccttttactcttttatattaaagaatttcgtcggatttttcaagggttttcttgtagaatataccataatcttttcgttgatatttttcttatatatacaacatctccaatttcagacaagaaatatcggcagacttaacagaataaagacaaaaaagaaacatccgccccgaattttgcacatttggcaaaaaatcagagcggatgtttttccactattttacttcagtttttcaaaggcgcatcagcccacgacgtagacgttgacgttgatggcgccgttgatgacagactccgcataggtctcatagaacaggtccacgaggatgcggccatcctgcacggcgatgccggtgtcggtggctaccgcgtagccatagacgaagctgccgtcggtggaggtgatatacagcagggtgccgtaggggatgacatcggggtcaacggccacggtgccgtaacccagacccagaccggaagagcccttgcctgacttggaataatagccggtggccttgccggtaaggaccttgcggtagctggcgggggcgttggtggtgccgtccgggccggtcaggggcgagacgggcgcaccggcgccataggtcttgaccacatggtcggtaggctccacggtggtggtcacatcggtgacgacgctgttttccagctcgccgtccacccagcgctcccgggtggtgacggtctgctggccctcagagccatgctgcagggtggtggcacggttggtgttgcggaagtagaggctggtgtagacgtactccgtgtcgtaggggacagcctgcgtctccaccttgtcctgatactcgacgcggtggacttcgatcttgctgccagccgtgaccattgcgctgagggcgggctcggtgtagtcgtccccctccagagtgatgccggcacgttccagagcatcggcgacggtacccaccaccatcttgacggggtactcctggccgtcagcctcaatggtgacgctgaaggcgcgctcgatgttcagggatgccagactgccggcaaaggcagtgtaatagacttcatctccctcctcggcctcgatgccggaaaggctcataacgcgggcagggtcgctctcggaagtgaggaccacctgccgcgcaccgtgggagtctgtgacgtaggtcagccgcagattcgcggcggtcacagccagcgtgaacacgagacacgcagccatgacgcagaacgccagcacacgggatgaggctgcacgggtgcagccgggcaatgctttcttaaatttgacggaagcgatacgagacaactcctctcttttcagattttggaatggacagcgggcctgtatctcaaggcccgtcagactgtgcgtaaatgccccgcacagcgggcgccgcaaaagcggcttttcacttcaccgtgataaattttatgcgctgcaacgtgtgttgagcggacgttattttagcagactgaggccgttttgtcaaatcgaaggtcaggcgctcgtcaattccttcacatagttttttgtgcattctgcacatagtttactctcgatttcatgaaattcaatgatttctctccgattttttcgcaaaaataaagtcatactcgttcatatatttttaacatttgagttggcatttccggggtgttttttgcagtatctccagcccgctttgcggcgtcaaaccggccataacaggctcattttcgacacaaatcacggactgttttcggactgttttcaagcgaaaagcagggggtcatttctctccgaaaaaggccgtttggcaaaatgcctaacccgccaaattctcaataaaaaagtatgtacttccgcccactgccgttctgcgctacaatcgggccagaggcaaacgcaaaaccaaatgaaaggagtttttaccatgcagatcaacatcacagcccgggacttcggcggcacggaattcctcgcccagccccaccggctgcatctgggcgcacagaaagccgagggtgtggaccggctggaattcagcctgccggagcagtggaacgggtgtgtcgtcaccctccacatccggcacacggacggcacgctggccgagccgctggcgctggacgaaacaggctgtgtcagcgtgggccggagctttaccggctgggccagcggtgagtggatgctggccgctgccaacggcaatggctacacctcctacacccggcccggccagtacgacgtccacggcatcctccccaccgagggcgcgggcgaagagctgaccccctcggtctacgagcagttcatcgcccgggtgatggccagcgccaacgccgccgcagaggccgccaaacgcgccgcctccggcgaggcgaacgccaagcagagcgccagcaaggccgcttcttctgcccagcagaccgccgccagcgccaccctggctgccggctatgccgagcaggccgaagccgctgccgaccgtgccgccgcctatgccccttccgatggcgctgtgctgagcgtcaacggcaaaggcggtaccgtccggctgaacgcactggatgtctgggcattgccccgccctgtctcgccgaaagccggccagctggtgcgggtggtgaatgtcgatgcctccaccggcgcactgaccgccgacaccatcaacaccgacagcctcagcgggctgggcagcgaagaaagagctcttctgctcaagctgctggattctgccagctacaccgacagcagcgccagagatgacctcgaagcccttaaaaaactgtgggacaccacgccgcccactcccctgcccgacccggacatcatcccggtggagaaggtgactctgagccggcacacgctggaactgagccggggcagcactgccgacctcagcgcctccatcgcgcccccagacgccaccgaccagacggtattgtggagcgtttcgccgacggacatcgtctcggtggatgcgggccgcgtcactgccctcaagaagggttctgccgtcgtcactgccacctccgacagcaagagcgacagctgcaccgtcacggtgacgcccgccgtctaccgcatcgagacggcccacaccgacagcggcgacatccccgcgtgggacacttatcccgccaagtccgagttctttatgccgctgacggccaagaaagcgggcctgctgctccgctcgctggaattccgcgtcaagggctatgtgccgggcacgatgcgcaccgtcctgcgcaagtacggctccacgaccgccctggcagataagttcatcgacattgtccgcggctacaacgacgtggtgctggacatgggcagcatcgcgctggaaaagggcgtcgaataccagctctatttcgccgcctccaacaacttctacccgccctctgtccagccctcctgggtcgcagcaaacgactgcatcgacatcgcccagggcagcgcctactatggcgacgacaccaccctcatcttctccggcaccgtcgtgctgcaggagacctgaaccacaccgaacacatatcctgaaacagaaagagaggtactgactatgacccatcacaagatttccgcatccaccctggcccgcaccgctgcgctggcgctggccctgaccaatcaggtgctcagcgccgtgggcaagcccatgctgcccatcgagagcgcccagctggaacagctcatttccagcggcctgaccgttgccgccgccctcgccagctggtggaacaacaacagcttcacccctgaggccatcgaggccgacgacttcatgacccgcctcaagcagcagaagcgataaaggcttaaacgaacacagcgccccggagcagactgctccggggcgctgtgttgtgtttgaagaaaagttcatctcaggcgttccactggacatcctctgcggccacatggccgtcctgtacgctgataacagcggcgcgggcatccatgccggatgtctttttgaaaaggtccgtgtagatggtcatgccagccatcatcaggacagccagtgcaaggccgaccagacgaatcatcatcccgtcaacattctcgttcatgataccttctccttttcctctttgcggcccggcagacactattctgccgcagcccgcagcccaattttccgctgcggaccccctctatcggcctgcagcgatgcatttcccaagacattccaaagaaaaaagcctgaggtgaacacaccccaggctccattgtctgtctgactggtataatagtctctttttcagtttttgtcaagagggggatgaaggaatctcaaccgccggatatgcgcagtcgtgctccccagtccgctgggaaacttctgttaagcaaaaacggctctgccgaagcagagccgtaaaagccgtaatacggtaaaatcagcgcttgctgaactggggagcgcgacgggcagccttcaggccgtacttcttgcgctccttcatacgaggatcgcgggtcaggaagccagccttcttcagagcagcgcggttctcatcgctctgctgcagcagggcgcggctcaggccgtggcggatagcgccagcctggccggaaacaccgccgccggaaacgcggacgacgacgtcatacttgccctcgaggcccagcaggaccagcggagagcggacgatcagcttcagggtctccagaccgaagtagttgtcgatgtcacggtcgttgatggtgaccttgccagtgccctggtagacgcgcacgcgggcaacggaatccttacgacgaccagtgccgtagaaataaggtttggtttcgtacatgttcgattgcctccttcttagaactcgatcttctcgggcttctgagctgcgtgagcgtgctcggcaccctggtagcagtgcaggcgggtcagagccttagcaccgatggtgttggaagggatcatgcccttgacagcgtaggtcatagccaggtcgctgttctcagccatcagcttgctgtactggaccttcttcaggccgccgatgaacttgctgtgggtgatgtggaacttctgctcggccttcttgccggtcagaacagccttgtcgcagttgatgacgacgacgaaatcgccgcagtcaacattgggggtataatcgaccttctgcttgccgcgcagcagaacagcagcctcagcagcgacgtggcccaggctcttgccggcagcgtcgagcagataccacttgcgctcgacttcagcgggcttgacgagagtagtgctcatatctatttcctcctgataagtgtttcaacggttcagtgcgccttttggggcgcgagtgtcagtatacatcacaagaacgcccctgtcaacatcatttttcgattttttcggctcagttttttgaatctcttgttttctcttgttttctcttgaaatctcttattttctcaaatcgcattttcgtttctgtttttgcggcggagcgctacaatttcagtcccgagtatgttatactaataaagatgcagccccacccccggggctgagccttacattcataaggaggacattccttcatgccgaaagacatccaccagcgcgacaccgcgcagcagcgctcttcccgcctgctgctggccatgggcatcatcgtcctgctgggcgcactggcctattttgtgctgaccctcgtggtcaaccgccgcactcccgcttcacctgacacccgctacaccgccgagaacggcatctccgtctactacgaatccgccgtctggccggtgtgcgagatgaccgaggacgccacccttggccgtgcgctggaactggcctccgcccagagcagcgacgacgccaactatcaggtcgtgctcttccagaaaggcacgaaagacacctatgaggacttcatcggccagtcggaaaaagagctcaagcaggcttacggcgtcatcagcccccggaaagtcgatctgagcatcgacggtgccgccgtcaccgccgtgcgctgtgatattcaggcttactacgccgtgctggccaccatcgagtacgacagcggcgacgtcatctatgtctccggcctgaccaagctggcctccatcagcgacatcgtcaacctcgtggagagcgtgagcctgtcatgagcgacacgaaagcgatgcagcggctctgcggcctgatgcgcaaagccgtccagcagtacgagatgctggcccccggcgaccgcgttctggtgggcgtttcgggcggcaaggacagcgtagctttgaccgtcggtctcgcgcggctgcggcagtacctcggcttctcgttcgaagtcgtggccgtcaccctcgacccccagtttggcggcaagccggtggattactccgcgctggaagcgctgttccggcggtacgatgtgccttacgaggtgcgccgcaccctcatcggccccatcgtcttcgactaccggaacgagaagaatccctgctccctctgcgccaagatgcgccggggcgcgctccacgccgctgccgaagagctggactgcaacaaggtggcgctggggcatcatctggacgacgccatcgagacgttttacatgaacctctggcgggagggccgcatcggctgcttctcgccggtgacagagctgtccgaccgggggctgaccctcatccggcctctgctgctcgccacagagcaggaggtacgctgtgcggtgaaggaagaaggctttcccatcgtcaagagccgctgcccggccgacggcgtgaccacccgggaggacacgaaaaactttgtccgggagcggtgccgcaccgaccgtgctttccggcagaagacccttcacgctctgcaggagagcggcatcgacggctggcgtcctttgcacccggcccgtacatcaaaaaaggaggacaccgcccatgcagatgctcgcatttgaaaaacacgtctgggccgagatagaccttgacgccctgcgccacaatttccgcgccgtgaaggcccgggccggggagatgcctctgtgcgctgtcgtcaaagccgacagctacggccacggtgccgtagagtgcgccaaggtctttgccgaagagggggccgcatggctggctgtgagctgtctggcggaagcccgtcagctgcgcaaagccgggctgacgctgcccatcctcattctgggccatgtggagccgggccgtgcgcccgtcctcatccaggaggacatcaccgccgcctgctactccctgccccaggccagggccctcagcgaggccgcctgcactgccggcggaaaagtcaaagtccacctcaaggccgacaccggcatgggccgcatcggttttgcgctccgcaccgactttgacgcggcgctggccgggatgctggatgcctgccgcctgccgggtctggacgtgaccggcctgttccagcacttcgctgtggccgacgacgacagcgccgacagcgtggcttatacccgccagcagcacgagctcttcgtccgggcctgtcagggccttgccgaggccggttttgagcctgccgtcgtccactgcgacaactccgccggggtgatgctccaccccgactggcccgccggactgccccgcacccactgcatggcacgccccggcatcgtcctctacggcttcgaccccagcgacgaggtgcgttttggcatcttccgcccggtgatgaagctcaagaccatcgtcagcatggtcaaggagatgcagcccggccagtcggccagctacggacgccgcttcaccgcggaaaagcccaccaaggtcgccaccctctgtgccggttacgccgacggctacccccgccttttgagctgcggcaagggcatcgtggagataaagggtatgccctgccccgttctgggccgggtctgcatggatcagatcatggtggatgtctcggctctgcccgacgtgcaggaaggggacgaagccatcctgtggggcggcgaagtgagcgacagcgccgagaccatcgcccacaagaccgataccatttcttacgaggtgctctgcggcgtttcccgccgggtgccccgcgtttacctggaaaacggcggcatcaaagccgtcgaggactggatcctataaatttcggaggaactacatggcaagagacaacatccgcaacttctgcatcatcgcgcacatcgaccacggcaaatccaccctctccgaccgcatcctcgagctgaccaagagcgtggacgagcggacgatggaggaccagatcctcgacagcatggacatcgagcgggaacgcggcatcaccatcaaggcccgcgccgtcaccatgaactacaccgccaaggacggcaaggtgtacgagttcaacctcatcgacaccccgggccatgtggacttcgcttacgaagtcagccgcagcctcgccgcctgcgagggcgctatcctcgtggtggacgccacccagggtgtggaggcccagaccctcgccaatacctatatggcgctggaacacgacctcgagctggtgcctatcctgaacaagatcgacctgccttccgcccatccggacgaggtggcgcaggaagtggaggacgtcatcggcctgccctgcctcgacgcgccccgcgtctcggccaagaccggcctgaacatcgaccaggtgctggagcgtgtggtcagcgacattcccgcccccaccggcgacccggacgcccccctcaaggccctcatcttcgacagcatctacgacagctacaagggcgtcatcgtctatatccgcgtctttgaaggtacggtcaagcccggcgacaccatccgcctgatggccaccggcgcacagttcacgctggtggaagtgggccacatgggggctaccagcctgaccccctgcgaccagctgcaggccggtgaggtcggctacctgaccgccagcatcaagaccgtgcaggacacccgcgtcggcgacaccgtcaccctggcgaataaccccacccccgaggctctgcccggctaccgtcaggtcaagcccatggtcttctgcggcatctaccccgccgacggcgcaaagtaccccgatttgaaggacgcgctggagaagctgcagctcaacgacgcctccctgacctttgagctggaaaccagtgccgcgctgggcttcggcttccgctgcggcttcctcggcctgctccacatggagatcatcaccgagcgtctggagcgcgagttcgacctcgacctcatcaccaccacgcccagcgtccgctatcgtctgaccctgaccgacggcaccgtggagatgatagacaacccgtccagctaccctgacccctccaacatcgtcaagcaggaggagcccttcgtggacgtccacctctacacccccaatgaatacgtcggcagcctgatggacctgtgccagaacaagcgcggcgtcctcatcgacatgaagtatatggatgatgtgcgtgtggacctgcactacgccctgccgctgggcgagatcgtctacgacttcttcgacgccatcaagagccggagccgcggctacgccagctacgactacgagttcaaggagtaccgcgagagcgatctcgtcaagctggacttcctgctcaacggcgaccccgtggatgctctgtccatgatcgtcttccgcgacaacgcctacgccaagggccgccgcatctgcgagaagctgcgggacaacatcccgcgcaacctcttcgagatccccgttcaggcggccatcggcggcaagatcatcgcccgcgagacggtcaaggccatgcgcaaggatgtgctggccaagtgctacggcggcgacatctcccgcaagaaaaagctgctggagaagcagaaagagggcaaaaagaagatgcgccagctcggcagcgtctccctgcccagcgaggcgttcaccgcggtgctcaagctcgacagcgacgacgattgatcttgatttttccgctcccctcccgcccggaggggagttttttcatgtctatcgcaagttaagaaaataacgcaataggataacagcatatttgcgatatgcaattcaacgctgttgctgttgcattaaaaagttgaattgctatgtctggcggctaaggatcttagctcaaatcttgacctttcttccgacattgtgtacaatgagactaggttaaatcaggttgtcattttatgtcatttggaggcgaacagagtaacctttcgcactcagaaataaaacgagaaggaatggatacaacgatgcggatcgcgatggtagggcataagcgtattccctcacgggaaggcggcattgaggtcgtggtggaagaactggcggcgcggatggtcgtacacggccacactgtcacctgctacaaccgctccggccatcacgtcagcggcagagaatacgacgccgagcatctggacgagtaccggggcatccgcctcaggcatctgcccaccatcgaccgcaagggtctcgcggctgtgacatccagcttcttcggctgccttgcggcggctttcggcccctatgacgtggtccatatccacgcggaaggccctgccatgttctcctggatcccccgcctgaccggcaagcgggtcgtcctgaccatccacggtctggactgggcgcgggacaagtggaagggttccttcggctcctggtatatccgcatgggtgaaaagatcggcgcgcggtgcgcccatgagatcatcgtgctcaaccacggcacccagaaatactttctggacacctatggccgcaccacccactatatccccaacggcgtcaaccccgcggcccctgtccccgccgacatcatccgggaaaagtacggcctcgaaaaggactcctacatcctctatctgggccgcatggtgccggaaaagggctgccactatctggtggacgccttcaaaaagcttgacaccgacaaaaagctggtcatcgcaggcggcgcctccgatacccagtggtacatggacaagctgaaagagcaggccggcagcgacgaacggataatcttcaccggctttgtagacggtgcgctgcgggaagagctctacagcaacgcctgcctcttcgtcctgcccagcgacctcgagggaatgcccctctgcctgctggaagccatgagctacggcaactgcgtcatcacctccgacatcgaggaatgcaccaacgtcatccacgacaacggcatctcctttcgcaaaagcgacgtggacgacctggcccagaagctcacctacgccctcgagcatcccaacgcggtgcggatgttcaagtggctcgccgccgagtacatctgcacccgctttccatgggagcgcaccgtggaggaaacgctcgcgctctacgagaaaaaataatggcattcaaaaaacgcctgctgcattcgcagcaggcgtttttctctttagcgcgaatttttctgcatccggcggtcacgcccgccgcgcagccagacctcgaagtcctgccaggtctgcgcctgcaaagacgccacgcagcggggcagcagcgctttgatgttataaaccggaacgatgaccaaaacagcgggcatgacggactccttatctcttttcatagactgcaaggaagcggtcggcgagggcgtcccatgtgttctcatggatgaccgtctcataggccgcctgctccatccgagccttcttttccgggtcggcggcagtgtccagcagggctttcgcccagcgggccgggtccgatttttccagcacaaggccgttctccccgctgcgcagcagcatatccgcaccgccgttgggggtggtcagcaccacccggcggaagaacatcgcctccagcagcaccatgccgaaaatttcgtactccgtcggcagcaggaagagatccgcctgccggtagacccccttcatctgatactggggggcttttttctgccagaagacgcagcgttccagccccttttccccgatggccgctttcacgctgtccacatactccgcgtcgccgccgccgatgatgtaaaggcaggcgtccgggtcgcttttccgcacttcggccagcacatccagcaggaagaaggggtcccgccggggctcgatgcggccgatatagagcaacttcaggcccgttttctgcgcccgcatcttctgctcgagctccgtctgccccgcgtccgggcggtcacgcaggagctccgcgtcgatgccgacgcccaccgtcgtcacctgctccggcgagagacgcttttccagcaggaatttccgggccagctcgctcttggtcagaaaacgggtgccgcggcggcggtagcgccccacgaagagggcgtcgaacactctgcacatccggttatagttcttgttgaagggcgagtagtaggggccgtggtagaccaccgtcttttcggggtatttccccgccagatgccacgagaacagctggttatactcggcggtctgcagcacatcataccgggcaaagagcttttcctgccctttgaaccagacgtttttgagcaggactttcccgtggcggtagaagacatggatgggctttgcaccctccacctcgacctttacggtcatctcgtcgccgtccgtccagaacaggatgtcggtgggatggccgcgcttcaccagcgccttcgcaagtcccacttcctggatattgtaggtgttcttggtcacgtccagcacgctgggccaagggcgaacgatgagtattttcatagcggcatcctcactgtctgagctggtcggcaatatcggcgtccacgatctcctcgccggacttatggcgcagctgctcctgcgacgcggcgctcaggccgttgttgaccacgccgttgaggtcgcaggtggagcagcggtccagctcttccttcgacaccctgccgtcccggtagtcgcggcagactttcagctcatacatactgtaaggagtcttggtgaacagcgccttgaacttatgggtcagcacccagaagcccggcttccagatatatttgtgcatggccggcgagacggagccgatcatccagcagtcgcggtcgcagtggcgcaccttggcgcggacggcctctgcctcggggctgctccacagcgcgtcccagctctgggtgttcaggttgcccatcacctctttatccttggtgccgttgcagggcatgacgtcgccgtaggggtcgatgaagaaggtatcgaagctcatatcacagggcagcaggcgcttctggccgtagaggtagttgatgaggccatggttgaagtaggcgcggaaccactttttgggcgaattgctccgcagcagctcgttgatgagggcctcgaagttcttcgccaccatggggcggtcgtggatgatgttcttggcctccacgaagtagaagctgttgtgcagggtggcggtggcgaattccatccccatctcatccgacaggcgatagagggggacgaggtcgggggcgttcttgtcctgcacggtcatgccgaagcccacatccttcatgcccatctcccggagtttcttcagggtggtgtagccgcggttgtagccgtcggcgaggccgcgtatctcgttgttggtctgctcgaggccctcgatggagatacggatgccgatgtcggggaactccttgcacaggtcgaggatacggtcggtgaagaagccgttggtggagatgacgatgcggtccgacttcttccgcagctcccgcacgatgtccttcagatccgtgcggataaagggctcgccgccggtgatgttggtaaaatacataggcggtagcttgcggatggtctcgaggcggatctcttcctcgggcttcgagggtgccttatagcggttgcacatggtgcagcgcgcgttgcagcggtaggtgacgataacggtcccgttcagtttcttggttgccatgaatccttctcctccgtttttatctctggtacaggggcatcagtttttccgcatattcttccacggtgtcaaagcgggtcgtcccgcaggctctggtataagcgtccagccgggcgtggtcatcccagagggcgcgtatcttctctgtcagcgcgtccgcattcccgctctcgaacagctcgccgttcacgcccgcgtcgatgagctccgggatgccgccgatgtctgcgcccagcaccggcgtgccgtacatcagcgactccatcaccgaaaaggggcagttgtcgtagcattccgaagggcagaggctcagccgcgccccggcaataagacgctgcagctcctcacctgactgaaagcccacatttttcaggttcgggatcccggccagctccccttccagcgggccgctgcccgccgccacaaaggggatgtccggcagggccttgcaggctttcaggaaggtctcgatgcccttttccttcgcaaagcggccgaagtagagcacatagtcctgtttttccacagccggggctttctttgtggaaataaagttgtgcatcgccaccgtccttccccgcaggtcggggtttgtatccagcttctttttcagaaacgccgagcagcagattataacatccagcttccgatagacttttttccacttccagaacattgcctctgcacagccgataacggaatgtgcccgggaaccatgaatgcaccgatgcttgatgcagtttacataatgtccgcccagacactcttcgcacgaatgtccttcaatgctctgatagcacagatgatccgggcagacaagctgatggtcgtgggcagtataaaggatacagcaggcgtgtccgctctccttccgccatttgtccgcctcaaggaggatgctgggcgtcaactgatagttgaaattgttgagatggataacatccggtcgaaaatcatccagcaccagccgcagtttctgccgggcctcggacgagtagatagtcttgagcgggtatgtaagcttcgccagcttgctgccgccgtggaaatccatgctgctggtataggcatccacccggttgcccacacagcggccctcatgctccatcccgaaatactgcacctcatggcccatccgttccagctgctttcccagctcgaacatataggtctcggagccgccgttggggtagaggaatttgttgatcatcaagaccttcatctcgtccgctcctcacttttacacacagatgtggaaatcgccctccacattttcttcttctctctttttgttccgcttcttctggcggctttccttgaccgccgccagggattgggtctccgagtccagcagattgccgttctccgaaacttcgagacaccataccatgatggccatccgataaagtacattgatggcataataaaacagagtgttatccgtcaggtaggtgaagaacacatacagattcatcgccatcaaggcgtaagccggtatctcagtgtaccgctcctccacccggtggatgcggaaggacagctcgaaaagtatccatatccaccagcaccagaatcccacctcgatataagtttccatatacacattgtgcagtgccgtcgttgcaagatggtaactcgggtcttctgtacaataggtataaatgaagcggatccccctcccgatatagctgggcaccaactcaaaaaaatcgctgaaataagtgtagatcacatcacgatacatcagatctatttccagttcatttgccagctccacaaagatgccggactttatcagccagaggtagaagaaaatacatccgcctgccgccagcgccataatatttgccagcgcccggatgtgttttggcttccaccggcagaggcaatgatacatcaccgccgcaccgagcgccgccgggacggcgatgcgcttgaagcccagcgtgaagaacagcatcgaaatgaggaaacagacggcctgggtcttgtggttcttctccttgtggatggcgtagtagatgaccatgacgccccagccgtagaccatatcgtgcagctccatctggcgcatcgcaccgccggtgtcgtccgcaaaagtaatgagcagacgaatgtactccgaaataaacgtcccgatgcccgcccgagctgcgacctgcagagccacaaggccgtttgccagcgccatgcccgccagcgttaggggcatcgtatcttcgccaaataaatagaccgctgccgccgcaaaaagaatgttcgtcgccatataaaaaatattcaatgagccgcgcaggatgtagttgaaggtctggaactccgtgatccagatggccaccgaccatatccagaacatcagatagggaaaaaagaaaagcgcaaagaagcgcaggcagaagatagcccggttgaacatcgggtggataaagaacatgaggcaggcccagccgactaccagcagattgataccatattttacgccgacaggcagctgatagcaagcgcagtagaagcacacgatcataagcagaatataaaatcctgcgctggccagctttagcggtttgctcttaaaaatatccattcgttgacgttccctgtcttattctcctcgccgcggctcagttcacatccacgaccaccagttccggctggttgaagatgcgcggatacggctccgaatcgccgaggccgcggctgatgaccacctgcgactctcccatctggttgacgccgctggtgtacttgggcagaaagccctggctggtagaccacaggccctgtccgccgatgcgcacctgtccgccgtgggcgtggccgctgagcacaaggtcgaacttttcgtcggccagcgaggtgtccagcacctcggggcagtggcagatgaggatggtgcagacatcatccagcgcattcgtctcgtcattcagcgcgtcggccactgcgcgggagttttcccgttccagccgggcgcggggccactcgaagaagccgccgatgcgcagctttttgccgttgatgacggtgtcctcatacgttccgttcatccagtggacgccggtggccacgatgtcgtcaaaaatggcatcgcagccgttggcgtagcgggccgcccactcgtggttgccgggcgcgtaatacaccggcgcaatgtccaccagctgacgcatcaggctcagcacaaggctgtagtccgggtctgtgtcaatatccatatcgcccaccacggcgatgaggtcgggcgcaaggttgcgcaccttccgcacaaggtcggcgttgtcggtgccgtactcgctcagatgcaggtcggaaagcagcacgatgcgcaggtcttccaccggcttgtccaccgtgacggtataaaaggtcgtgatgaagctcttgttcatctggaggttatacagcaggatgccgcccagaacaagggccgtcagcagcaacaggagcagcagccgtgccagaaaatgcagtatcttttttatcatagttcactctcagcttttggacacaagcggcgaggcagccgcattcttcgcgttttcggcatcctgacgggcttttgcgtctgcacagcggcggatggacagccgcagcagagcgcggacctcataggcgttatccttggtcgagttggcgatgcccacaaagatgcaggggccgaaccgggcgaactcggtcttggccagcagactgcccagccggttgacgcagtttttcgccaaatcgaagctgcagttttccagcaggacgataaagcggcctgctccattgtagccgacaaagcccagcgtgcggaacacatactgcagctggtcacccagcaggcgcagcgccttgtcgccatcgttccggctcatggccgaaaaatccagctggatgcagatgatggtgaactggcccttcagccgtgtcgtgctgtagtggtcgatggcggcatcacagcgctcgcggttgggcaggccgctcttcttgtccacatagaggtagtaatccacaaagtcgcccagacggcccaggaagatggcgcagaagcatcccacaaagaggaagagcaccaccgacagggccgcatagagcttcaggttgagcttctcggtgacaacgatgctgttcttcatctcgatgttgtccgcaccgttgacctgattgaactcgtcgatggtcatgagtgcgaggtcatacaggctcgtgaacttctgcaccagctcgtcgatgcgggcgctggcccactgtgcctcggcactgcgggggtcggtgtcctgggtcacatcggcgtaaatgtccaggatctcctgcgcctgcccctgcacaatggtggcgtcgatgagcctggcgtggaggtcggcatagttctggatgagcttatcgtaggtggtggtgacattgccggaaggctggacactcgagtcccgcaccacgtcactgacgatctgggtctcgccgccgtcagaattccggcttccggagtagactgccgcaccgtccagcgtcttatctccgaactggtcgatgatgctcttggcctctgcgatatttccgttcaggctgtcgatctggagctggtagcgcatcacgatgttcttcttcgtgttgaccagaagcgtatggtcccgcaccagcttatgattgacgatataggcgtagaggtcgttcagggtgttctgggtcagatactcgtactccgacacgaggtccgagaacgagtatcccgatctcacactgtaaaagccgtatttttcgtcggccttcttccgaaggtaggccacgctctcgttggcgttattgcgcaggatctccacgcagtcgatgtactcgtagttcgccaccgagacattgctggcgttgttggggaacagctccgagtccacatgggtctcgctgtaatatttgaagtagttcgtcagcaccgcatccagcacattgcgggcgtagtcggtggcgtccttgctggccacggtgaacgaaacggcatagatggtggggtaatattcatactcctcaccgtcggcaagcgccgtctcctttttggtctgctcgtcctccgggatgacctctttgacggagatcttggagcggatgctctcggtgctggcagtcagccccagctgctggatggtctggttgatgaccgaggccgacgtgatctcggtggggtctatcctggagccgtcggcgttcctgccccgacttgcattcgcgttggtgtactggatgatggctgtggccgtatacgactgccgcgacgaaataaactcatacacgcccagacagcctaccgctgtgatgagcatgatgaggaaccaccactttttgaggtagcgcagcaaatcaaaacttttcattcttcctccatcctgtcagaaagacggatgtcattcgttttctgcccgcaggcgttcacgctgccgccggcagctcgtcttgacgacagcagccagataccacacggtgcatatcacagccgccagcatcacgctgggcttgacgttataccgtttgataaacgaggactccggcccgttgaacaccagatatctgctgatgcgctgggcatagcagtcggcgtccagctcccgcgtcgcgctcacgatgccggtgagctgccgggtgatggtatccaccatcgactgggccacctgcagctcacgcgccccggtgggctcctccagcgccgtgatcttggagttattggtcgtgatggtcttctgggcgtccacggccgaggtgagcagctcattggcccgcagggccagatcgtcgatgccgaccttggtgcgggacatgtagaacgagccatcgctgtcgtaggtggggatgagcaccgaggagaccatcttgttgttgtagttgtccaggatggtcataaagatgtcgctcttctgggagtcgctcatctcgctccaccgcagggtgcggttcagctcgttgaggttgtcgatgcagcgggcgttgttcttggccacgccgttttcccagatatagctctggtactccgacagggtgtagctctgcagattctgtacctgctttttgatggcgttgtagctctggccgctggtagacagataggagccggcctggtcgttgcgcaccgtgaggtaattgttgatgcggcctatcatcatctggaaataggagccgatctcctcgtagtccatatcggaataatcaaagctgatgtccagcgaggtcgcattgatgcggtaatctgccgtaaagcgcttgaggtagacccggcatatctggtcgaggagatcctgcgccgtgatcttgccccagagcgaccacggcagttcgaggtcgatgtgataggacgagctgatataatagtcgtcctcctcggtcacgagcttgctgttggtcggcgagatggagatgcagtccgccagctcactggtggtcaggtcatcctgcaggccggtggcctgcaggatagcctcaagatactcttgcgtcaaaaattccgattcgctgaagcgggcgccgttgggcgtcttgccggtcacgctctcttcgtagttcagcgacatggtggtagtggccgaaaagctcttgaccgtggtcagcacgcacatgaacatcagcgtacacacgacgcccacgacgaacagccgcctcacctgccgcagaaagacttcgcacaggagccggatagaaagcgtatcgaggaaacgctggaacgatgtaagcaccgactcccatccctcacagcgggatccacgcctgctgcgggaggacttcttttctgccggagcggccttttctgcgctttcatccccttccggcaccgctgctccggtgggatccagagctgccgcggagtcgtcctgctccggcggctggggcgcagctgcctcgggccgactggctggctgaaggacattgagcttccgcttcacagacttcggcggggccggaggcgtcaggacaggctccaccggcgggatggcggacggcggcgcagcgggcgcggtataggtatgctcttcttctgccgcctcgggctgcggagccggggccgctttctccgggacggggtcctcctgctttgcccggccaaagagcgagcgctttttcgcgtgctttgcggcatggcgcgcgggcgcagagccacgcccggatgtcttttccgggctggccttgcagaccctctgattcggttctttccgcgctgatctcatccgcagtttcctttttgttctcttataggtacgtcctccgattggccggagggtatacttcaactattttataatacctcaaatcgtccccaaacacaactgttccgtcatctttcacatccgaactgcccgtttttcttttcttcccgccccaaaaaagcccccgcctccgggagtaccggaggcgggggcttcgccgaactgtgatttatgaagaaggttttcggaaggtaccgcttatcaggcaggctgtgccttgttggcgttcttctgaaatgaaccccaaaagttagaaaaaaaaaaaataagaattaagcggccccaacggtctgaatcctgtactgcacagggctcaggccgtttagttttaatttgattcggcggttgttgtagtagtcgatatactcaacaatggccttttcgggctgttcaacggaatcgaatttttccaaatggaacagttccgtgccttcttccaaatagatgcgctcccatcttgcaacttgcgtcttactttgtaccccgaaacggttggctgcttctggacagcttaaatgttccgcgcgcattgtttctactacttttattttgaattccccactatattttttctgtggtattccctttggcatacaaaaacaccccatttcctaaacagtataccttactgtctaacaaatggggtgcagttcgtacgaaagccggagctttttcttgtgtttttacacgcccgaataggcggagaagccgccatcgatgggcaggcagatgccggtgatgaaaccggcagcgtcattgttcagcaggaacagcagtgcgcccacaaggtccttttcgctgtcgccgaagcggcccatgggggtcgcggcgaggatcttgttggtacgggccgtcggggtgccgtcctcattgtagaggaggctggcgttctgctcgctggcgaagaagcccggggcgatagcgttcacccggatgccgaccttgctgaaatggacggccagccactgggtgaagttggtcacagcggccttggagccggagtaggccggtatcttggtcaggggcaggtaagcgttcatgctggagatgttgaggatgttgcagcccgggcggcccaccatctggcgggcgaaggcctgggtgggcagcagggtgccgatgaagttcaggtcgaacaccatctctacgccgctctcgtcgaggtcgaagaaggtcacggtatcgtcctcgaggtcggccatctcgaaatactctttgtcggtgttggcgcgggcgttgttgccgccggcaccgttcaccagaatatcgcaggagccaagctctgccatcacgtcctcagccacctgcaggcagttggccttgttcataacgttgcaggtgtagcccctggcgatgccgccctcggcctcgatctcgtcggccagagccttgagcttctccatattgcggcccagcagggcgacttttgcgcctgcccgggccagagccttggcgaagatggagcacagggtgccgcttgcgcccgtgacgacggccaccttgccggtcaggtcagtgttcagtacattctgttccatgttcttcctctttacaggctcagctgcggtactcggcgggcagctggtccatgctctgccacttggtcatggcctcttccagcttcatgccgttggccacagcgtcgcggcggcaggcgttgactgcctggatctccttcatcttctcgccggtcagggtgtagcccttcatggcgataagggtagcggcccaggccaccatcgggatgatgcagaacagcacgatgaccacccagttcataccgggggtgtaggggtcgtactgggtgggcaggctctcgaggccgatgaagctcacagcgatgccgacgacggtagcggacaggctggacaccagcttatccaccaggctgaacagcgtacccatgatgccggggatgtagctgccgctgcggtaagtctcgtagtcggagcagtcggcgaccatggggatgggcatatcggcggtggcgtagtatgcgccgtagccgatgccgaagaatgccatgaagaggatggtgtagaggttgatggacaggccgctgccgcccatgatggacagggtgaaggcgtcgctgcggccccagagcagcagcagcaccagcacgccgatatagcagatgaatgccacgctgacgtacttcatcaggctagccttctgaccctccttctggctggtgcggacggtgagcaggaagaagggcacgctgaagacgtagcccagcaccatcatgggcaggtacaggccgtcatagctgcccatcatgcagccgtacagcatacacaggacggtggtgttggtggcgatggagagagccagcttgcagccggcaccagccaccatcagacgctgcatggggttattgttcctgatgatctggacgtactcgtgcagcttgaccttctcgctgacctcgccgccgatgccgaagtacttgggctggtccttctcccagatgccgatgatggccagaacggtgaggaggatggagatgacgatgcccacgggagccagagtgcggaagaaaccggcagaggcgtagccgccctcatagtttttggcgaggatgggggcgaagaactgcatcacacccatgcccagcagagagccgacggtgttgaaaatggtgaacagggggcgctgcttggggtcgttggtcagaacggtctggccggaacgggtgcagctggtctggaaggtgtagccgatgacccagaccgcgtacagagccgcgaaagccccatagcgcaggcccatcgagctggcggggatgagcggggtcaggcagtacagcacgaggatgctggctgccatgatgaggttgccgatgaccatgaagggccggaacttgccgaacttgccgttggtgcggtccatcagggcgccgatgatggggtcggtgatggcgtcgaacaggcgcataccggtgaccatgaccgaagcgaagatcatggacagggccagcaccttgctgccgaaggtggcgatgtaggaaagcaccagcacatagtacacgttcgttgcgccgttgttcagcgggaacagcaccagctggtaggtcttggcgcggttcaggcccggcgcctttgcggtttgttcacccatttgcggtgtctcctttttcttacaaaaaacggcagcctgcccgccgttccgggggacaggctgccattcgttcttaaccgttgcggaaatctgcgccggaattacttctggtcagctgcgggagcggtatcgaccatgctcttcttcgccttgagggccttgctcagctgccatgcgcacaggatggtcaggacggccagcactgcgatgagcgcatagatggcggtctgccaccacggggtgatggtcttcagggtatcggtggaagcccagccgttcatggcgttggagttgaccacggtgtagaggatgtggtgcatcgcgttgcgcatctgggtgacgatgtaggcatcgttctcatagtttgcagccttggtggtgtggatcttgggcatcgggctgtcccagatgtcagagccggcgatgaggccgtccaccaggtccatgtactggctggaaccggagaagtcggtgatgcacatgccgcgcatacccagctcgccgcgcaggaagccggtcagcaggttggcgttcgcgccgcaccagatagcaccccagcggttgaagccggtcatgacgctccaggcgccgccatcggtgatggccttgtcagcgacttccagatagatctcacgagcggtctgctcgttcagccaggtgttgacaccgcggcggctggtctcggagtcgttcagggcgacgtgcttcaggtagacgtagacgcccttggactggatgccctgcacctcagcagcgcagatggtgccagccacgaacgggtcctcagagtagtactcgaagttacggccggagtaagcggtgcggtgcatattgatgccggggccgtacaggccggagtagcccatggccaggcagtcc

SEQ ID NO: 926 - DNA, 9000 bp, unidentified
  source 1..9000: mol_type = unassigned DNA
tcaccccttcgcggcccggtcggcttcgatcagcagcttgacggcctcgatgcctacctccagggcggcggacagatcgtggctctcctcctgatccagcccggcagcctcccgctcctggttccagatgacgtggaagcaggagccgcagcgcacccccagggcagcggcacagcagaacagggcggcagactccatctcggaggccaggacacccaggcgcttccacgcctcccacttgtagagcagctcctggctcactggcatccgcttggggtcgtgctgtccatagaaggaatccttgcactgcaccacgccggcgtgccagggcttgcccaggtttttggcagcctgcaccagggcactctgcacctcatagtcggacacggcggggaactcgatgggggcgtactcccggctggccccctcgtggcggaccgcgccggtggcgatcaccacatcgtcgctcttaacgggcagggcgatgccgccgcaggtgcccacccggatgaaggtgtccgcgccgatgttgtgcagctcctccatggcgatcaccgcagatgggccgccgatgccggtggagcagacgctcaccttctcccccagaagggttccggtataggtggtgtactcccggttgctctgtaccttcaccgggttatcaaagtaggctgcgatcttctcgcagcggccgggatcaccgggcaggaaacagtagcggcccacgtcgccggccttacatttgatatgaaattgcagctcgtgttcgtgcatgataatcctccttgttctgacaaaaaactattttttattatacctccttttttccatcattgcaagatatacaaaagcatcctagcttttgtaaccttttgttgttgctttttttgtgtgctgcttttaaaataaagaattgtgaatttcccctgacaggaaaggtgtgtaccggatgaagaaggccgtgctatttgccctgatcgcccttttgggcgggcttgcactgggcaccctgttcggcagcgggatctcctctgccagcctgaactcggtccgtgccaccgcagcggagtatcccgcagtttccgcgctggacgctattgaggtagagggtagatctaccctctaccaggccgcgccggccgacgccggcacctcctgcctgtccgaccgtgccggacaggttctcgccgcgctgaaggagagcgattatgaggccctggccgcgctggtgcacccggagaaaggggttaccctgacgccttactccacggtggagcccagttgtgaccgcaatctcctccccgcccagctcgtcctcttgcccgaggacgacatcccttatgtgtggggtattgaggacggcaccggcgcccccattgaactgaccggacgggagtattttgagcgctacgtcttcaatgccgactatactgccgcccctgagacggcggtagacaccgttctgatgcagggaaacgcgctggaaaatgtggcctccgcctatccggagggacgttttgtggagtatcactttcccggtctggacgaacagatggccggatacgactggtgttctctcaaactggtgtttgaatgctatcagggtgactggtatctggtcggcctggtgcacagtgaatggacggtataaaagccgaaaaagagcccctctccctgtggagaggggctctttttcggcaaattacgcataatgtccttgcatgcgtgttaagattgcgttaagattagcatgcaatgtgttgtggggcacctccgggcgctctgaaaggatgtatggagcttgaaaatcatcatcgtgggcgacggcaaggtgggctttaccctggccgagcacctctctcaggaggagcacgatatcaccgtaattgacaccaacgacgccgctctccgccacgcctctgaggccctggatgtcatgtgtgtcaaaggcaacggcgcgtccatttccgccctgagagagtcgggtgtggatgctgcggatgtgctgatcgccgccaccagtatggatgaggtcaacatggtctgctgcctgaccgccaagcggctgggcgccaagtatacgatcgcccgggtacgcaatgtagaatatgctatggagctctccctgctgaaggaggccctgggcatcgacctggtcatcaacccggaaaacgccgcggcggcggagatcgcccgtctgcttcgctttccccctgccgccaatctggagaccttttgccggggtcgggtggagctgattggcttccgggtgcgggaggaggactttctggtgggacatcccctgtccgcccagagcggccagctccagtccctccctatgctgttctgtgccgccgagcgggcggagggagatgtggtcatccccgacggttcctttgtgccccaggtgggcgaccggctctatctgatcggccagcctaccggcctgaccgccttctttcgcctgctggggcggcacaatcccaggtgccgcaacgtatttctggtgggcggcggacgaatcgcacactacctcaccgccattctggagcggcttggcatacacgtaaagatcattgagcgcagtctggaccgctgccgccatctcagcgaggtactgcccaaggccacggtcatctgcggcgacggcaccgaccaggaacttctggaggaggaggatgtgaccgcctccgacgccttcgtagccctcaccgaccgggatgaagacaacctcattatctccctctacgccatgcagcagggcatacccaaggtggtggccaagtccaaccgccagaattatgccggcatcgcccacgccgctgggctggacagcgtgatctcccccaagctgctgaccgccgggcagattcttcaggtggtacgcggtatgcagaactccaagggcagcgtcatgaacgccctctacaagatcgccgacggccacgccgaggctatggaatttgtggccaatgcaaccacccgaaaccgggacacccccctgcgagagctgcgcctgaagcctggcatcctggtcgccgtcctggtgcaccagggccgtatcgtaatccctgacggctcctcttccatcgccgctggtgacaccgtgatcgtcatatcccgcaaccacgggattctggatctcaacgacatctttgaggactcccttctggagctgggaggcgacgcatgaacttccgcctggtcttcaagttgacgggcaagaccctgctggtagaggcgggcgcgctgctcctccccctgctggtctgcctgttctaccgcgaaaatcccctccctttcctcctgtccattgccatgacgggagcggtggggctcgccctttccctcatacccagcaacgaccactttttcccccgggagggctttttcgctgtggccctcatctggctgctgatgagcgccttcggcgccctccccttctttttcagcggctttttcccctcctatgtggactgcttcttcgagtcggtctccggcttcaccactaccggtgcctccatcctgaccgcagtggagcccttgcccaggggaatccttttctggcgctccttcatgcactggatgggcggcatgggggtgctgatcctcaccatcgccctgctgcccagcctgggcggacggaccctgcatgtgatgcgcgccgagagccccgggcccattgtgagcaagctggtacccaagaccagccagtcctccaaaatcctctacggcatctactgcgccctcactctgctagaggtcttctgcctgcgaatcgccggcatgccgtggtatgacagcctggttcactccttcgccaccgcaggcaccggcggcttctccaccagaaacctgtctattgcggcctatgaaagccccgccattgaggtcatcatcacgctcttcatgctgatcttctccatcaactttgccctctacttcctgctgctctgcggcaaggtacaccaggcgctccgcagcgacgagctgcgcttctttctggccgtggtggctttcagcaccctcctgatctccatcaacatctggcccatgtatccggcggacggctccgccgtgcgccacgccgcgtttcaggtgggctcgattatctccaccaccggcttcgccagcactgacttcaacctgtggccggagttttcgcggattctgctggtgctgctcatgttcatcggcgcctgcgccggctccaccggcggcgccatcaagtgctcccgcgttctgctcctgctcaagtgcatccgccgggagatccggcaggtggtgcacccccgctccgtcaacgtggtcaagctggacggccgggtggtagatgaggacagcctgcgctccgtccagctcttttttgcagcctatcttttcatcgccctgggggccacgctgctggtgtcggtggacaacttctcctttggcaccaccttcaccgccgtagtctcctgcatcggtaatgtgggccccggactggagctggtgggccccatgggcaactactccgccttttccggcttctccaagctggtgctctccctgtgtatgctgatcgggcgcctggaggttctgcctgttctcgttctctttagcagaaatgcatggaagcgttcttaaaccaatcattcgtttttgtcgaaagcgtcaaatcctaggatttgacgctttcttatcttaagatatacttgccaaatcacccctttttgcgttaatattatattgtctcttaacgctggaagccttgtgttacaaggcttccaaagaaaaaaggagtggggaaagttgttggaaaacctgttttggttcggcttagtaggtgcattaattgcattaatcttcgccttaacccaagccaagaaggtgctcaagttctcagagggcaccgaactgatgcaaaagctggccgcatccatccgtaagggcgcaaatgcctaccttaagcgccagtatactaccgttgcaaagatctttatcatcgtcttcgtcattttgttgattttggcaagagtcgggatgctggacaactggtttatccccttcgccttcctgaccggcggcatctggtccggcctggcgggctttgtgggcatgaagattgccacctccgccaacgcccgcactgccaacgccgcccatgagagcctcaaccggggcctgaacgtggctttctcctccggcgcggtcatgggcttcaccgtggtgggcctgggcctgctggacgtgtccatctggttccacattctcaagtacatcgcagggtttgaggccgcccagatcgcccagaccatggtcatgttcggcatgggtgcctccttcatggccctgttcggccgcgtgggcggcggcatcttcaccaaggccgccgacgtgggcgccgacctggtgggcaaggtggaggccggcatccccgaggacgacccccgtaaccccgccaccatcgccgacaacgtgggcgacaacgtgggcgacgtggccggcatgggcgctgacctgtatgagtcctacgtgggctccattctggccaccttcgccttgggcgcctccgcctatgccgccgacggcctgacctggaacgccatgcttctgcccctcatcatcgccgtggtgggcgtggtgtgctccgtcatcggcaccttcctgatccgcaccaaggagaacgccactcagaagtccctgctggctactctgcgcaaaggcacctacaccgccgccgtgctggccgccgtcatcgccgcccccgtcacctattacatcatgggctcctggggcccttacatcgccattctggcgggtctggtggccggctgcgccatcggctatttcaccgagtactacacctccgacacctataagcccacccagggcctggccgactccaccgagaccggcgccgccaccaccatcatcggcggcatctccctgggcatgaagtccaccgccgcccccatcgtcatcatcggcgtggccatcatcgtctccttcctggccgccggcggttccctgaccaccaatgcggctaactatggcgagcttttctccaagggcctgtatggcatcggcatcgccgcggtgggcatgctgtctaccctgggcatcaccctggccaccgacgcctacggccccgtggccgacaacgccggcggcatcgccgagatgagcggcctgggcgaggaggtgcgcaatcgcaccgacgccctggactccctgggcaacaccaccgccgccaccggcaagggcttcgccatcggctccgccgccctcaccgccctggccctgctggtcagctatgtggacgtggtgaaggtcaaggtggacacgctggatctctccatcaccaaccccgccgttctggtgggcctgttcgtgggcgccatgctcaccttcctcttcgccgccctgaccatgagcggcgtgcagcgggccgcccagtccatcgtggtggaggtgcgccgccagtttaaggagatcgccggcatcatggagggcaaggccgaccccgactacgcctcctgtgtggatctctgcaccaagggcgctctgcatgagatggtggtcccctccctgctggccattgtagtgcccgtggtcaccggcctgattctgggcgcagaggccgtggtgggcctgctgggcggcgtcaccgtcaccggcttcgtggtggccgtgttcatgtccaacgccggcggcgcctgggacaacgccaagaagtacatcgagagcggcacccatggtggcaagggctccgactgccacaaggccgccgtcatcggcgacactgtgggcgaccctttcaaggatacctccggtccctccctcaacatcctgatcaagctgtgctccaccgtttccattgtgttctccggcctgatcaccagcatccatctgctgggctgaaaatcctgacctcagcgcgcggcatgccaaaacatgccgcgcgtttttttacattgtgacgattttggaaaattatacttgacaaactttatccaaaatgatatgttgtagccagaccaatcagaaaggagtggagcggctgtgattacccgcgaaaccgattatgccctgcgcctgctgcgcaccctgcgggatggggagcgccgtacagcggcggaggcggcggagcgggagctggtcccccagtcctttgcacacaagattctcaaaaagcttgccagggccggatttgtggaagtagcccgcggcgccgaaggtggctgtcgcctgtcggcagagctcaaccgggtcactctctacgacctgatgaccgctatgggagaggattcccgcctaagcagttgtatggatcccacctattcctgtccctggcgggccagccatggcggctgtacggttcactgccatctgacaggcattcaggaaaagctgaatgcggaactgaaggcccacactttggaggacattttgggtccggcagactgattttttcgcctacaaattggactaattttatccacttttaattatgtgtaaggaggaagcaacatgttgttccagacgacccaagcgcatgaacagttgcgcgccaagatccgcgccttcgccgaagaggaggtcaagcccatcgccttctccctggatcaggccaatgagtttccggccgaagccgtaaaaaaactgggggagctgggcctgatgggtatcccctaccccaaggagtacggcggcgcggggctggatgccattagctacgccatcgccgtggaggagctgtcccgggtagacggcggcacgggcgtgattctgtccgcccacgtgtcccttggctcctggccgatcttcgccttcggcaccgaggagcagaagaagaaatatctggtgcccctggccagaggtgaaaaaattggcgccttcggcctcaccgagcccaacgccggctccgatgccggcggcaccgagaccaccgccgtggacaagggcgaccactggctgctcaacggcggcaaaatcttcatcaccaacgcccccaaggcggacacctatgtggtctttgccgtcaccaccccggacatcggcacccggggcatctccgccttcattgtggagaagggctggaagggattcgagtttggcgaccactatgacaagatgggtatccgttcctcctctaccgctgagttgatctttaatgatgtgaaggtacccaaggaaaacctgctgggcaaggagggtgacggcttcaaaatcgccatggccaccctcgacggcggccgtatcggcatcgcagcccaggccctgggcatcgcccagggggcctatgagtccgccctggagtactccaaggagagggttcagttcggcaagcccatcgccgcccagcagtccctggccttcaagctggcggacatggccaccaagctgcgctgcgcccggttcctcatctactccgccgccgagctgaaggagcaccacgagccctacggcatggagtccgccatggccaagatgtacgcctcggacattgccctggaggtcaccaacgacgcggtgcagatcttcggcggcactggtttcctcaaaggtatggacgtggagcggatgtaccgcgacgccaagatcaccaccatctacgagggcaccaatgagattcagcgggtggttattgcctcccacctcatcggcaaaatctccaagggcagcggcagcggcagccgctctgtagccaaaaagcccgcccccatcaccggcgtgcgcaagcgccagcttttccgggacggagcgtccaaggacaaggtggccgccctggtggaggcactgaagaaggacggacacgactttaccgtgggcatccccatggacacccccatcaaccaggctgagcgggtggtctctgccggtaagggtatcggcgacaagaagaacatgaagctcattgagaacctggcgaaagctgccggcgccgcggtgggttcctcccgcccggtggccgagacgctcaaatatgttcctctgagccgctatgtaggcatgtcc

SEQ ID NO: 927 - DNA, 7356 bp, unidentified
  source 1..7356: mol_type = unassigned DNA
ctcggtatagggcaggtggaactggttgggagtgcagagcaccaccgcgtcccccacgtccagcagctcctccaggcggttggtcatccgtaccccgtcaagcccgtgccggacgcacagccgccggcagccctccagggtgcggctgcacacggcggcgacggtacagcgcccctcctgggccagaaagccctccacgtgccggtcggcgatggccaccgtggtgcccgcgccgacgattccaatccgaattcccatacgtccgctccttttttcagcttcactccatcatagcacggagcgggacgtttgcaaagcggtttcagcgcaggcggaacaggcggcgcaggtggatgccctgggcctggagggcggccaggtagagcacgccgccgaacagcaggcaggccagggcggcggggagagcttccaggccggcgcggcggagcacctggaacagaaggttgatcaccagccccatgagcagggcggagagggcgggggcggtgcaccactgaaaaatctgggcccgcaggccggtcgcccggcggacggcccaccagttgaggagtacccccagggcggcggaggcgagaaagcccgccacatagcccttgagccccacgccgggcaggcccatgaggaagaaggtacagccgagctgcaccacgccgcagaggatggagttgcgggcggcggcccccggacggcccacgccgttgagggcgctggcgaggacggactggtagcaggacaggagcaccccgacggacagggggagaatagagcggcccacggtgggttcccggaacagggcggcgcccagggtggggcccagcaccaccagaaaggccatggcggggaggatcagcaccgaggtggccagcatggagcggtccacccggtgctgcaccagacctcgctgccccagggcggcaccctcggccagcttgggcaccagcaccaggcccagcgccccgatgaaggcggtgggcaggcagagcatgggcagggtcatgccgcacagcacgccgaaggcgctcatggcctccgagacctccgcccccgcgtggaccagccgctgggggatgagcacagaggtggccgagcccatcaggttgcccagcaggctggtcagcccgatagggacggcgatggaggcgatgcggcggttgagctgccggtgctccagcggcgcgccggtcaggccgcccgcccggttcaggtgccgccgggccagcaggagcagggtaacggcggagaacagctcgcacaggatcatgccggtgacaatcagccccaccgtccgctccgggttctgggggagaaagaccaccagcagccccagcaccgctccggtgcggatgaactgttcacacagctccaccgccgccggcggacggatgttgcccgtgccgtagaagaagtgcttgtgcaggttctccaccccggtgagcaggatgcagggcagcaggagcagcaggcccagctgggtgcgggcgtcccccagcagatagaccgagatggggtcgtagagcaggaccaccaccgcagccaccgccgcaaagaggaggagaaacaccgccaggcagcggcggagcacctgggcgatggcggcccggttgcccctggcgtgatactgggaggagaggttggacactgccaccgtcagacccacggcggtgagggccatgatgacggagaacaccggcatgatgagctggtacagccccatgacctccgcgccgatcagccgggagagcaggatgcggtacacgaacccgagaaattgggagacgatactggtgcccgtgaggatcagggtaccgtagagcatagaggtacggtcgagtttcaaggcgcaccctcctttccctaaaccctattcaccacgggttgtcccccatacgcgggaaaatctttgacaaaacggccgcaagcgcgtatgataaatccattcatactttgtagtatggaagaaagggccaaccgtggcggccaaagtgatccatgtgccctgatgttccccagcagcgcgccggctctcctgttcaaacactacgggagggcaccgggcccagcataccgggccttccacgtgggcaaaggataccgccccatgttcctgtccctggccgatctgcctgtgcgggatgcgctgccggatctgcgggtatgggtggagaccgcccggctggcctgccatgaaaaaccggccggtttgctgattatcctgagagatctggggtggccttttcctgatttatgcatcctgaccacaaattttgataaaaaaataacgcttttttcttgcatttcacttgcctgttggcgtggaaagcagtatacttattaggaaggtttgtgttaaaaaaataacgattataatcgcaggctttgatattcgattaaggaggcagaacaaatgggatttgtgaagctggaaaagcagggccatgtgggcatcgtgacgatcgaccgtcaggaggccctgaacgccctgaacagccaagttctgagcgatctggacgcggttatcgaccaggtggcggcggacgatgagatctatgtgatgattctgaccggcgcgggccgctcctttgtggcgggagccgacatcggcgagatgaagggcttctcctcgatcgacggcaagaagttcggcgtgcacggcggcggcgtgttcctcaagctggagaacctgtccaagcccgtgattgcggcggtaaacggcttcgccctgggcggcggctgtgagctgagcatggcctgcgacatccgactggccagcgagaaggcccggttcggccagcccgaggtgggcctgggcattacccccggcttcggcggcacccagcggctgccccgcatcgtgggcgtcagcaaggctatggagctgattctgacagccaagaccatcaaggccgacgaggccaaggccatcggcctggtcagcgaggtctaccccgccgaggagctgatggataaggccatggagctggccaacgcgatctgcgccaacgcccagatcgccgtgtgcgaatccaagcgctgcatccgcatgggcatgcagaccgacatccacaccggctccgctttcgaggccgaggccttcggcgttacctgcggcaccgaggacaagaacgagggcatgggcgcgttcctggagaagcgggctgagaagcacttccagaaccggtaagcggtacatatgacgcctgtcatcgcaaacctgtccgaccaggtatggaatgttctgatcaaaccaatagaaaagaggttttttactatgaagaagattgtggtcatcggcggcggtaccatggggctggacatcgcccaggtatttgcccgcaacggctatgacgttgtggtgcgcgacatcaaggacgagatcatccaggccagcgaggcccggctgaacaagggcctggataagctggtgagcaagggcaagctggacgaggccaagaaggctgagatcctgtcccacatgagcttcaccaccgagctggccgccgctgccgatgccgatctggtggtggaggccgccatcgagaacctggacatcaagaagagcatcttcgcggagctggacagcctctgcaagccggagaccatcctggcctccaacacgtcctccatctccatcaccgccatcgcggcggccaccaagcgggccgacaagttcatcggcatgcacttctttaaccccgccaccgtcatgaagctggtggaggtcatccggggcacccacacctccgatgagacctacaagaccattgccgagctggccgccgccatcggcaaggagcccgttgaagtcaatgaggcccccggctttgtggtgaacaagattctggttcccatgatcaacgagggcatcgacctggtctacaccggcgtggccagtgtggagggcgtggacaccgccatgaagctgggcgccaaccaccccatgggccccctggccctgggcgatctgatcggcctggacgtatgcctggccatcatggacaccctgtacgacgagacccacgatcccaagtaccgcgcctccctactgctgcgcaagatggtccgcgccggcaagctgggccgtaagaccggcatcggcttctacgactactccaaaaagtaaacagggcagacgcagttccctatgcgagcaacgacgggcgggagcccctgactcccgcccgcccgttctgaaatataaatcttaggaggaaggcaacaaatggatctgcacctttccagagagcaggaaatgctccgcaagatgtaccgtgacttcgccgaaaatgaagtcaagcccctggccgagtgggtggacgagaacgaggcgttccccgaggagaccgtcaagaagatggccaagctggggatgatgggcatctatttccccaaggagtacggcggcgccggcgcggacgttctgtcctatgtcatggccgtcgaggagatgagcaaggtctgcggcaccaccggcgttatcatctccgcccacacctccctgtgctgcgctcccatctatgagaacggcaccgaggagcagaagaagtattacctgcccaagctgtgctccggcgagtggatcggcgcgttcggcctgaccgagcccggcgccggcaccgacgcccagggccagcagaccaccgccgtgctggacgagaagggggagaactggatcctcaacggctccaagatcttcatcaccaacgccggctacgccaacgtgttcgtgatctttgccatcaccggcgttaccaccgacaagcgcggccgcaagaagaaggagatctccgccttcatcgtggagcgcaccgaccccggcttctccgtgggcaagcacgagaagaagatgggcatcaagggctcctccacctgtgagctgattatggaggactgcatcatccccaaggaccgcctgctgggcaagcagggcaagggcttcggtatcgccatgaagaccctggacggcggccgtatcggtattgcctcccaggccctgggtctggccgagggcgccatcgaggagaccatcaagtacaccaaggagcgcgtccagttcggccggcgcatctcccagttccagaacacccagttccagctggctgacatgcacgccaagaccgaggcggccaagtggctggtgtactccgcggccatgaagaaggagaaccatgagccctacactgtggacgccgccatggccaagctggtggcggctgagacggccagcgacgtgacccgccgctgcgtgcagctgttcggcggctatggctacacccgtgagtaccccatggagcgcatgatgcgcgacgcgaagatcaccgagatctacgagggtaccagcgaggtgcagcgcatggtcatctccgccaacctgggcgtgaactaaaggaactggagggaaaattacgatatgaaatgcatcgtttgtgtcaagcaggtacctgatacctccggcgtggtggcggtgaaggaagacggcaccatggaccgcgcggccatggccaccatcaccaaccacgacgacctggctgcggttgaggccgcgctgcgcatcaaggacgccaccggctgcaaggtggttgtggtctccatgggccctcctcccgccgaggggatgctgcgtgagctgctggccatgggctgcgatgaggccgtgctggtctccgcccgcgagttcggcggttccgatacttacgccacctctcagattctcgccgccgccatcaagaaggtgggcgtggacgaggacgacatcgtgttctgcggccgccaggccatcgacggcgacaccgcccaggtgggcccccagatcgccgagaagctgcacctgccccaggtctcctatgtggcggagatcgcggtggagaacaaggccgtcaccgtgaagcgtctgctggaggacggctacatgaccatcaaggttcagacgccctgcctgctgacctgcgtgaaggagctgaacgacgcccgctacatgagcgtgggcggcatcatggagtgctacaacaagcctctggagatctacaactacgagactctgaaggacgatcccctcatcgacgtggataccatcggcctgaaaggctctcccacgaatgtgtacaagtccttctctcccccggtgaagggcgccggtatgatgatggagggcgccgacaaggcgaccgtcgagaagctggtctccatcctcaacgacaagcacatcatctgatagagtgaaaggagagcaacacaatggcttttgatagtaaggataccgccgccttcaagggcgtatgggttttctgtgagcagcgcgagggcgtgattatgtccaccagctaccagctcctctccgagggccgcaagctggccaacgacctgggcgtggagctgtgcggcgtggtgctgggcaaggacatcaaggaggactacctgaaggccctgggcggctacggcgccgacaaggtgtactactgcaaccacgagctgctggatgtctacaccaccgacgcctacaccaaggtcatctgtgacctggtggaggacaagaagcccgagatcttcctcatcggcgccaccaacatcggccgtgacctgggcccccgctgcgcggcccgcctgcacaccggcctgaccgccgactgcacccacctggacgtggacgtggagaagtacaaggccttcctgaagaccacctccaccatcgacgtggacaacaccaagttcgaggagaacaccaacctgaagatgacccgtccggccttcggcggtcacctgatggccaccatcatctgcccccgcttccgtccccagatgtccaccgtgcgtcccggcgtcatgcagacccagccctatgacgaggccggcgccgcgaagacggagatcgtcaacgtggacgtgaagctggacaagtccgacatccatgtggatgtgctggaggtcaagaaggccgccaagaagctggtcgatctgatcggcgccgacgtggtggtttccgtgggccgcggcatcagcaaggacgtcgagggcggcatcaagctggctgaggagctggcgggcgtcctgggcggcgtcgtgggctcctcccgcgcctgtgtcgacgcgggctggatctccgccgaccaccaggtgggccagaccggcaagacagtgcacccccgcatctatgtggccctgggcatctccggcgccatccagcacctggctggcatgcaggactccgagtgcatcatcgcggtgaacaagaacgagtccgcccccatcttcgacgtggcttcttacggcatcgtgggcgacctctacaaggtcacccccatgctcatcgaggccatccgcgccgccaaggccgcgaagtaa

SEQ ID NO: 928 - DNA, 7067 bp, unidentified
  source 1..7067: mol_type = unassigned DNA
atggacactcaacaaatagatgttatggtagccgacgcctcacatgaggtttacgttgacactattttggaaactatcagaaatgctgctgccgtacgaggaaccggaatcgcagagcgcacacacgaatacgtagcgactaaaatgaaagagggcaaagcaataatcgcgctctgtggcgacacattcgcaggtttcacctatatcgaatcatggggaaacaagcaatacgtagcaacctccggtctgattgtacatcccgattttcgcggattaggattggcaaagcgcatcaaacaagcatctttccaactggcacgtctccgatggccgaaagctaagattttcagtctgacatccggagccgcagtgatgaaaatgaacaccgaactaggatatgtccccgtcactttcaatgaactgacagacgacgaggctttctggaaaggatgcgaaggctgcaccaaccacgatatactggtagctaaaaaccgtaagttctgcatctgcacagccatgctgtacgatccgacagacccacggaacataaaaaaagaacaagaaagaaataacatttaatatatacagcactatggaagaaaagaagaaaaaagtagtggtggcattcagcggcggactggacacatcgttcaccgtcatgtacctcgctaaagaaaaaggttacgaagtatatgcagcttgtgccaatacgggcggtttcagcgaagaacagctgaagacaaacgaagaaaacgcctacaaactgggagcagtgaaatatgtaacattggacgttactcaggaatactacgaaaagagtctgaaatatatggttttcggaaatgtgctgcgtaatggtacttacccgatctccgtcagctcggaacgtatcttccaggcattggccatcgcacgttatgccaacgaaatcggtgcggatgccattgcccacggttctaccggagcaggtaacgaccagattcgttttgacatgactttccttgtactggctccgaatgtagaaatcatcacgctgacccgtgatatggcattaagccgtcaggaagaaatcgactatctgaacaaacatggtttcagtgcagactttaccaagctgaaatactcttataacgtaggtttgtggggtacatccatctgtggtggcgaaatcctcgactccgcacagggattaccggaaacagcctacctgaaacatgtggaaaaagaaggcagcgaacaactccgtctcactttcgaaaagggagaactgaaagctgtcaatgacgaaacattcgatgatccgatccaagctatccaaaaggtagaagagatcggtgccgcatacggtatcggacgtgatatgcacgtgggcgataccatcatcggcatcaaaggccgtgtaggtttcgaggctgccgctccgatgttgattatcggtgctcaccgcttcctcgaaaaatacacattgagcaaatggcagcaatactggaaagatcaggtggccaactggtacggaatgttcctccacgaaagccagtatctcgaaccggtgatgcgtgacatcgaagccatgcttcaggaaagccagcgtaacgttaacggtacggcaatcctcgagctccgcccgctttctttctctaccgtcggtgtagaatcggaagacgacctcgtgaaaacgaagttcggcgaatatggtgaaatgcagaagggctggacagccgaagatgctaagggctttattaaggtaacttctactccgctgcgtgtttactacaataaccataaagacgaagagatatgattaaagcaggaatcattggtggcgcaggatatacagcaggcgaattaatccgtctgctgctcaaccatccggaaactgaaatcgtattcatcaacagcagcagtaatgccggaaaccgaatcaccgacgtacacgaaggactatacggagaaaccgacctgagatttaccgaccagttacctctggacgcaatagatgtactattcttctgtaccgcccacggtgacacgaagaaattcatggaaagccacaacgtgccggaagatttgaaaatcatcgacctctcgatggattatcgcatcaagagtgacgatcatgacttcatctacggtctgccggaactgaaccgtcgtgctacctgtacggcgaagcacgtagccaaccccggttgttttgctacctgcatccagttaggtttgcttccgctagccaagaatctgatgttgacaggcgatgtttcggtcaatgccatcaccggaagtaccggtgccggcgtgaagcccggtgctaccagtcatttcagttggcgtaacaataacatcagcatatacaaggccttcgatcatcagcacgtgccggaaatcaagcaatcactgaagcagttgcagaacagcttcgattcagagatcgactttattccttatcggggagatttcccgcgcggcatctttgccactcttgtcgtaaaaacgaaagttgcactcgaagaaatcgttcgcatgtatgaggaatattatgcaaaagactccttcgtgcatattgtagataagaatatagacttgaaacaagtcgtaaataccaataaatgtctgatacatctggagaaacatggtgacaaattactgattatctcctgtatcgacaacttgctgaagggtgccagcggacaagcagttcataacatgaacctgatgttcaacctggaagaaaccgtaggattacggctgaaaccttccgctttctaaaaacagaagaattatgaaattattcgacgtatatcctttatatgacatcaatatagtcaaaggacaaggctgtaaagtatgggatgagaacggtacggaatatctggacctctacggaggccatgccgtcatctccatcggacacgcgcatccccactatgtggagatgatcagcaatcaggtagcaacccttggtttctattcaaactcggtgatcaataagctgcagcaacaagtagccgaacgattgggaaagatttccggttatgaagactactcgctgtttctgatcaacagcggagccgaagccaatgaaaacgcgctgaagctggcttctttctataacggacgcaccaaagtcatttctttcagcaaagccttccacggacgtacatcccttgcagtggaggctacgaacaaccccaccatcattgctccgatcaacaacaacggtcatgtgacctatctccctctgaatgacatcgaagcgatgaagcaggaactggcgaaaggtgacgtatgcgctgttatcatcgaaggaatacaaggagtgggcggtatcaaaataccgactaccgaatttatgcaggaacttcgcaaggtttgtaccgaaaccggaacgattctgattctggacgaaatccagagtggatacggccgtagcggaaaattctttgcccatcaatacaaccatatccagccggacatcatcaccgtagccaaaggcattggaaacggattcccgatggcaggtgtactgatcagcccgatgttcaagcccgtctacggacaactgggaactacattcggcggaaatcacctggcctgctcggcagcccttgccgtaatggacgtcatcgaacaggacaatctgatagaaaatgcaaaagcagtcggcgactacctgctggaagaactcaagaaattcccgcaaatcaaagaagtgcgcggacgcggactgatgatcggactcgaatttgaagaaccgatcaaggaattgcgcagccgcctcatctacgacgaacacgtatttacgggagccagcgggacaaatgtactccgcttattgccccctctctgcctcagcatggaggaagcggacgagttccttgcccgtttcaaaagagtactctaactgatatttgattaataaacagcgaacaaaaaagcagcctcgaacagaaaaacagttcttattcaggctgctttttgttttttcgcaatttaccgttacctttgtctgtaagaatacattaaaaaagaagcgcatatgaaaatagctattatcggtgcaggaaacatgggtggttctatagcccgcggcctggcaaaaggaagtctgatagcagactcagatatcattgtatccaaccccagcgcaggcaaactggagaaactgaaagaagaatttccgggcatttccaccactctgagcaatacggaagcggcaacgggagcagatgttgtcattctcgccgtgaagccctggtttgtggagtccgtcatgcgcgagctgaagctgaagagcaaacagacgctcgtatccgtagcggcaggtatcagctttgaagaactcgcacactttgtgatagcaccggagatgccgatgttccgcctgattccgaacactgccatcagcgaactggaaagtatgacgcttatcgcagcacgcaacacgaacgatgaacagaaccagtttatgctccgcctgttcaacgaaatgggaatggccatgctcatccccgaagataagatagccgccaccacggcactgacttcctgcggcatcgcttacgtattgaaatacatccaggcagccatgcaggccggcatcgaaatgggcatccgtcccaaagatgcgatggaaatggtagcccagtccgtcaagggagccgccgcattaattctgaacaatgacacccaccccagcgtagaaatcgacaaagtgactactccgggcggaattacaatcaagggaatcaacgaactggaacacaacggatttacctccgccgtcatcaaagcgatgaaagcatccaaataataccgcaaaattattaataatcaaaaaacaaccacttgtatgaatgaccaaattaaacagatcgcagaacgccttcgcggattacgtgacgtactggaactaacgtctgaagatatcgcccgcgactgcgacatatctgccgaagaataccggctcgcagaaacaggacaatacgacatttccgttagtatgctacaaaagatagcccgtacctacaacatcgcactggatgctttgatgtttggcgaagagccgaaaatgaacagctacttcgtgacccgtgccggcaaaggagtcagcatcgaacgtaccagggcttacaaataccagtcactggcgtcgggcttcatgaaccgcaccgccgatcctttcatcgtcacggtcgaaccgaagggagacgatgagccgatccattataaccaccacaacggacaggaattcaacctggtggttgaaggccgtatgcttatcaacatcgagggcaaggaaatcatcctgaaccaaggagacagtatttattttaattcaaaacttccacatggcatgaaagcgctcgatggcaaaacggtacgttttctggccgtaattatgtaataacgttatggtagaaagatttttagcacagactagctttgcctcacaagaggatttcatcaagaacctgaaaataaacgtaccggagaatttcaacttcggctacgacgtagtagatgcctgggctgccgaacaacccgacaagaacgctctgctctggaccaatgaccaaggcgaaagccgtcagttctccttcgccgacatgaaacgctatacggacatgacggcctcttacttccagagcctcggcatcggtcgcggagacatggtgatgctgattctgaagcgccgctatgagttctggtacagcaccatcgccctgcataagctgggagcaacggtgatccccgccactcacctgctgacaaagaaagatatcatctatcgctgcaacgctgccgacatcaaaatgattgtggctgccggcgaaggaatcatactgcaacacatcaaagatgctcttcccgagtgtccgagcgtggaaaagctggtcagtgtaggtccggaagttccggaaggattcgaagatttccatcagggaatcgataatgctgcccctttcatccgcccgagacatgccaatacgaatgacgacatctcactgatgtacttcacttccggcactaccggcgaacctaaaatggtagcacatgactttacgtatccgttaggtcatatcgttacgggtagtttctggcacaatctggatgagaacagcctccacctcaccatcgccgataccggctggggaaaagccgtatggggaaaactctacggacaatggatcgccggagccaacattttcgtctatgaccacgaaaagttcacgcccgcagctattctggaaaagatacaggagtatcaggtgacttccctttgcgcacctccaaccatcttccgttttctgattcatgaagacctgactaaatatgacttgtcttcactgcggtattgcaccattgccggagaagcactgaaccctgccgtattcgaaaccttcaagaaactgacaggcatcaagctgatggaaggtttcggacagacggaaacgacactgacagttgccaccatgccttggatggaaccgaaaccgggaagcatgggactgcccaatccgcagtatgacgtagacctgatcgacagtgaaggtcgctccgtggaagccggagagcaaggacaaattgtgatccgtaccagcaaaggcaaacctctcggacttttcaaagagtactatcgggatgcagaacgtacacacgaggcttggcacgacggcatttactacacaggtgatgtagcatggaaagacgaagacggatacctttggtttgtaggacgtgcagacgacgtaatcaagagttccggttaccgtatcggcccgttcgaagtggaaagcgctttgatgacgcaccctgccgtcatagaatgtgctatcaccggagtacccgatgagattcgcggacaggtagttaaagctactatcgtattgtccaaagactataaagcacgtgccggagaagaactgatcaaggaattgcagaaccacgtcaagaaggtgactgctccttataaatatccgcgtgtgattgagttcgttgacgaactgcccaagactatcagcggcaagattcgtcgcgtggaaattcgcgagaacgatgagaaataa

SEQ ID NO: 929 - DNA, 9641 bp, unidentified
  source 1..9641: mol_type = unassigned DNA
ttatatggagccgtgctcgcaggagtaaacgtgtacgtccccgcgccgtaaaaatcccatcgacgaccagaacgcctgccccgcctgattatcggaaaacacgaaaatatgcgttttatcgatgccctcccttttgagcccttccagcgcttcctgggccatttgccttgccacgccgtgcctgcggtagccgggcagtacagccatatgatggagaaatccgcgccgcccgtcatgtccggcgagcaccgcgccgatgattttcccgtcctcttgcgcgacgacgctcaaaccctcgttgcgctttaagtaacggcagatttcttcccgcccgtccgatttcgacagcgcgcgctttgaagtcacctgccacatggcgcggacttcattataatcgttttccttcattttcctgatggtcatagggtacctcttttttagtaaaacatcgtgccgatgccctcgtcggagaacatctcgattaaaatggagtgctcaatcctgccgtcgataatatgcgcccgcttgacgccctgccgtacggcctcgacgcagcaatcgattttaggaatcatgccgccgcttatgattttttcccgcttgaggctcgggacgtcgctgacgttgacaacaggaatcagcgtgctttcgtcttccctgtcgcgcagaaggccgcggatgtcggtcatcaggattagcttgcacgcgccgagcttcgccgcgatgctggccgccgcgatatccgcgttgatattgtaaacctcgccatggtacccgcccgcgatggtcgagattatcggcacatagcctttttcaatcgcgtcttcgattacgccggaattgacctctgtgatttcgcctacaaagcccaaatcctcagctgaagccagcttttccgccataatcatgcgggagtcgagcccgcaaaggccaagcgccctgccgccatgcccctcaagctgctggacaagccccttgttgaccttgcccgcgagtaccatctggacgatttcgacagtctcttcgtcggtgacgcgcattccgtttacgaatttgctttccttaccgacctttttgagcatttcgctgatttccggaccgcccccgtggacgagcacaacgttgatgcccacaagctgcatcaggacgatatcgctcatgaccgcgcttttaagctgggggcttatcatcgcgttgccgccgtattttacgacaatcgtctgtcccgcaaatttttgtatgtacggcagcgcctgtatgagcacctgggctcgcttttcgcttgttatatccataatagttcctcccggaatcagattatccattctatcttttacggccgttataaagccatcaattctttccttattttttcatcgaacttttccagcgcatagcggaaagcggttctcggcatttctttatggcgcagggccaggtattctttcacagattccatatctgccgttgataagcatttcagcatccagccatagcccttttgaacaaggtcatgcccgtcatacataagcaaatcgctaatttgatatgggtaaaggccctcataatcgttatgtaaaatcgcggggattagtattacggcagaagcgcgccgtacccaaaaatccttgtccgccgtccaatcggttatttttgcaaacagcgatttatctctttgtaataaagcgccaaacgcgtgcgtacagaaatcgtcacagtcgccccagccccgtacataccttttcagccagctataaaaaacatcatatgtagcttcgttatattggcctcttacccggaacgcccagtcatacgctatcacgcctaacgcccagctttgctgttccagcagctcttcgcagagggccaggacattccctattgttttatcttccagttcccgaaacagcttggcagacaattttctgatatcgcctgtaatgatatgcttcccttgcggaacagcggacgcaagcttttcaatttcctccattgcccggaggattatttcattcatattttctgtctcctataaagtatacacatgacaggtaaaaggcggccgccgcatatctaagctaagtaagggcgcggcagtcccggtatacgccaatttactgaaaagtcggctcaggtgcggtagtcgccgtttattttaacataatcatacgtcaaatcacagccgtaggcctccgcacaggatgaaccgtcgtttaaggatacctcaatggtaatttccttttcgctgagaatctcttttgccttatcctcagaaaattcaattcccgcgccgtttttgcagacgggaagcgttcctttgccggaggcaaacgccacatctactttatggatatcaacgtcacagccgctgtagccgatggcgcacagcaccctgccccagtttgcgtccgcgccgaacatagcggccttgagcaagctcgagcaaatgaccgttttcgcaacgccctttgcgtcctcctttgtctttgcaccggtgacggaacagacgagaagcttcgtcgcgccctcgccgtcccccgcaagcattttggaaagctttttgcacagtgctgtcagcgcctgcacaaaggccctgtaatcttcgttcttttctgtaatttcggcgttgcccgccttgccggacgccataatggtgagcgtatcgtttgtggaggtgtcgccatcgacgcttaccatattataggaatccccggctgcctccttgagcgcttcataaagcatgccggaggaaaccgcggcgtcggtcgtcaggaagctcagcatcgttcccatgttgatatgtatcatgccgctgccctttgcaatgccgccgatggttacggttttaccatccagggtaagcacggcggccgcttcctttttgacggtgtctgtcgtcatgatggcttccgccgcgtcggtaccgccagctttggagagatgggcaaaaagctcatccgctttattttcgattggctcaatcggaagaacctggccgattacccctgtagaagcgacaataacgtcttcgggaacaatctgaagcttttccgccgcaatttcacacatacggtttgctttttccataccgtctgcgttgcaggtgttggcgttgccgctgtttgcgataaccgcctgtgcccttccgttttttaaatgttcctgtgtaacaagaaccgcggagcttttgactaagttttgtgtgtagacgcccgccgcgctgcagggtacgtcgcaggcaagcagcatcaaatcacgcttcgtatggttattcggtttgatggaacagcatatacccgccgccgtaaagccctgcggggttgtgaccgtcccgtctatcagctgataaggcataatatcctcctaaagccgccgcgcgttaaaaagcaggcggcacaatttcgagccctgttttttcgtcgagcccgaacacgatattcatattctgaacggcctgccccgccgcgcccttgaccatgttgtcgatggcggaaacggcgatgagcctgttcgcgcgcgtatcgatatgcagcgaaatatcgcagaagtttgagtatttgatgtcgtggatgtccgcgtacgcgccgtcgggcaaaagccggacaaaatattcatcatggtaaaattcctcgtaggcagccctgattttttctttcgtcgcgccctcgcttaacattgcgtagcaagtggaaagaatgccgcggtttatcggcagcaggtgcggtacaaaggtaatcgtcacattttcgcccgcgagatgggaaagcgtttgctcgatttccggcgtatggcggtgggccgccaccttatatgggtggaacccttcgttcaaatcgggataatgcgtgttctgggacagccccctgcccgcgcccgttacgcctgatttgcagtccgctacaatacctttggcggagataagcccagcgctgattgcgggggcgagcgccagcggcacgcccgtcgtatagcagccggggttcgctattgtttttttgccctttatctggtcgcggaacagctccggcagcgcgtacacggaattcctgtgcagctccttgtccttatactccccgccgtaccattccttatagtcgtcctcgttttccagcctgaagtccgcgccaaggtcgataaagattttttcccgctcgtaacattcctttgcgatgtcctgggaaagcccgtgcgggagcgccgcgaacaccacgtcgcttttatctatcacatcctgcgcggttgtgcaaaccatatcgtttagccggcggtatgcgggataaacggaagaaaccggctttccttcaaaagatacggagctaatcgcggcgatttccgcctgcgggtgctgcatgagcaggcgcacaagctccgcgcccgcgtaacccgtcgcgccgatgattcctgcttttatcataaaaggtctccccttctgttttccttagttactgaataatctgcccagcggcagagcgcgcccgcttccgcgtcctttgctctatcggccagccattattgcaaagccttacgtacctttgcggcctgttcaagcacgtttttggtagcggggccgccgtatgccgcgcgcccgttgacgcacgcctccagcgaaatcgcgtcaaaaacgccctcgtcgaacgtaccgcatacctttttatattcctcaagcggcagcgtttcgagcgtcagccccagttcgatgcactttgcgacgagcgttcccgtcgccttatatgcgtcgcggaacggcaggccctttttaaccaggtagtcggcgcagtcggtcgcgttgataaacccgcccgcggcggcacggcgcatattttccggcagcaccttcatggtgtctagcatcggggtaaaggcagtcaggcacatcctgaccgtgtcaaccgcgtcgaaaatggcctccttgtcctcctgcatatccttgttgtatgcaagcgggatacccttcatgacggtaagcagcgtcatcaaatccccgaatacgcgcccggattttccgcgcacaagctccgcgatgtccgggttctttttttgcggcatgatgctggagcccgtcgaaaacgcgtcgtccagctcaatgaacttgaactcccatgaacaccacatgatgatttcctcggaaaagcgtgacaggtgcaccattacgatggaaagcactcccgccagctccatacagaaatcacggtctgaaacgccgtcgaggctgttcatggtaatatctgaaaaatcaagaagctttgccgttaccgaccggtcaatcggataggtggtgcaggcaagcgctcccgagccgagcggcataacgtccatgcgccccctgcaatcttgaaggcgcgacaaatcgcgcatgagcatctgcgcgtacgccataagatgatggccgaaggtaatcggctgtgcccgctgcaaatgggtataaccgggcataacggttgcggcatactgctccgccttgtcacagatgaccattacaagctccttgagcagggcctcaatgcgtccgcattcgtttttaagcgtcatttttatatcgagcgccacctggtcgttgcggctgcgcgccgtatgcaggcgcttacccgtatctcccaggcgagcggtcagctcgccctcaatgaacgtgtggatatcctcggcctgagggtcgattgcaagcgtgccggactcaatatcctttaaaataccagagagcccttcgcagattttctccgcctcgcttttctcgataatgccgcactggccaagcatggcggcgtgggcgatgctgccttctatgtcctctttatacatgcgctggtcaaacgggatggaggaattgaaatcgtttgtggttttgctgatttccttctgaaaacgccctgtccaaagcttcaatgaaattcacctcataaaatcagtacacggggcggagaaagattcgtccgcccctgtaaatgttgatattttattttctgatggagtaattttgcgccggctgccatccggcgtaaacacaaaatgcggatatgtcaaacgccagcagcaaaataacgtgaaaaaattatttgattaagccctttttcgcccgcaccttaatcggcaggccgaacaggttgataaacccagcggaatcgttctggtcataaacctcatcctcgtcgaaggtcgcaatttcctcatcatagagggaatacggggaggttacgcccgcgtccatgatatttcccttgtaaagctttaattttacgtcgcccgtaacggtttgctgcgtgctgtcgacaaacgcggaaagcgcctcccttaaaggggtgtaccactgcccatagtaaacaagctccgcaaaacgggttgccacggtttccttataatgctgtgtatcgcggtcaaggcagatttcctcaagcttgctgtgcgcggcgtaaaggatagtgccgccgggcgtttcgtacacgcccctggccttcatgccgacgagcctgttctctaccatatcgacaatgccaacgccgtttcttccgccgatttcattaagcgtcttgacaatggaaaccgcgtcgagcttctggccgtttacggcaaccggctcgcctttttcaaacgaaaccgtaacatactccggcttgtcgggcgcctgctccggtgatacgccgagctcgaggaaccccggctcgttatacttcggctcgttcgccgggtcctcaaggtcgagaccctcatgcgaaaggtgccagatgtttttatccttgctgtagtttgtttccctgttgattttcagcggaatacccttctcctccgcgtaggcaatctcttcctccctggatttgaactcccacgtcctccaaggcgcgataatcgtcatatccggagcatacgccttaatagcgagctcaaaacgcacctggtcgttgcccttgcccgtacagccgtggcagatggcgtcggcgccttccttaagcgcgatttcgacaatcctcttcgcgataatcggccttgcaaacgacgtgcccagcaggtacttaccctcatacacggcgcccgccttgagcgtgggccatacgtattcctcaataaattccttgttcaggtcttctatgtaaagctttgacgcgcctgtcttaatcgccttttcctcaaggccgtcaagctcggtaccctgcccgacatcgccggacacggcaatcacctcgcagttgtcataattctccttgagccacgggataataatagacgtgtcgagcccgccggaataagccaatacaaccttttttatcttcttttccataataaattcctccgtatctaaaatataagctgattttctgttaaccgtatggctatcattatacaccccttatgcaaaaaatcaagtcttttatgtataattattcaagataaagcgtttttgtagccctcaacaaaaagacaacgaattgcggcggcggaactatacaaattatgggaaagctttcaattgcgccgctgcctatatttttattccgaccgcataacgtaaagccgccgccaggcggaaaccgcgcccgagtgcatattatgcataattttttgtatattatacacatcggtgctataatcagcataaactgaatcgaccaaaatcatacttggagggactgcaaatgaaaggctttcaggaaatcagctgcagccagctgaaagacaacccctttacgctcatcggcaaggactggatgctcgtcaccgcaggcacggaagaaaaatacaacaccatgaccgcaagctggggcggcgtcggttttttatggaacaaaaacgtcgcgtttacgtttatccgcccacagcgctatacgctcgaatttgtcgaccagaacgaatattacacactttccttttatggggaggaaatgcgtaaggcgctgtccttctgcggctcgaaatccggcagagattacgataaggccagggaaacggggcttgtgcccgtatttgacgaaaaagcgccgtactttgagcaggcgcgcctggtgcttgtctgccgtaagctttataagcaggacttttcacccgcctgctttatcgaccagtcgctcgattccaattataaagataaagactaccacaaaatgttcatcggcgaaatcgtgaaggtgctggttaaaaatggctgacctataccggcggaggaagtgcaaatggaaaaaaccgtactcattacgggcgcgtcgcgcggaatcggcgcaggctgcgcccagctttttgcgaaacacggctacaatatagcggttcactataataaaagtgaaaagcaggcgctgcagataaaggcgcacgcggagtccttcggcgtactcgccgcggcattccaggcggatgtaagcgacagcgcgcaggtaaaccggatggtagcagacgtgcttaaaacgtttgggcgtatcgatatcctcgttaacaacgcgggcattgcgcagcaaaagcttttgccagatattacggatgaagactggcagcatatgctcggtacgaatttaagcggcatgttctactgctgccgtgcggcgcttccccatatgatacgggagcaccggggctcaatcgtcaatattgcgtccatgtggggtatcaccggggcgagctgcgaggtacactattccgcggcaaagggcggcgccgtcacgatgacaaaggcgctggccaaagaggtcgcgcccagcggtatccgcgtcaactgcgtctgccccggtgtaatccaaacagaaatgaacgcgcagctgtccggcgacgctttggatgaactcaaggcagaaacgcccctcggccgccttggcctgcctctcgacgtggcaaaggccgtctgctttctggcggaggacgagtattcttcctttatcaccggccaggtattgagtgtagacggagggtttgccgtttaaaacaaggcgccccagcatatgttaaaaaaacaaggccatccggctttctcagaaccggatggccttgtttttcattctgctaaatgaagtattgcgctgtttatcttctgtatggctgcgaaacatccgtaagccccagaatataatcggtacttaccttataaaacctggccagggaaatcagcatttgtgcgggcgtatcctgttcgccccgttcacagcgggcgtatttatccgcttttacatttataatcgatgcaatttggttataggtaaggcagcgcattttgcgtatttccctcatcctttcataacggttcattttttcgcctcctttccaagccgcccgcggcttctctctgccatttaatttttactgacatttaattttactgaaatataaatgggcagattccctgttattttgagatttccacccctcgattttacaccatttcttttttcatacgtgaatttcacttaaaaagtcataagcgatatccacttaggcgataattgtacaggggtgtcgccatgagattaagaatcagagatttaagagaagaccgcaatctgcagcaaaaagatatcgccaaatacttgaacgttcatcaaacgacgtattcgagctatgaaaacggaaagctgaatttgccgatcagcgcgctcgacaagcttgccgatttctacaatacaagtacggattatttgatgggccgtaccaacaacccggatccgtatgaatag

SEQ ID NO: 930 - DNA, 27961 bp, unidentified
  source 1..27961: mol_type = unassigned DNA
tgctcggttccttgtacgagcacctcgtccttgactttttcgtccagtttcgtgccgagcgtaacggtcgtcagcgactgcgtttcaccgcgggtgaagatcgccgagccgtgggctgcgggcaggtagcccacctcgcaccagatcgggcggatctcgtcggtcttgcggccgtcgaggcggacgccttcgtcgaggatcatgttgcgcatggccctcttctgcacgtcgtcgtggaaatatttgtggatcagcggggctttctcgaccagctcctcctccgaataacgggctgcgaactcggcttcgagggcgttgaacttgtcctcgcgctcgtgtttcatcgtgccgctcgtggcgatggcgtaagccttgtcgtaaagttcccggatgatcgtctggcggagttcctcgtcgttgacttcgtggcagtaggtgcgtttcacgtccttgcccagctctttcgaaagctcgatctgtacggcgcagtgtttcttgatctcctcgtgcgcaaacttgatggcgccgagcatcacctcttccgaaacctccttcatctcaccctcgaccatcaggatgttgtcgatcgtaccgccgaccatgatgtccaggtcgcattcgggcatctccgaataggtggggttgatggcgtattcgccgttgcgtcgtacgacgcggacctccgagatggggccgccgaagggaatgtccgatacggcgagcgccgccgaggcggccagaccggccagcgcgtcgggctgaatatccttgtccgccgaaatgagggtgaccgtcacgtagacttcggcgtggtaatccgcggggaacagggggcggagggcgcggtcgatcagccgggcgacgaggatctcgctgtcgttagcacggccttcgcgcttcatgaaacctccgggatagcggccgatggaggcgtacttttccttgtactctacctgcaggggcatgaaatcggtgtcgggttttgcgtcctttgcggccacgacggtaccgagcagcatcgtgtcgcccatcttgacgacgaccgagccgtcggcctgcttggccagtttgcccgtttcgatctcgatctggcgtccgtcggccagggcgatcgttttacggactgcgttgtacagcttcttttcttccataaaaattttaaacctatagtgttttcgaattgtttttcgcaacgaaaatgaaggcaacccctctcgggaattgccttcatttcttcctcgggattacttgcggagattcagcgtcttcacgattgcgcggtagcgctcgatgtcgacctccttcaggtattccagcaacgcgcggcgcttgccgaccaggcgcagcagtgcgcgctgggttccgaagtcgtgcttgttgcttttgaggtgttccgtaaggtggctgatacggtaggaaaacaacgcgatctgactttcgggcgaacccgtgtcggtgttagacttgccgtactggccgaaaagctcctgctttttctcagctgttaaataagccattgtgtaaatttatttacgttccactctacgacgcatcccccttaccgtggataacgccagagcgttccgcaaaggtaggaaataattcataattcataattcataattcacaattattttcaatttggcgtctaaaaataacaaattaatcgggaaaatcgtatttttgcggctaaacaagtgaaaattatggggaaaacgggtgtgcgcggaactttcgccgcgcttgtcgccgcggcgctgtgcggctgcgggagcgggccggatttcgtcaccgtcgacgggacgatgctcggcacgacgctgcatgtggtggccgacgtgaagggtgtctcgcagcagcggctctatgcggccgtcatggagttggaccgcgaggccaaggcgtcgatgtcgatctacgattcgacgtcgctcgtgagccgcctgaaccgcaacgaaaccgacagcgtcgaccgccacatcgccttcaacctgcatctggccgacagcatcggcgcgttgagcgacgggcgttacgacgtgaccgtcaagccgctggtcgaggcgtggggtttcgccgggcgggagcgtgccgataatccgaatgtcgattcgattctcgcattcgtgggtcgcgaaaaggtccgcgtcgaaggcgggcggctggtgaaggacgacccgcgcgtgcagctggatttcaactccgtggccaaaggctatacggtcgacctgctggccgcgctggtcgagaaatacggggctgaaaactacatcgtcgacatcggcggcgaggtccgctgccggggactcaaccggcagggcagggcgtggcgcatcggcgtcgaaacgcctttcgacggcaacatgtcggacggcgaataccttcagaaacggattcggatgaccggcggcgggctggccacctcgggcaactaccgccggttctacctcgacggggagggcaacaaggtcgcccacaccatcgacccccgcacggggcgcagcgccctttcgcgcctgctgtcggtgaccgtcgcggccccgacctgcgccgaggccgacgcgctggggaccatgttcctggcgatgggcgccgacgatgcgctggcggccgcggaacggatgcccggcgtgaaggcgtacttcatcctggcgggcgacggcggggagtacgaggagtacgtctcgccggccatggaagcgttgattctgaaatagcgagataaatgaaaacagcggtattcctctacaatcccgaatcgggcaagggaaagatcgcccgcaacgtcgggtgcatcagtacgatttttcaggcctacggctacgacgtcacgccgcagaagatcgactttacggccaatccgttcgacggcaacgagacaatcgacctgatggtcgtcgccggcggcgacggcacggtgaactatgtggtcaacgccatgaaacgcaagggactggacattcccatcggcgtgattccggccggtacggctaacgatttcgccggggcggtcggcatgtcgcgcgagccgctcgaagcggcgcggcagatcgcgtcgggcgtcgtcgagagggtcgactgcgggcgggtgaacgacctgtatttcgtcaatatcttttcgttcggcatcttcacgaccacctcgcagcgcacgcccgacgagcgcaagcacaagatcggcaaactggcctatatcatcgagggggtcaaggagttccgcacgatgcacgccgtgccgctggagatcgaggccgacggcgagcgattcgacctgcggtcgctgatggtgctgattttcaacggcgagacggcgggcggtttccacctggcgcggcggtcgtcgatcaaggacgggctgttcgactgcatcctgctggagaagaagaacttcttccgttcgacgctggccatgtgccgctacctggcgggaggcagtccgaagatcgtccgccatctccgggcgcagcggatcgacatccggtcgtcggtcaacgaacccacggacgtcgacgggcagaagggagccgaattcccgctgcacatcgaatgtctggcgggcggcctgcgtgtgatgtgcgccaaacagacctcgggcaattcctgattttgggcgtccggcccgtattccggccgctggtccggttgcaggcgccgaacccctcccgcgggctgggcttgggcttgggccggacggacttatggcgcgaaaacaggcgccatgactgctgtggcggctcggcaatccgcaggcggttgtcctgccgtccgcagccgtgcatacggcggaacgcagcggcgacaacgttcggaaaccgggaagtttttttatttccgcacttgcgattttaagcggtaattgttacttttgtcggaaaaactacgacgatatggcggataacggcaaaacggcgcgcagcggaggacgcgaaagtttgcgcaaagtctccatctcccggatcaagaaggagatgagcgacgtcttttacctctcggacgatctggtgatctccgcactcacggccgacaagaacaccacggccgactatccgacctcgatcgacggttttacggccatcataatgatggcgggcgaggccaccgtgtcgatcgacatgcagaattacagcatcaaacccaacacgatcgtctttttcaaccccgattcgatcatccgcacggtcaaatgttcgtcgaacgccgcggcttacctgttggccttctcgaaatcgttcgtcaacgagatccagatcgacctctcgacctcgctgccggtctacatgcgcttcggcaaggctcccgtgctggaggtcacgccgcaggacgtggacgaaatccgccagttgttccagctcatcaagaccatgctgcgcagcgacaaggagcgttaccgccacgagatcatccgcacgctcttcaccacggcgttctacatcatcaccgagatcaaccagcgcgagcagcccggcgagatgaagcagggacgctgcgaggtgctgttcgacgagttcatgtcgctcctgcagcagtacaacaagaaggagcgcaacgtgagcttctacgccaggcagctcaatatcacgcccaaatacctctcgtccgtggtgaaggaggtgagcggcaagaccgccgcgcggtggatcgacgagtcggtgatcctcgaagccaaggccctgctcaagtattccgggatgagcattcaggagatcgcctaccacctcaatttctcgacgcagtccttcttcggcaagtatttcaaacagcataccgggacttcgccctcgcgttacaagcggaaaggataacggcccgtgaaacggctgatcctgctctgttgctgccttgcggcggccgccctttcggcccggcccgggacgccggagcgcgacatccgcgccctggccgattcggtgcgggcgacggtgggcgttgccgtggtgttcgatgacggcgacacgctcgtggtgaacggctcccgtccctatcccatgttgagcgtctttaaattccatcaggcgctggccgtgctcgacagccttgcccgcggcggccttccccttgcgacgcgcattccggtccgtcgctccgacctgccgcccgatacgtggtcgccgctgcgcgaagtctatcctgcgggcggcgagttcaccgtggcggaactgctggcatacagcgtcgcgcagagcgacaacaacgtctgtgacctgttgttccgcttcctcggcggaccggagaccgtgagccgctatgtcgcccggctgggcgtcggtgagacggagatcgtcgccgacgaggagacgatgcaccgccatacggacaaccagtatctcaaccggaccacgccgctggccgccgtgcggctgctcgaacgtttccgccgcggggaattgctcccggacgaatacggggatttcctggagaggacgatgttcgcgacgacgaccggtcccgacaaactccgcgggttgctgcctgccggggtcgccgtggcgcacaagaccggcagttcggaccgtacggcgagcggggtgaagatcgccgacaacgacatcggattcgtccgtctgcccgatggccgggagtattcgattgcggtcttcgtgatggattcccgcgaggacgaccggaccaatgccgccgtcatcgcccgcatttcgcggcttgtctacgattacgccatccggccgtaaaatgaaaagccccggtcttgcggccggggtctttcgtggtgttatttcagcgcttcgaccacctgtcggatcatcgccggaatggcgtgctcctcctgggcggtgtagaagttgccgtcgatctcgaacggggcgtccgtcgccacgggacccgtcacggcggctttggccatcgggtgcacggcgacgcgccgtccggcggcgacacctgcgaatccgaacatcatccctgcggcgcagtggccgatcatcggtttgcccgtctccccgaaggttttcagcacctccatcaggtccttgttccagggcttgtcggcgttctgcgcgaagaccggcacggcgtcgccgcaggcgaacaccagggcgtcgtactcctcttcgtgtcctttgaggctggcgatcacgtcgtcggcggtcagcccgacgcccgaattggtgcggatctcccggctgtcggacaccgcaaagacggtgtagggaatccggttctcgaaaaatgcttccagatactggaacaggcccatcccgttcacgggattcacggccacgacggctgttttctttgacatggttgcgatttgtttagtgaaacaatggttattttcggtaagtttattacttttgtttacaaatataggccaattcgtgcgtataaacaagaacgcacttaaaaatgagttggttacgtaaaagtaaccgttgctggaaatcaaagggatggaaacggaaaaaagtttgcagaattttgcgcccacgggttcctgcccggtccgggacgtgctgtgccgcctgggggacaagtggtcgatgctggtgctgctgacgttggacgccaacggcgtaatgcgtttcagcgagattcaccgcacgctgggcgacatttcgcaccgcatgctgaccgtcacgctgcggatgctcgaaaccgacgggatgatccgccgcgaagtctatgccgaggttccgccgcgggtggaatacagccttacggagcggggcgggagccttctgccgcatattttcggactggtggagtgggccgaggcgaacaaggaggctattctggacggccgccggagatcctgaacgacatccgccgggcatccgtgccgtcggggtagtagccgcgcagcagccgttcgtcccggaagccgttgcgggcgtaaagccttatggcggaatcgttatcggtgcgcacttcgagcgtcacttcatgcagcccgagccgccgggccagcgcgatagcggcgtccagcaatgcctgcccgactccgcagccgcgcgccgcggggtccaccgccacggagtagatgcggaggttttgcgccgtgcgccgcatcagcaatgaaatgtagccgacgaccgcaccgtcgcgggtggcagcgtaggacgctccctgcgcatgcgtcagcaggtagagcagctgccgccgcgtgaaagcctccccttccgggaaacagcgccgctcgacgcactccacggcgtcgaggtccccggccgtcgcaggacgtattccgactgcggggttcattgcgcgtggaggcggttgaggcagtggacgaaatggttgaggatgcggtagtaaagctcgtcgcccagcacggcgtcctcgacctcgtggtcgatcgacgggttgtcgttgatctcgatcaccacggctctgccgttgatgagtttcaggtccacgccgtacaatcccttgccgatcagcgccgcggcctttacggccgtgtcgagcactttctgcggtgccttgtagatgggcacggtttcccacgcgccgcacaggttgcggcccgtgtcgtcgtgggcgtggttgtagatctgccagtggcccttggccatgaaatacttgcaggcgaagagcggttcgccgtccaggaggccgatccgccagtcgaactccgtggggatgaactcctgggccagcagcacggccgaatgcccgaacatctcgtcgagcgccgcacgcagctctgcgtcgtcggcgaccttgtgcatgcccaccgagaacgatccgtcgggaatcttgaggatgaagggcgcgccgaggcgttcgctgatctccccgaaggtatattcgttgctgcggaacagcagctgcgaggccggggccgggatgcgggccttttcgaaaagttcgcacaggtagaccttgttcgtgcagcggatgatcgactcgggatcgtcgatcacggcgatgtcgttcatcgcggcccgctgcgcgaggcggaaggtgtagtggttgagcgatgtggtcgtgcggatgaacagcgcgtcgaactccatcagccgcgtggcctcctcttcggtgatcagctccgcgtggatgttcattttccgggccacctcgaggaatttgccgagggcgtccttgtcgctgggcggaaatttttcgtccgggtcgtagagaatggcgaggttgtagcgtgcgggtttggccgagcgcggcgagcgccataccttcttgttgaagctgtccagtgcgttggcgaagtcgtcctgttcgctctccgagagctggcgcagggaaagggcctgcaccgactcgatctggttgcgggcgtggttgttcatcgtcacgcgcaggatcgggcacgggtagtggtcgaaaatgaagcgtgcgatcttctccagccccttctcgcggcaggtcccgaaatagatgttcagctgccagatttcgtcggtgatacggttgcgctcgatccattggtggcacagctgctgcaggttgctgttcatgcggattcccgcacccgattcgagcttgttgagggtctcgacgcccggcagcacccggtgtccccgggcctgggccagcagcgagcagtaataaccctcggagttgtagccgtattcgtcgctcaaattgatgaccagtttgggcgtccgttccccgtaacggtgttcgaggtagtcggtgacggttacgagcgaatccgtttcgcagtagggcttccagtcgttgaggctgttcagcaggatgaagacgctattcatacagaagtattttcaatgcgccaaatgtaagcaaataaagcatacgctgtacaccctgcgggccgttttccggttgcccggaggccgtcaggcccgttttttcgccgccttggcagccaccgccttgtccagctcgatgatgaagtccgagaggacgttcatgtagttgatgaaggcgtcgtaagccgaatcgtaggggttgaagtaggagtgcacgtcgccgtccgacagccacttggtggccatgtagtagaaatggtcggaggtctgcatgaaactccatacatagtcgaagtcggggttcttcagtgcagagaccttctccttctgggcgtagagtttcgagaaggcttcgttctgcagttcgttgcccagccatgccgtcacgtcgcgctcctcgtcggcccacgacatcacgtgcgggcagtggagcaccgaaaccggctggtatttcttcgccgcttcggtcaccgtggcgaactccaggccgtttttcttggcgagaatcgctttgggcagtgcgcgcatgaattcgaagatgcccgtgtcggcggtctggtgctcgccgaaggtctcgtagtccatgaacaggttgacgacctcgcccggcgtctcgtccgaggcgagccactgcacgtacttgtcggccgtcaggggccattcgtcccagctcttgttcgagaaacggaaggcgatgtcgtccgagagcttgtagttgcgcagcagcaggcgcaacttctggtcgatggcgttggcgtagacgtagttgggcgatttccagcccagcacgtgcttggcgccttcggccagcatcgtgcggaagcccatgccggcgaccatcgcgccgatctcgtccgaatagatcagctccgtgttgcggaaggccgtgggtttcaccccgaactccttcctgatgaggttggcgtgcagcttgacctgctccgtgaaatcctccttcgaggccagcgaggccagcgagtgggagtaggtctcggcgaggaactccacgcagcccgtcgcggccagctccttgaacgagtcgagcacttcgggggcgaaggcgcggaactgttcgatggcgatgcccgtgatcgagaacgaacagcggaacttgcccttgttctccttgatgagtttgagcagcagggcgttcatcggcaggtagcactggcgggcgaccttctgcatgatcgaacggttcatgaggtcgtccaggtagttgtggtccttgcccatgttgaagaagcggtatttcttcagacgccagggctgatgcacctgaaaataaagacagacggttttcatgcgggatgctattttaattgttttttattctcttcgatcacggtttcgtacaccgatttgatcttcgccgcggcgtcgttccacttgaggttggtcacctcttcgaggcccttcgaggcgaacatgtccgacagggcgggatacttgatcagtccgtagatggcgtcggccagggcgtccacgtcccagtagtcgacctttacggcgtagtccagcacttcggccacgccgctctgcttggagatgatcaccgggacgttcgagcgcatcgcctccagcggcgagatgccgaaaggctccgagacggagggcatcacgtagacgtccgacagctggaacatcttgtgcacgtcctccccgcggaggaatcccgtgaagtggaaccggtcggcgatgccgagccgcgccacgcggcggatgacgtggttcatcatgtcgcccgaaccggccatcacgaaccgcacgccgggaacccgcttgaggaccttggcggccgcctcgacgaagtagtcggggcctttctggtaggtaatgcgccccaggaaggtcacgatcttgtcgtcgacgccccgctcgggtgttgtgccgcagttctgggcgaagcgcacggcattgtgcaccgtgacgacccgctcggccggaacgccgtagcggttgatgacgatgttgcgcgtgaggttcgaaacggcgatcacccggtcggcggcgtgcatgccggcccgctcgatggcgtagacctgcgtgttgacgttctcgcccgagcggtcgtactccgtggcgtgcatgtgcaccaccagcggcttgcccgacacgcgcttggccgcaatgccggcgtaataggtcagccagtcgtgggcgtggatcacgtcgaactgcccttcgaggtccttggccacctgcgcggcgaccacggcgtagcgcgccacctcctccatgaggttggcgccgtacttgcccgagaaggtgtagcgctgtttccaggcgtcggtcgtcgaccaggtcttccggcccgacttgacatattgctcgtggtaggattcgtactcctcgggggagatataggggaccatgttcgagtcgatgtggatgaacgacatcttctccagaatgtcgtccgcgccgctgcccgtcgaaccgtacatggcctccacgtcgctggcgttcacgacgtgcgtgaaacgctggtcctcgtcgccgtaggcatgcggaacgatgaaggtgacgtctacaccgttgcgcgccagtccgcgggtcattccgtagcaggccgttccaagcccgcctgcaatgtggggcggaaactcccatccgaacattaaaactctcataccttatctttttgtaatttcatttttgccgcctgtgcgctttctctccgcatcccttcacggcgctcggccgtgtccgtaagtcagatcccgctttgaacccctcccctggggaggggtctcgccatccggcacaactctctttcacattgtgcgcccgggccgtattcgttatttcgtttttttcgtcgttttcttctccgttgtcttttttgcggccggtctcttcgcagcttttgctgcgggtttcccggccttcgcggcagcccctttcttaccaacgttttctgcggccttcgcagtcttcggattcgcttttttcgcgatcttttccgactttccgggcttttcttccggtttgcgcgcgaggatcatgccgtaaatgtccagcacggccgcgacgctccacgcctgcgagatggcgccgcgcggtgcgaacgggggatcggcgtcgaacagctcgccgatcgaaccgatgccgtaggtctggatgtcctcctcgaatccggcgagaatctcctcggcctgcggcaggaaggcgtcgccgtcgatgtcgaagcaggcgctgacgtagaacgacagcagccacggccataccgagccgttcttgcccgcgaagtcgcgttcggcgggagtgccctcctgcgaacccttgtaaagcggattgcggggcgagagcgtgcgcagtcccttcggcgtgaggaggtgctgccgtaccgtgcggatcacctccagctgggtctgctcgtcgagcatcttgtagggcagtccgcaggcgacgatcatgttcgggcggatgtccgtaccggcgccgtcgcagcccacatagtcggccaggtagccttcgggcaggcggaacagctcgttgaacgccgccgcggtgcgttcgggcagtttctcccacgccttcacgaacttcgtgtcgccagcctcgccggccagctggagggtgtagcggacggcgttgtaccacagggcgttgacctcgacctggtagccgttgcgcggggtgacggagcggccgtcgatcacggagttcatccacgtgaggggagcctcgtccgacgaggcccacaccagtccgttgtcgttgagcacgacacgtcccgcgacgccccgtttatacgattcgagcacctgcttcatggcttcgccgtagcgtttccagatcttcttcgcgccgatctgcgcttcgagccgctggagggtccagaagaaccacagcggggcgtccgcggccaccgccgccgaagcgttcccggcgaacatgccgtcctgcatgccgcgcacctgcgtgtcgagggcgtcgatgcagtcctccttgtggttctgccacagggtgatgcccggcagcgagacgaaggtctggcggcccgaaaccccgtgccacggataacccgagaccacctccgtccggttgcccgggcggcggatcacgaactgccgcgccgagtgttcgagacagctgatgaagtcgatcttgtgcgtgcggcgcgcgatggagccgccgaagacctcctcgatggttttcgtcgaacccatttcgtcgagcgatgccgagaagatgatgctctcgcccttcttgagctcggtctcgaaatagcccgtggtcatcaggtcctcgtagccgtcgtagccgcgggcgatgtcctgccggtattcgaagttgtagtaccagtcgggtgccggcacaaactccgcgccgggtttgctggtctggaggtacagccacgggaacgacccgtagagacggcatttcacgccgttgacggccgggtaggagtgcccgtcggcctccatgttggcgtgcgtcagcgcatgcttgtcgcggaaggcgaggaacgggcgcagccggaggcgcgtttccgaatgggcgtcgacgagcgtgtagcggatcatcagctgcgtgcgcttgtgaatccaaagcatctccttcttgaggatcacgccgcctacgcgataggtgatcgtgggggtcggggtgtactcgaaatcggtgatgtacttgtggccgcgcggctcgtaggtcccctggaaacggtgcagcgccaggttgaacgtctggtcgtgctggatgatcgtttcgtcgagcgccgacagcaggacgtaggtccggtcgctgtcgtcgatcggggccaccatcaggccgtggtaacggcgggtgttgcagcagacgatggtcgtgctcatgtagccgccgatacggtccgttgcgagcatttcgcgctggagcgagtactccagattgcccaattcgcttttgtcgaaagtaagtgctgacatatcgctaaaaaatacggttcgtcctttaaagatattgaaatttccgaacagttacaacttattattgttaaatatccaaatttaataccttttaaacaatattgacattaggcccacttcaccagtgcgaagtccatgcggtggggcaggagcgggttcgaggggtagatgcgcagcgccacgtcgaaagtgccggcttcgtcgggcgtgtagtcgagtgcgtaggtgacctggcgtccgttgaccttcgcgcgttccagctggatcgtgcgggtgacgttgacggcctgtccgccgacgatctgccgcgcgacgaccatctccacgccgatgtcttcgggacggaggttggcgatgtcgagcgttacggcgaactggtatttctcgccgacgcagacggcctccttgtcgatcttcacgcgctgcacgtcgacgatgcgcacctggtcccatgcggcggagaccttgcgcttccaggccgcgatctcgcgggccatgcggtaggcttcggcgctcatctcgcgcttgcgcgcggcgagtttgtcgtagaaccggttttcgtagtcgatcagcatgcggttggtcgtgaagttcgaggcgatgtcggccacgcacttcttcaccgacgaaacccactcgtgcgggatgccgtccgtgccgcgggcgtagtatttcggggcgatctgctcctcgatggtgttgtaaatcatctcggcgtcgagttcgtcctggtagtgctggtcggcgaaggtgcgctccatcgggagcatccatccggcgccctccttgtagccctcgacccaccagccgtcgagcacggagaattgcagcacgccgttcatcacgcacttctcgcccgaggttcccgaggcttcgagcggccgtgtgggcgtgttcagccagacgtcgacgccctgcaccatgcggcgggcaagctccatgtcgtagttctgcaggaagaggatcttgcccacgaactgcggcatggcggcaacctcgacgatgcgtttgatgaggtcctgccccggcttgtcgttggggtgcgccttgcccgcgaagatgaactgcacgggacgctccttgttgttgacgatcgccgccaggcggtcgaggttcgtgaacagcaggtaggcgcgcttgtaggtggcgaagcggcgtgcgaagccgatggtcagagagtcgggcttgatgccctcgatgacctgcagcatctggcgcggcgagtcgaggcgcacctgcctggggtcgctgtaacgccggcggatatgcttgatgagtttgttcttgagcttcatgcgctcctcccacagctccccgtcggggatgtcgtggaccttctgccaggcggggatgtcgtagacgtggccttcgaatccgtcggcgaagtagcgggcgtagaggcggcgcagcgacgaggcgatccacgtcgggaagtgcacgccgttggtgacgtagccgatgtgcagctcgttcttgaaataacccggccacatgttgcccaggatgtccttcgagacctcgccgtggagccacgacacgccgttgacctcctgcgagaggttgcaggccagcaccgacatcgagaacttctcgttggggtcgttggggttggtcttgcccaggtttatatactgctcccaggtgatgcccagcacgtcgggatagtgcgacatgtactggcggatcatcgactcagggaatgcgtcgtggcctgcgggcacgggggtgtgcgtcgtgaagagcgacgaactgcggaccacctccaatgcctcggagaacgagagtttgcggtggttcaccaggtcgcggatgcgctcgacgccgatgaatgcggcgtgaccctcgttgcagtggaacacgtcgtgcttgatgcccagctggcgcagtgcgcggatgccgccgatgcccagcaggatctcctgcttgaggcggttctcccagtcgcctccgtagaggtagtgggtgacctggcggtcctcttcgaggttgtcctcgatgtcggcgtcgagcagatagaggtccgtgcggcccacctggcatttccagacgcgcgccgagagcgtgcggcccgggaaggcgatggtgacggtcacccagcctccggcctcgtcgcgcacgggcgagatcggcagtttgtagaaattctgcgcctcgtaggtggcttcctgcgcaccctgcgacgagagccgctgcgtgaagtatccgtagcggtacaaaaggcccacggcggccatcggaacgttcttgtccgaagcctccttgaggtagtcgccggccaggatgcccaggccgcccgagtagatcttcagcgacgagtgcaggccgtattccatcgagaagtacgaaaccgtcgtcgccttcgggtcgggtttctcgttcatgtagtcgcggaactgcgtgtgcacggcgtcgagctgtgcgaggaagttcgtgtccttttcaagttccttcatccgctcgacgctcatcttgtcgaggaaggcgatcgggttgcggtccgattcggcccacagcacggggtcgatgccttcgaacaggtcgcgggccccggggttccagcaccaccagaggttgcgcgaaagctcttcgagagcgtgcagccgcttgggcagcgtcttgtcgaccatcatgcggctccagacaggtttttcgacgaacagctgctggcgcacgaagttgatctgctcggtcttggccccgccgtcgtcgagcacggcgcggttggtgcggacgatcgaactctcgaccgcttcggagtaggcctgctcgtaggcggcgaagaggtgttcccaaagcgccgtcagcgagatttcataggccgaggtatgctgttcgttgacgtgtttctcgtccagcaggctgaaacgcagcagcgtatcggcgatcttcgcctcgacctccttgtcgttgtagtcgtcgcggcggatgacctccacgccggcgtgctcgcgctgcttgtcgacccagatgccgaatccggccagtgtcgtggtgaccgtcgggatggagaaggccaccgactccagcggggtatagccccacggctcgtagtaggaggggaaaaccgtgatgtccatgcccacgagcagttcgtagtaatccttgtggaagatgccgtcggccttgttgaggtacgtggggacgaagatcaccttcaccttcgatccgggatcggtgaggttgctgttcttcagcgcgttcacgatggggtcccacgtcgcgttctcaaggtagtgggtcgaatatttatactggctttcgtcgatgggtttcgacgggtcggccaggtgggcctgcaggtcgacgcgcgggccgcggttgccggccggtacggtgatgtaggccagcacctcgcgccggagacggtccgaggcggcgagctgcttgagcgactcgatgaagacgtcgatgcccttattgcggaactcgtagcggccgctggtcccgacgatcagcgggtcgcccgtgaatttttcgcccaggcaggcttcggctaccgtgatcatcgccttgcgggcctcgtcgcgcttggtgtaatactcgtcgcccgaccatacgaagtcgttctcgaaaccgttgggcgtcacggcgtccggctcgcggcccagcaggtatttgcattcgttggccgtgatgtcgctcaccgtcaggaaagcgtcgtggtacgtggcggccatcttctcgatcgagtgcttggctgtgacgttgaactggcgcgccagctcgtcggcattgaatttcgggaggtcgttgtagagcggcaggcggttgccggcgatgcagcggcccatgaccgtggcgtgggtggtgaacaccgtggcgatgtagggggcgtggttgcgcaggtagaggccgcccgcggcggtcatccactcgtggaaatgcgcggcggccttctcggccggcgtgccgaaagtatcgacgtaggaggcgatcacaacgcctgcggcccacccgaacagcaccggttcgatgtagtcccactggcccgagatcgagtccacgtggtacgattcccagaggcttttgagtatttcgtccttgcgggggatcagcgacgagaagtcgaccagcaccaccgtcggctcacctttgatcttccagcgaccgacgcggacgcggataccttcgttgtagaggctttggcgccaggctttcagcaggttggggtcctcctcgaactccgggttgacaccttcgtgcgagaggtcgggacccagcaggacgtagcggtctgcgaatttgcgggtgacggtctgcgctttggtggaaatgacggtgtggataccgccgaccttgttgcatacttcccaacttacttcgaacagcaaatcgggggagtgtttggcattgctcatatatttatgctaatttgtaattttcgtgacgaaccgaagaagaattcggccgcaaaggtaacacttatatttatattaaacaatcggaatcgggtatttctaaaaatatttaagaataacttaacatttcagtttcacttggttgcggtcttcggttacgtttcgaaaaatgtttcgatcaccgcgtcggagaccagcatccgcgccggcgggacggccatccggcccgctgcgaggacgagcgtgcggctcgccagccacggttccgcgtcgcgcatcatccgtgccgcgcgttccttcccgaacagcctttccgcctcccggacgtcgatgccttcggccgtgcgcagccgtgtcatcacgtattcgttgaagcggtcgcggtcggtgagcacctccgcttcggcgggcgccccgccgatgtattccgccaccgaaccgacgttccagcggcgttcccggccgtcgaacgagtgggctgcggggccgatgccgaggtacttcacgccgtgccagtaggctgcgttgtggcgggcgcggaagccgggcagggcgaaattcgaaacctcgtagtgttcgaaccctgccccggtcagcgtttcgtgcacgagggcgtattccgcttcgctggtcgcttcgtccaccggggcgaactgtccgcgggcggcccgccgtccgaaggcagtaccgggttcgacggtcaaatggtatgccgaaatgtgctgcacgcccagcgcgagggcgccgtcgagcgagcggcgcagcgcgtcgccgccgaaacccggcacgccgaaaatcaggtcgacggtgatattttcgtaaccttcgcgcttcgcgctgcgcacggcctgaacggcttgcgccgcattgtggcggcggttcatcagcttgaggcatgcgtcgtcgaacgactggatgccgaccgacaggcggtcgacacccgcgcggcgcagtgccgcaaggtaggcgggcgtgaggtcgtcggggttggcttcgagcgtggtctcctccgccgcagagcaatcgaacagcattgccgcatgatccaacagcctcgcgacagcctccggggtgcacagcgagggggttccgccgccgaagtagcgggtgcgcacaggctcgccgcccaggtattcccgccgggcgtccagttcgcggtgcatggactccagaagcgggtccatgcggcgcaggtcgacgcttttgtagaaatcgcagtaggcgcagacgcgcttgcagaagggtatgtggaaataaagtccggccatattaacaaagatatgaaaaaggcggatggttgcaaaactgaattgcgtccggtgcgggaaaaccttccgatgcataaaagtgtcgtcacgacaccaaagatacgaaaaaggcggatggtttattccggctgccagatcgattcgacggagaacacctccaggtcgcagaccctgatccgtttgccccggaagcggaatccccggtcgttgccggcctcgggacggcgctccatggagtaagagtacagtccgccgtcgatgaatacttcgaccgaagtgcggtcgatgtagatgtcggccgtcaggcgcatgctggtcgggtcctgcggagagtagaaacggccgttgagggtgttgtggttcatgtcgtaggcgacgagcggctggccggagagcgtgagcgaggcgtccgtcgcgtgcgaaagttcgatggtcgtccggatgcggagccggtcggccgttccgaactcctccagcctgcggccggcctcttccgccgtcagctcccgccattcgcccagcgggcggaacagccggtcgagttcggcgaccggcgtgctgaccagccgcacgccgtccttggtcgtacgcagcgtcagttccgtgggcatcgtcatcatgcccttgaaaggcatcccggggtgcgaaatgcggccccagccgatctggatgcgccgtccgtcggcggccggaatgttcgtgtaggtctgggccgcgtagatgctgcccgacgtgtagcggtgtttgcccgactcgggacggaacacccggccgtcgaacgatccgagcatgtaggttcccgaagccccgtacatcacccatttcgtgttgccggggtcgccgtcgaccggaagttcgaacagttcggggcattcccagaatccggtgacatggctctcgtaggtccagcgtttcaggtcgggcgaggtgtagatcgagtgtccgtcgcgttcgttgagcaccagcacccaatgtccggcgggggcgtaccagaacactttgggatcgcgcgtgtccttgctgttccatttgtcccgggagtcgatcaccgggttgccggcatatttggtgaacgtgcggccgttgtcgaggctgtaagccacgcactgcacctgcctctcgggacctgccgccgtgtagacggcgaccagggcgggcgtgccgtcgcggctgaaccccgcggtgttggcgcagtcgatgactgccgatccggaatacatcgttcccaggccgtcgggaaagagtgcgtcgggcagttcctcccaatgtacgaggtccttgctgacggcatgtccccagtgcatgttctgccactcgcgctcgtaggggttgtgctggtagaagaggtggtattcgccgtcgtggaaaacaaggccgttcgggtcgttgatccagccccggcgggtcgtgaagtggaactgcgggcggttcttttcgcggtagaggctgtcctgtccggcgatccggtccgactgatagattttcccgagtccccgcgggtcgccgtcgtaggcgatccgcacggtcttcccttcaagagccgacacgtcccggaacacccagtagtccgcctcttcgggggccagccggatcgccaccgaaagggccggttcgccttccgtttcgaaggtcatgcggccccgctcctgcccgtgggagaccgggaagttgaggtagcgtttcgtgattttcagcgcgatgttctcggcctgtacgcccgaagcgcacaggggcagcagcgagcagagtatcaaagtcattttcgtctgtgttttcatggcgggtcggcagttgcgggttgatggggaacgtattccggggttctctttccgggcggaaaaaccgctctccctcaaaggtaataaaaaatcggcggaagaaaaacggggcgtcccgtacggtgcgggtaaattgcggcaaaatctttgccggacaatctccgcaagggtttgcgaagggcttcccggcggtgctgtacgaggctatgaatgaagtgtatagcactatcggaaaaaataataaatattttttgtaatttctgctgttaattttttcacaaatctgaaagtttttctacctttgtgccgttgaagtccggacttgcggaccgaaacgtcaggttgaaaagaggagttttaatcaaataaattacaattatggacaaaatggatttgaaaaagtacgggatcacgggcgtaaccgagatcgtgtacaatccctcctacgacgagctgttccgtgaggagacgaaaaaggggctgcgcggttatgagaagggtcagctgaccgagaccggcgccgtgaacgtgatgaccggcgtttacaccggccgttcgcccaaggacaagttcttcgtaatggacgagaccaccaaggacacgatctggtggacctccgacgaatataagaacgacaacaagccggttacgaagaaggcttggaaggaactgaagaaaatcgccgtcgaggagctttcgggcaagaaactctacgttgtggacacgttctgcggcgccaacgagaactcgcgtctgaagatccgtttcatcatggaggtcgcctggcaggctcacttcgtgaagaacatgttcatccgtccgacggacgaggaactggagaagtacggcgagcccgacttcgtagtgctcaacgcttcgaaagccaaggtgaaggactacaagaaactgggtctgaactcggagaccgccgttgtcttcaacctcaccgagaagatgcaggtgatcatcaacacctggtacggcggcgagatgaagaagggtatgttctcctacatgaactacctgcttccgctgaagggcatggcttcgatgcactgctcggccaacaccaacgagaagggcgagaccgctatcttcttcggtctgtcgggaaccggcaagaccacgctttcgaccgacccgaagcgccagctcatcggcgacgacgagcacggctgggacgacgacggcgtattcaacttcgagggcggctgctacgccaaggttatcaacctctcgcaggagaacgagcctgacatctggaacgccatccgccgcaacgcgctgctggagaacgtgacggtagacaagaagggcaagatcgacttctccgacaagtcggttacggagaatacccgcgtatcgtacccgatcttccacatcgaaaacatcgtgaagcccgtatcgaaggctccggccgccaagaaggtgatcttcctctcggccgacgcattcggcgtgctgcccccggtttcgatcctgacccccgagcagacgaagtactacttcctctcgggcttcaccgccaagctcgcaggtacggagcgcggcatcaccgagcctacgccgaccttctcggcctgctttggcgcagccttcctgtcgctgcaccccaccaagtacggcgaggaactggtgaagaagatgcagaagtcgggcgccaaggcctatctcgtgaacacgggctggaacggaaccggcaagcgtatctcgatcaaggacacgcgcggcatcatcgacgcgatcctcgacggttcgatcgacaaggctccgaccaagaccatgcctatcttcgatttcgtggttccgaccgccctgccgggcgtagatcccgctattctcgatccgcgcgacacctacaagagcgccaaggattgggaggttaaggcagaggatctggccaaccgcttcgtgaagaacttcgtgaaattcacgggtaacgaggagggcaagaaactcgtagccgcaggcccgaaggtaaagtaattccctgcggcataagccgctgcgaacagatgaatcccggtttcccgcagtggagaccgggattttttatgtacagacgcggcccggccgacggcggcgggtgtgtgcgggacgggtttgcggacggagacggtccgtccgcgccggttgccgccgatgttaccgcgatgatgcgggggcatggacgggcgggaccggataaccggatggaaaaaagcccggctggaattcattccagccgggctttttcgcgttgcggagccggcgggtcagaccgtcatgatctccttctcctttttcgaaagcgcctcgtccagcgtcttggagaacttttcgagcagtttctgcgactgcgtttcgccgtctttcgactcgtcctcgggcatgccctccttctgggccttcttgaaggactccaccgcgtcgcggcgggcgttgcgcaggctgatgcgggcggtctccgcctcggcgcgcacctgcttcaccagttccttgcggcgctcctccgtaaggggcggaatcgtcaggcggatctgctcgccgttgttcgagggcgtcaggccgatgttcgagtcgatgatggccttctcgatcgggcgcagcatgttcttgtcccacggctggatcaggatggtcttggcatcgggtacggtgacgctggccgcgcccgaaacgggaacctgcgagccgaaatagtcgaccatcacgccgttcagggcgttgggcgacgccttgccggcgcgaacgttcaaaagttcctcttcgaggtggtcgatggccttctgcatgcggcccgtagcttcgttgagaatcgtcttggtatccataagtgttggggtttaatttccgagtgttttttcaatggtgcggatcagttcctcgaattcatgttcgtcgtagcccaccgtggccagcacgaccttgcctttgcggtcgatcacgaaattccgcgggatgtagttcgaggcgtagcggtcgtagacggtgcgcgcggggtcgagccccatcgggaaggtgtaacccgtcttttcgcgaaacgtctccacggcctcgcgtttctcgccgcgcgacacgggcaggaagacgaacggcttgccggcgaagcggtcgatgatgtccgtctgcacgcgggtcagctcctgccggcagggcggacaccacgtggcccagaagttgagcagcacgacgttgcccttcaggtcgccgagcgtcacggagctgccgtcgaccatttcgaccgtgaagtccggggccatgtcgccggcctttacgagcgtcgtcgattcggtttgcgtttcggactccttttcggcctctccggagggcagcagcaggattgcgacgatgatcacgacgatcagcgccagcatcacccacagcgatttgttgcttttcttggttgccatagtcttacagttttaccagcgttccgatcttctccccggcaaggaccttgccgaggttgcccgcggtgtccatgtcgaagacgatgatccggagtccgttctcgcggcagagcgtgaaggccgtgaggtccatgaccttcagacggcggtcgagtacctcctcgaacgtgatttcgtcgaacttcgtcgccgcggggtccttctcgggatcggccgtgtagacgccgtccacgcgggttcccttcagcatcacgtcggcctcgatctcgatgccgcgcagcgccgacgccgagtcggtcgtgaagtaggggttcgacgtgccgcctccgacgatcaccacatagcccgcttcgagatactcgatggcacgtgccttggagtagtattcgccgatgggttccatgcggatcgaggtgagcaccttgcatcggacgccgttgtcttcgagcgccgactggagcgccagcgagttgatgatcgtggcgagcatgcccatctggtcgcctttcacgcggtcgaagccctttttggcgcccgtgaggccgcggaaaatgttgccgccgccgatgacgatgccgatctggacgcccgtcgccgcggccgccttgatctgttcggcataggattgcagcatctcgggggaaagcccgtatttctgttcgccctgcagcgattcgccgctcagtttcaggagtattcgcttgtatttcatcgtgggtcgcattttatcgtaatgcgaagataggtattttttcgaaaaaattcatatatattccttatctttggtgtcgtgacggcacttttaccggtcggaacgttctgccgggccgcgcgcgattcggttttggagtcgtccgttcttttttctatctttgcaatccttatgtcgtcggaagaatataaactgctcgatacgatttcctcaccgcgggagttgaaaaaactcccgccggaggagctgtccgcctactgcgacgagttgaggcgttacatcatcgacgaatgtgcggtcaatccgggccacctggcttcgagcctcggggccgtggagctggccgcggccctgcattacgttttcgacaccccggaggacaagatcgtctgggacgtcggccaccagacctacgcccacaagatcatcacggggcgccgcgaggcgttccggaccaaacggcggctggggggcatcagcggtttcccgcgcatgtccgagagcgaatacgacgccttcgggggcgggcacgcttcggtgtcgatctccgcggcgttcggcatggccaaggcggccgaactgcggggcgagaagcggcaggtcgtggccgtgatcggcgacggctcgatgaccggaggcctcgccttcgaggggctgaacaacgccggagcctcgaagcgcactaacctgctggtgattctcaacgacaacaacatggctatcgaccaggccacgggggcgctgaaaaactacctgctgaaaatctcgacctcggtgcactacaaccgtttcaaacaacggttgtgggggctgatgtcgcatacgccgcggctgctgcggctctgccagaaggcgggcaacgccgtgaagcaggggctgctgaacaagagcaacctgttcgaaagcctcaatttccgctatttcggcccggtggacggccacaacctcaaggagttggtccggacacttcgggcgctgcgcgacatcgaggggcctaaactgctgcacgtgatgacggtaaagggcaagggttaccttccggccgagcacgaccagcccgcctggcacgctccggggcgtttcaaccccgacacgggcgagcggatttcggctccgggcggcgcggcgcgttatcaggacgtattcggcgaaaccctgctggagctggcccgccgcgacgagcgcgtcgtgggcgtcacgcccgccatgccgtcgggctgttcgatgaacatcctgctgcgcgagatgcccggtcgctgtttcgacgtgggcatcgccgaagggcatgccgtgaccttctcggcaggactggccgcggcgggcatggtccccttctgcaacatctattcgaccttcatgcagcgggcctacgacaatgtgattcacgatgttgcgatccaagaccttccggtggtgatgtgtctcgacaggggcggtctggtgggcgaggacggggtgacgcaccacggggtcttcgacatggccgctttcggtgccgtgccggggctgacgatcgccgcgccgatgaatgaacccgaactgcgcaacatgatgtatacggccctgggatcgggccatcccttcatgatccgctacccgcgggggcacggcgagggtctgccgtggcgcggcgagaagttcgaggcgctgcccgtcggacggggccgccgcctgcgcgaaggcgacgatgtggcgctggtgagtgtcgggaccgtcggcaacgccgccgcgcgggctgccgaacgcgccgccgcggaaggcgtgaacgccgcccattacgacctgcgtttcgtgaaaccgctggatgaagcgttgctggacgaggtgggacgtaagttccgccgtgtggtcacggtcgaggacggtgcgttgcgcggaggtgtcggcgaagcggtcgcggcgttcttcaacgaccgcggctacgacgtgcgggtgcaccggctcggcatcggcgacgagtgggtagagcacggtacgcccgggcagctgtatgctctttgcggctacgacgaggagggtattctgcgcgccctgctcgatacccgcgcgtaaattttccgcaacgcacttttccggcacaaattctgcgtgatggcttcccaaaacgaccgggaagtgaaaatcgtcattctattgcttgttgccgccctgctgattctgggtgcggtggctgtcgcggcggcttcggaccgcatcgaccgtatgcctgtcgccgtgttcgacctgcggcgctatatgggaacatggtatgagatcgcccgctacgaccattcgttcgaacggcggctggcgggtgtgcaggcccactacgaattgcggcccgacggccgggtcgccgtcgagaacagcggtgtcgactaccgttcggaccgccgcaaacgggcgcgcggcaaggcccatgccacggcgacgccggggcgtttgcgggtctcgtttttctggtttttctattcggattacaacgtgctggaactcggtcccgattacgactgggcgctggtgggcagcagttcgtcgaaatacctctggattctctcgcgcacgccccgtctgccgagccgcacgctcaaccacatcctgcggctggccgaagcgcgggggtaccgtaccggaaagctgttgttcgtggaccaggggtaggggattccgccgcctttcggtcggcagctgatcgcggtcttcgcctgcaatgaaccggctaacgctggctccgggcggctattcgcgggggcgcacgcgccctgccccctccgctcgcgcttttccggttcgtcgtttctcggttccggcctgatacattacatggtaaacacccagtcgtcgcctttcgagaggaccgggtccaggcgg

SEQ ID NO: 931 - DNA, 15632 bp, unidentified
  source 1..15632: mol_type = unassigned DNA
  misc_difference 9871: note = a, c, g, or t
  misc_difference 9872: note = a, c, g, or t
  misc_difference 9873: note = a, c, g, or t
  misc_difference 9874: note = a, c, g, or t
  misc_difference 9875: note = a, c, g, or t
  misc_difference 9876: note = a, c, g, or t
  misc_difference 9877: note = a, c, g, or t
  misc_difference 9878: note = a, c, g, or t
  misc_difference 9879: note = a, c, g, or t
  misc_difference 9880: note = a, c, g, or t
atattaccttcagcaaacaatgttactaatagtacttttttattcatttctcatattcctttcttactaaatccatataatcaaaatcattaaatagattcaaatttatatatacatatactctctaaaattaatttttttaaaaaattttatatactaaaggcatatatacaactataagaaattttgaatatgtacaaaaatctatatatttcctgatattttttttattttgtctacaaatatttttataatatttatactcttcttttttttcatactttgaggattttattattctgcacaattgaaaatatgcgtttaagcctaagctacattgagccatttcaacatatgattgatatttttccttacataagctaagtattttataatcagaattaattgaactttttgcagccttaccattataacttaaaccaacaagcgaatctgcatttcttacatacgaatataaacacttattaattactttgtaccgcctaatttttagtaaggtttcaaaaataaacagtctatcctcgccaactgataatgcctcatcaaatttaataccctctaaaacatttttcctaaaaattttattccatagatatggagatacatcatatgaccatctaagtaaattttctaatgctttacatgaattataatattcattatcactgtttactatcttagttacattatcaccatcaattatattaattccacaagcaactatatcaagttcatcaatatcagcttgatttattaatgtatggtacatttctttattaataaaatcatcaggatccacgaaaccaataaaatcgcctgtagcctcaataagtccagcgttcctagcactagataccccaccattttgtttataaatgtatttaaatctgctgtctttttcacaaaatgatttacatattttaccacttgaatcggttgaaccatcatctatcaataatacttcaatatctttatatgattgttctgaaatagatgtaagagatttatccaaatatgattctttattatatatgggtactattatacttatcttcaaccttctaactttctccttctcattctatcatttatctttgaaatatctaaattagctcctattgcaaaaaacaaaaaattcataccaacagaaattaaaacatcctcgttcatagaccacaaagcaactactattcccgttataattaatatatcctgcctatttttccaaaatctccacatcataaatacaaaaattaccattgatattatcatcattaaaaatccccaatcttgtaataataatatcattcctgaatctactaagaaatatggtaatcctgtatcaactttataatccaaattaccaccccaaaagctatatccaaacttctctaatgagaaggcagcaaggttaattcttcctgatacaaactgattgaatgccatgataaacatttttagatttccatttattgcacttggaaacagatttcttataaaatacgtatctgaatatgaatatacataagctgaatatatccaaaccaatactaaattcaatagtaatgaaattggaaaaatacctatccaaagtcggctatgtattattttttctccaacttttatgttactaagtacatacaaaacaattgctaaagaaatacaaataataaatgaaccactcttgctaagaaagcttcctaatatatataagacacttgccatgcctaacgctttatatatattgtctttgttataatatagctctagcaaaactagcgttcccatattcattgctacataatttatatgtgtgtacccgccaaatactatagcaaataaaactacaggtccttttacatataaaatccaacgcacaattttataaaattcaacatgcattccaacaaaaattgacataatcgatataattaatctagtgtcacttccaagactcattctatatacacttaataatataagaaagactagtattatagatgatattactttattttcaatatatttaaaaatttgaaggcacccaaaaatgacgcctaaaaataaaagaattcctattatagcattattaaatttccatcctcgtaaagaataatacgttgttataaaaatgcagtataaaaaaggcaaaacatctttagtagaaattttaactttgtacatatataatactatctcccgtataaatttttcttatgtcaatttagtacaatttgcgatatattttcatctaattactcaaattctttaacttactttttatatttgtaacattgccagttccaattaacctagctaaacgtctcttaaaccgttgtcttccactagtccaacttgcactataatgatgtattgaaattgtatccttacacaacaaatttttaccaccatacggatcaaaatatttagaaggatatattgtaatctcatcccaataattaacattatctatattccaagttccaattgaacttattgcttcgctattcaaaatagggcaggctaattctaatttcttatttacatcaaattcaatattggaatatttttctaacattttttcgacaatataactattcttttcagccccaaagcctaaaccagtttgacataatgattgtgcctgttgtatcccaatatagcacttgttatctaataaatgatccaacgatttcaataattctacgtctgtatcaagatagattccaccataatcaaaaactattttcaacctcgcataatccgaaacaaaagcccacgctttattctcataagcaactctggcaaatgtattatctgatatatcaaaattactctcgttccattgctttatttcataatccgggcacattttttcccatgacttaatacacttcttgacttcatacggtaatggatttccaccaaaccaacagtaatgaataacttttggtatcataatttctccaatcttaaatataacatttctgtttttataatataaattttaactacttcatccaaaaaacatactgatacgaattattatcgctaactttaaccgctggaactcctgcatatgtaactccagcttctaaaatactttttacgacaactgcattagctccaattgttacatcatttgcaatagaaatagctcctataactttacatccagttcccaaaaacacattgtttccaatcacaggcgcatccccaccagacgcaccaactgtaactccctcgtgaattcttaagttatttcctatctttgctttgtcattaatttctatacagccataatgtgcaatactcaatccctttccacaaacatttggagcaattcctattcctaactttacccctagcttgtgaagcactatcttataccatatacttaatatttttttttgagtattcagatagtattcatattttctcaaataaatttcatatctccatatttcatcagtaaaaggcctaggatattttctattcactcccaattgcttacgatctgcttccatatattcttttaaatcttttttcgtcttaatcatatagtgcattctcctcatatgtaacatcttcaataaacattttatatgtcagcttgttaatatatgtatccgcattcacttgatgacataattcttcaaaatttttcccgccattttttaaaagcatatttctcaaatcatccctatgcttattattataaggtatattctgtatcatgttcctcgcccaatcaaattcatcataagcaatacttaaaaaaagatctattgacaaataaacaataaaatatttttcattcttccaaaattcaaaaaacaaatttctcataaatcccattaatggattttttttagtagatgctaaaaagaatgttgcccagtatcctttacaaattgggaattcccagtcatctccatgtttaattgtataaaaactattcttatacatttcttcgtcaaattgctttgtcatataacatgttggatcaatccatatcccaccattttcatataataaacaacatcttaaaatatctgaaaatagtgtaaagtttatctttccattatttactttatcaattatatatttagggatatttgcatattgataataattagacttatccaataatattactttatgctttcctgcattcttttttatactacaaatacactttttaataattggtggtgcatcatcaataccttgccaccaaaaaataaaaatattatcatttaaattaattttttgattatttaaagaaacattttcccatttgagtataatatttttatacttttttgcaattatttcctttgctctttcataataagactgtattattttatatttcagctttccattagaatttcttaaaattgttgtacataaaaaatctccaatggcaatcattggactaaaataccaaaattgtccccaccatcttctacatatattttttattctttttatcatataatcctcgttttatttaaaatatttacattattctataaaatccaatatagttcattcttaatttttcaaaagaaaactccgcattatatcgttcttttgcactaacatgaaatttatcaagcacatctatgttattcaataaataacaaatattatttacaatttctttaatatccttaggttttatcagaatcccatttattccattttgaactatctccggtgtaccatcaactgccgttgctacaaccgtcttgcctacagaaaaagcttcaatcggagtaagcggtaatccttcccacaatgaacttaatactataaaatccatctgactcattacattctgtatatcacttctataccctaaaaatgtaatatattcatctagattcatttgtttaaccatatttacaagtttgtctttgtcttcaccgtctcctacaatcacaaatttagtctttggaaacttttcaatcactcctggtactgcattaataaagtattccatacctttttgctccgaaagtcttcctacattgcctatgattttatagccattttccctatactctgttaataaaggaattgggcttatttttccgtcaaacggcttaatagcattatgtataactgtaacctgctcatttggtattccataatattcaacaagatttttctttaccatttcaccaacagctattaattttgtatttctatacgcaagtcttgttagtgttttcttgtcgtgaaatgtattatgtgcattagcaatttttaaaatactctttccacatatcaattccgcatataaagcagccatacggtgatgtgaatggactaatgttatattttctttatcaacaatcttttttattgtaataatcgtcttaactatagagcgtggatttttttctgatatatcaggaattatataatgcttaattcccatttcttgaagcttatgttcattaactcctccacaggaacatacaacaaccttatttaccaggggcttaaatatttcacacaattgtaatacaacattctctgttccaccaagttccattgtccttgtaagaaatagaatgttttgatcttctaatttcatattctacttatatttccttatcaatcccagtattttaacatcatccactaaatatctctttgccattctttttggatcctgtgtaattctaaacaaccattcaagtccatgattagccatccatttaggagctctttttatatttcctgcttcaaaatcaaaactagctccaagtccaaatgaaattgggacatccaattctttacaatagtgatacataaatttttcctgttttggacagcctaaaccaacaataagaatatccggtttagatttcgtaatcatatttttaattttgttaatttctaactgattactttcaaatccaaaaggaggcgaataggtgtctactacattcaatccctcatatcttttcatcaaatttgctgctgctttagcagcaactccctcttttgcacctaggaaaaacatcttataccctttttgtgcagatctttcacataatagaggaaataaatctgatcctgaaattttctcctttattggagtcccataccatttagctatccacaaaagaggttttccatcagtcagaatcaatgacgcattatcataaactgcttttagttctttatctttttccagttgaactatgtggtctacattcggagttacaacatattcccctttctctttagctattattttgtcaatcgcatctaaagtctcttgcattgtcaaattgtcaatttcagtattcataaacttcattctagccatataatttaattctccatggtacacttttgcttatcatccacacttatttcctgtccaagctgtacctcaataatatccagattagtaactgcctcaaccatatgcttgcatccagccttaattgtcacaacatctccagccttcacatcctgtttctctccatcaatagtgacaactccttttcctgaaacaaccgtccacacttcatctctatgatgatgcatatggtagctcatactctctccggccttcatagatacctttactgtcatagagccactctgcacatcaacgactgtgtatgttccccatgacttttcagcaaacattgcctctgtctcgattttctctacatatggcttcatatatccgctacgctctttgtcagagattattattccatctccgctggctgcgattatcatatccttacatcccatacaaagaatcgggatattaagctcatttaccacatttgtattctcacaggtctcatccatgatagctttgccttttgctttatcagccattacctcagccatcatgttccatgttccaacatccttccaatctccgctatagcgaagcacctgaatgcttggttccttttccacaactgcatagtcgaagctgatctttgtcatctggtcatatctatcaaacatgtcctgataatctttataatcaatcatgctatgagccttatctatcagatatcccagtttgaatgcaaatattcctgcgttccagagtgcattctgtgccaaatatttcttagctgtctctgtatcaggtttttccttgaattcctttactgcacttacgttatctccatcctttggaatgatatatccatatttttcacttggatatgttggctctattcccatgagagtcaatcctgcattccctgcctgtgccaattctgcaagctccttcactgcctcatagtaggtatcctccacatatgggtctaccggacataccactacaggctcatcctctttcacatcaagcacatcatgtaaataattagcagcaagagctattgcagggaacgtatctctcctgcatggctccacacatattgatacattctcgccaagctgatttttaatcgcgctggcctgtgacttgcttgtagctatcgtcacctttgcctccgggtcaacctttgtaatctggcggtacactctctgtaccattgactcatattcacctttttcatttttaaacaacttaataaattgtttgcttctcacatcgtttgataacggccagagtctctttccacttccacctgacaacaaaataatattcataaacctacactgctccatcactctttagtacgcccataactgttttaaagagaatacttatatcccccttaacactccactccccaatatactgggtatccagcttcaccacttcctcaaagtccgtgatattgctccttccactcacctgccatagtccggtcagtccgggtctgaatgacattctggctctgtggtgaggttcatacttctcccactcatccagtgttggtggtctggtgcccacaaggctcatatctcccactagtatattgaaaaattgtgggaattcatccaggcttgttttcctgataaactgtccaattccggttttcttctttccgtttggcagcaccttattgcctattattctcgggtcgaagtccatcttgaacatcattccgtcgcccactttattctgtgccataagttctttctttcgctcctcggcatccatatacatgctgcggaatttatacatcttgaactttctgccgtttctgccgattctctcctgtgagaagaatatcggtcccggcgatgctatgtatatcgccggtcccacaaatatcatgatgataagtgtgaacagacaaccaaccagacctccgactatatccatgcccctctttaccagaagtgcgctggtatttgcatagttcacgcttgatgtgactacggtatagtcgcctatcttttctatctgcttatagccaccctgggctgttccgttttttgctatgcctgtatgcacagctattcccatctcaagaaatatatctgccatcttctccggatattcatcctcactgcacggcgggatgagtacctcatccacccactcatcacacgcatagtccactatgccatcgtggtttgcaacaatcggtatgccgcatatagtcttgcccttcatgtctgtatccagtgaagctgctactatctttgtatagcctatacagcttttctccactgtgcgcagtgtatcacgtagcatagcatcgggtgctatgacaaacagcgatttctttgatgctccaaatccctttttcttaaggaagctcttgagcgctagtcttgctacatatgttattgtcacatagattggaaacatgatataaaatgataatcgcgagtatatatcagccatctgtgtggtgaacagaaatagcgctgtcaccagaaatacaagcactgcgtgcttgcaggtcgatatgaattcatccagatatccgcgttttaggacattcttgaatgaatctgccattatctccacaaagaaatctatcagaagaaatgctacacccagtatacggtagtccttgtccacatatgggttattaaagccgaagcgtaccacatatgaaataaaaaatgctataacaatgcatgcgatatctataagcataaaatctatatgctttgtccattctctgcctttctttctgtacattctttccaaattctccttgtggtatcttttattttcctttatacctgttctaggtgaggtacctttgtaccccaccccgaattattttaacctgttttgttttacgtatgttttattaggttatttatatctttttctgtatctaatcagggtattcaataatatattttcacccatttttaattctttgtcaatgaatattaggttttctttataatttttgacacattcgctaaccgctatagtattacagcacccataattatacattattatatgtcatactgcttatttttcctcaaacattctctgcttcctctctatcatctcatcaatccttgcgatatactgccctacatccttgacattctcgcatctgtcgatgcggtgtgtgccatcgggattcggtataggccagacgcgcttggtgcttgctccggctccacaggctacaatagtctgtttttcctccatgatcagtatgttgtatacgccggccttgccctttgccgcatagaccacgttctccatattgccagccatacccttctgcctgtagaggtagtatggctcaagccccatctgcttacagtaggctgcgcagagatccatatgctcctgggtgttgaccatctgcatatcgctgtagcggtccttgaagatggtgagtcttgcagctcgctttactgcgagtgaatggatggtgacgttgtcaggtgccannnnnnnnnnaggtgccagctccttcaccagctccattgtgtgccttacatcatcgagcgtctcctcgggaagccccatgatgaggtccatgtttatgttgtcaaagcccagctcacgcgcgagcttgaagctttgtatcgtatcgtctactgtgtggtgtcttcctattatatcaagcgtctgctgcttcatggtctgtggatttactgatatacggctgatgccgtttttctttagtgccaggagcttttctctcgtgatggagtccggtctgcctgcctccactgtaaattccagacagtcctttaaatcaaagctgcatttgatttttctgataagcctgtcaagctgcgcagggcttagtgtagtcggtgtgccgcctcctatgtagatggagtttagcttcttgtgatagaatttctgtgccgtgtagtctatctccttctcgagtgcatcgaggtaatcgtctacgcggtttttccacacaccgagcgggtatgatgtaaacgagcagtatgcacaggtgctcgggcagaagggtatgcctatgtacaggctgtagccgttgtcatagtccaccttatcgagcagtgccttctcacgctttgctatacctattgagaggtcgattttctcatcgcttgcgaggtaggtttccttcagatagtcgtaggtttccctatcgctcatgccgtcctctatgcacttcatggctatcttggtcggtctgatgcctgagagtgtgccccacggaaggctctttcctgtgcccttttctatcatggaatacagggcgagcttgagacggtttttggtctccttgcggtctgtgccgtccacggatatttttgtgcagatactttctccggctgttttaatgtcactttcgtcggcttgctgcatctcatctgtcatggaattatttccgccggctctattcagcgtccactccactgcaatttcatcacccacatagtctatcttaaatacctgtgaggcatccgcaaattcttttacgccatcgcctgtcatctcatggtgcgtgcaggctaagtttttcccctccacctcatcaggtgggcagctatagtacatctgcacatcctcctgtgggaagaactccttgagcagtgagtgcacatcatattcaaaatccggtttattaaatactactactatcataagtaagggttatacatcctctcgttttctatggttgttgtgtcgttgtggcccgggtacacctctgtatgctcaggcagcgtcatgattttttccttcactgtgcgcacaaggtctgacatgctgccacccttgaaatccgtacgtccgattgagccgcaaaacagtgagtctcctgtaaagatcacgtcctcatacgggaaataatagcagcagccgcccggtgtatgccccggtgtgtgaagcactactatatgaaagcctgcgatgtcaagctcctgcttatccttcaaaaatacatctgcataaaaggtctttgactgccccatcatgtagctgacattgagctgcgggtcatcgagtgtggctttgtctgcctcatggatatatatcttgatgccgtagtggtctgcgagcggctttgcatcagtggcatggtcaaagtgtccgtgtgtgagcagtattgctacaggctttgcgcctgactcatccacctttttggcgagctgattagcacacgcgccagggtctattattatcatttcctttgtctttatattggtgacaaagtagcagttggtctgcaccggtcccactacgaagtggtctatcttcatatttaccatatgagtgtactccttgtctgttatatgttatgcttcacgcaagaaccaccgggatttagccggtggtcctctctacgtctattacactttctatctgtctgagcttctccactagaacctttatctggtccctgcctctgatattgaaaaatacctcgattgtagcgatgccctgcttgctggtcttggactggataccactgatattgatttccttctcggtaaatatctttgtgatatctacgagcagtcccggcctgtcatgacagaatatctttaggtctgcctgatactcggcaccgttgtccatgagggctgtatcctgccactctgcttctatgagcctgtccttttctatcttggacagattgatgatattcacacagtctgtcctgtggatggagatgcctcgtcctctcgtgacaaagcccacgatttcatctcctggaacaggattgcagcacttcgaaaagtgcacagccacgtcatagagtccgtgtaccacaatgccgctctttgacttgtgctcgggctgtatacctgctgctgcctgctgcttttctgcgatgctgccaagcacatctgcatctgtcactggcaccacatgatccttcttgtactcgtcgtacatcctgttgactatctggctctccttgagtccgccgtgaccgacggttgcaaggcatgagttccagtcgtggaagccgtatttgcggcgtattttctcctgatactcaggcttgtttatttcagcaaagttgataccctttgccttggcataggctgctatcagatccttgccgtgctgtatattctcctccttgagctcacttctgaaccactggttgatcttgttcttggcctgtgtgctctttacgaccttgagccagtcacggcttggtcccttggagttctgtgaggtgattatctctatctggtcaccgtttttgatgacatagtctatcggcaccagcttgccgtttaccttggcaccgaccatcttgttgccgaccgcagagtgtatgctgtaggcaaagtctataggtgtggagccctttggcaggttctttacatcgccggacggtgtgaatgcaaatacattgtcggagaataaatttaaatcactctttaataaagtcataaactccttattatccgacatgtcctgctgccactcgagtatctggcgcagccaactgagcttctcctcctctgtgacagtggtggtagtagcattgccgttgtttgtttccttgtacttccagtgcgctgcgataccgtactcagctgtacgatgcatctcataggtacgtatctgtatctcaaacggctgtccgcttgggcctatgagcgtcgtgtgaagcgactggtacatgttctgcttcggcatggcaatatagtccttgaaacggcccggtataggcttatacttctcatgtataatacctagtactgcgtagcagtccggtatggtatccaccagaatcctgatggcaaagaggtcatatatctggtctatagtcttgtcctgattgaccatcttcttatatatactgaagaaatgctttgccctgccgtatatctctgccttgataccggcatctgaaacatacttcttgacatcgtttacaaggccctggatgtaggtgtcgcgctctgtctttctgagggctaccttctctaccagatcgtagtaggcatccggatagaggtacttcatacaaaggtcctcaagctctatctttatcttgctgataccaagtcgctgcgcgatagggcagtagatatcctgtgtctctctggcgatacgctgctgtgcctccttggactggtacttgagtgtacgcatattgtgcagtctgtctgccagctttatgaggatgaccctgatatcctttgccatggcgagaaacattttgcgcagattctcagcctgcatctcaagcctgtccgcattcttatccttcggatccttggtgctgtctgtcaggtgcaggtgcttcaacttcgtgacaccatccaccagatgtgcgacatcgtctccaaactctgcacgcatctcatccatggtcatgatggtatcctccagcacatcatggagtagtcctgctgcaatggtttccttatccagctcgagctcggcgagtattatggcaacacaaagcggatgtatgatataaggctctcctgacttacgcgcctgacccttatgagcatcataagctaccctgtaggctttgtccacaaggctcgtgtcatccgacggatggtactttttgatttcctttttcagctcatcgtaaagctcctctgggctcgtaaaatcctttgttccccttataccgctggtatctgagcgaaatttgtccgctattttttctaattcttctgttgagtaatctgccaatagtctcacctcgattgtagtgtatctttagtagccattatattttatttctttaaaaattgcaatcttatgttgttagccgataaccatctttactccgccatacatgcctgctgaattgccgagtgtggcaagcttgatctctgtctcacggcttgcatgaaaagcatactctttatagtactttgctgcagtatcgatgatgatgctgcctgcctttgaaaggcctccgccgacaacaaatacctcagggtccataacgcatgctactgctgccattgccttgccgagaagcttcatagactgctctactgccgcaatgcccgctgcatctcctgcctttgccgcatcgcatacatccttggctgtgaagcctgcatttaaatcaagctctgttgccacatccctgtgtgctgcaatgtatctctctgccactcttacgagaccgtttgctgatgcatactgctctaagcagcccttcttgccgcagccgcagcactctgactcatcatctaccataggcatatgtcctatctctccgcctgctccgtttactccggctatgattctgccctcgcggatgattcctccgcctacgcctgtgccgagtgtgatcatgactacatcctgatgaccctttccgccaccctgccacatctcaccgagtgcagctacgttggcatcgtttccggcctttaccttgatgccgccgcacagtactgagagtgactgtgccacgttgaacacgccccagccgaggttgacacacttcaatactgttccgtcatcctttatcggtcccggcactcccatgcctattccctcgatgtcacccatctcgatgccatgcttctcgttattctccttgatggatgctgcgatatcaggcagaatgagctcgccggaattctctgtgcgtgtaggaatctcccatgtatcgacaagctttcctgtggtctcgaaaaagcctatctttacagttgttccacctatatctactccgtatgcatattgtttcattttttcgtcctccaaatcgttaaactatgtttatattttattgcctaatcgcatatttttcaatgtttttcattgttttttatattttttctatatatagaagcgtttatatcttcatccatatgcccgctatttgtaaatccaagcttttttgcaaggcgcaccgatgctgcatttttctcgtctatccggcagtaaagctcttcaaagtctgtattttcgcgcgcatattctatgatgaagcggcacacctccgtggcatagccttggttctgaaattctggtgctatcatataacccagttcatcatgctcaagccctgcccgtcctatcagcttacctgtttccttggaaaatacaagccacatgccatactcgtaaaagccatacatgttctctatatatgccttctggtattcaagctctgtctcgtagtcgtaaagtggctccacaaagtctgtcatgccgggcttgtcatagagctcatagagcgcaggaagatctgacagtgaaagctcacgtatca

SEQ ID NO: 932 - DNA, 8708 bp, unidentified
  source 1..8708: mol_type = unassigned DNA
ttagtcttcgccgtacccgttcggatgcgcggcgtgccacttccaggcggaagcgatgatctcctccacgccggtgtgtttgggctgccagcgcagtacctccatagccttccggctggaggcgatcagggtcgccgggtcgcccggacggcggggcgcttccgtgaccgggatgggatgaccggtgaccttccgggccgcctcgatgatctcgcggttggagaagccctggccgttgcccagattgaaggcggcggagggattgccctgtttcagatagtccagcgccagcaggtgagcgtcgatcagatcctccacatggatataatcccgcacgcaggtgccgtcccgggtgggatagtcggcgccgtaaagggagagacgctcccgcttgccctgggcgacctgaagaatgacggggatcagatgggtctcgggccggtgatcctccccaatggacccgtcgtgccaggcgcccgccacattaaagtagcgcagcgcgcagaatttgaggccgtgggcctggtcgcaccaccggagcatatgctccacgatgagcttgctctccccgtaagggttggtgggcagctggcggtcggtctccacaatggggatgtgttccggctcgccataagtggcggcggtggaggaaaagaccagataggggacctggaattcgatcatggtctcgatcagggagagtccggcggtcacgttgttgcggaaatagcgctcgggtacgtccatgctttcgcccaccagcgaataggcggcaaagtggatgaccgcctcgatggattccttctggaacacctcccgcagaaacgcgcgctcgcccacgttccccacatagagccgcccgcctttgagggcggcgcggtggcccttggacaggtcgtccacgaccgccacgtccgcgcccgcctccagcagggaggccacacagtgggagccgatatacccggcgccgccggtcactaggatcgccataatcacattacctccattatctataacgtttcaagcaggaaacggccgatgctctccatggcctcgttggcttttttcatggggaacatctggaatacgtgccaaagttccgtccatacctccagcttgcaggggacgttggcctggaccagccggtcccgcaggcggatggagtcggacagcagcagctcgttggtgcccgcctgaatgagggtgggcggaaagtgcttcaaatcgccgaagaggggagagagcaggggagaggaccagtcctgcccccgggcgtaagcgtcccgcacggcgtagatataattgagggtgagcaccgggtcgatctccgcgcgctcctgataggacttgccgctggcggtcatgtcggtccagggggagagcaggatgagggcgcggggcagtcggcgcttggccgcgcggagctgatgggtgagcaccagggccagattgcctccggcggagtcgccggccaccaccacgtcccgggcgccgaacccctggtacatcaagtgatcccaggccgccgcagcgtcctccacggcggcggggtaggggtgctccggcgccagacggtattcaaaggtcagcaccgggtaaccggacacgtgggccagcttggaggcaagaatgcgggaatccccgagggtaccgctggtatagccgccgccgtgacagtagaggatgcatcgccgccggtcgtagccacggctggggcgaacccaggcggcgttcataaaaccgagctggaagggctcccagctcatacccgccatgggggctaccaaacggcccagcagctcctgccccttgcgctgcttgtccagatcttccgggtccatggtctcgggcgtggccgcggagtggatggccttcagcgcgcgcaggaacgggtccagacgccgctgctcagcctcgcgccgctgctccggcgtacgccgggccagcttcatgtggggacggtcctgctccataaaaatccttccttccgccgccctgcgcggcataaatcagaccaaaccgctctcggggcaaaatgggcctggccgtccggcgacccggcaggggggatgttgcaccctgccggaaacgcccacagccgcagtgcctgcatgtgctttgcacggcggcacggcgccgccctgcaaagcacatgcaaagcggctgcttccgcaggcattattatagcatgcccggctgttaaaaggaaggggaagatacggcaggtttccccttgtggcgcgtgccgtaacgtggtatgctaaagaaaacggagttggacgaggggggcgggaacatggcgaaggaccggcggggcggcaagccggagtggtatccgctggacaacgcgggcgtactgtactccgccattcagaaggagaactattccgccatctaccgcttttccgccgtcatggccgctccggtggaccccgacgccctccagcgggcggtggagcggaccatgccccgctttcccagctttgccgtgcggatcaaacggggggcgttctggcattatttcgagcccaaccatgccgccggtcccttcgtgaagccggatatcgccaatccctgccagccggtgcgcttccaggaggacaacggctggctggtgcggttttactactatgaaacgcgcatctcgctggaggtcttccatgcggtgagcgacggcgctggggcgctggtctttttcaagaccctgctggcggtctatctgcgggaactgggccatatcattcccaatacctgcgggatcctggatgtggacgagccgccccgtccggaggagcgggaggacgcctatgagcgttatgccacggtaaaggcccggcggtccggcctggaaaagaaggcctatccgaataccggaacgccggagcccttttataccctgaatgtgaccatgggctttttgccggtggatcagctgaaggcccgggcgaagggatacggtgtgtcgatcacggagtatctgacggcggtgctgctgaaggttatcgtggacaagcagcaccgggagcgcccccgccgggagaagccggtggcgctggccatccccatcaacctgcgggcctggttcccgtcggagacgctgcgcaatttcatcctgaccgtacgcccctgcatcgatccctcgctgggggagtataccttcgcggaggtggtctcccaggtccaccactttctgcggctgaatatcaaccgccagcagatgcaggccctgttgacgggcaacgtgaagtttaccaccaaccgattgctgcagatcgtgcccatcgtgctgaaaaacccggtgatggccctgggctaccgcctttcgggcgtgcggccctattcgggtacctataccaatcccggccccttcccggtgccggaggagatggccccccacatccgccgcatggaggttattttggggcaggccaccaatccgcgggtccactgcgcctccatcagctacggcaataccatggagatcacgttcgccgggacccttcaggagaccgataccgagcgggatttcttccgcttcctggtgcgggagggcatccccgtaaaggtggagagcaaccgcacggtccgctccgaactgatgttttaaggaggcgtcccaatgtcctattgtgtcaactgcggggtggagctggacgccaccgcgtccttctgcccgctgtgccatacgccggtgctcaaccccggccagccggtggacgagcacgcgcccaagccctttcccacccagcggggcgaggtggcgcccgcctccaaacgggagctggcgctgctcatcacggccatgctggcctcggtggcggtatgctgcggcgtgctcaatctgtttttgaaccagcagcggccgtggtcgctttacgtcatcggcgcggcggtgatgctgtggatctggttcgtgccgccgctgctggcccgggggatgcacttgctgctgcggcttttgctggatgtggcggcggtggccatctatgtgttcctcatctccgtggatctggacgggcgaagctggttctgcggtctggcgctgcccatcattctgtggggcggcgcgatcctgctgctgctggggctggtgctgcgggtctaccggcgaagcgtccttaccagtgtgaccatcctcatcggcagcgtcggcgtgcttttgttcggagtggaatttttcctggaccgctggctttccgggtcctgggagccctcctggtcggtggtggtgctggccgtctgcgccgggctgaccatcccgcttctggtcatccgcagggtgccctctctccgggaggaggtgcgcaggcgcttccacctgtaaggcacgggcgctgatatgcagaataaaacgaatattatgcataatgtgggaaaaatatcggaaaaatacgggggtcaattcgcatatttatgcgaattgacccttgctttttccaagggcgcgtggtacactgtttccaacatcagaaaacagtatcacaacggaggtcattaccatgtctgagatcaaaaaagtcgtgcttgcctattccggcggcctggatacgtccatcattatcccctggctgaaagagaactacaacgaccccgagatcatcgccgtctccgccgacgtgggccagggcgacgaactggacggtctggaggagaaagccatcaagaccggcgcggccaagctgtacatcgaggacctggtggacgagatggtggacgacgtcatcatcccctccatgcagatgggcgccaaatatgaggattatctgctgggcaccgcctttgcccggcccatcattgccaaacggctggtggagatcgcccggaaggagggggcggacgccatctgccacggctgtaccggcaagggcaacgatcaggtccgttttgaactggccatcaagcgtttcgccccggagatgaagatcatcgccccctggcgggagtggtccatcaagggccgggacgaggagatcgactacgccgaagcccacaacgtgcccctgaagatctcccgtgagaccaactattccaaagacaagaacctgtggcacctcagccatgagggcctggacctggaagacccggccagcgagcctcagtacgacaagcccggtttcctggagatgagcgtgtctcccgctatggcccccgaccaggccacctacgtgaccctggactttgcccagggcgtgcctgtggccatcgacggcgagcagaagaaggccagcgatatcatccgcaagctgaaccagctgggcggggccaacggtatcggcctgctggacatcgtggagaaccggctggtgggcatgaaggaccgcggcgtatacgagacccccggcggcgccattctctaccgcgcccatgaggtgctggagatgatcaccatcgacaaggacaccaagcatatgaagcagaagctggcggtggactttgccgacctggtctacaacggcaagtggttcacacccctgcgggaggcgctgtccgcgtttgtgaccgcgacccagaagcatgtgaccgggaccgtgaagctcaagctttacaagggcaacatcatcaccgccggcgttacctctcccgagaccctttattccgagaatctggtcacctttgaggagagcgattacaaccagaacgacgccaccggctttatcaacctctggggcctgccggatacggtgcaggcgctgcgggagcaggggaagctgtaatcggtaaaaaggctccgccttttcggcgattcggctgcaggccgccgcgcgcactcgccgcgcctgcacgcctggggcctgagcggtatgcctgcccggcgcatgtccgagcaaacacgatcggaattgacttgccgcttcggcggcagagctgtgatgctgaggaaggcggcggcggctggccgccgccttcgccttaggaaggagcgatactatgaaactctgggcaggccggttccaaaaggagaccgataccctggtcaatgattttaactcctcgatctcctttgacgcgcggatgtacaaggaggatattgcaggctccatcgcccatgcggccatgctgggcaagcaggggatcatcgaggcgcacgaggcggaaaagatcatcggcggcctccaggccatcctggcggacatcgagggcggccgggtggagttctccctggagaacgaagatatccacatgaatatcgagaccatgctcacccagcggatcggggacacgggcaagcgcctgcacaccgcccgcagccggaacgaccaggtggccgtggatttccgcctctttgtcaaagaggagatcccgcagatgatcgcccaggtgctggatttggagcgggtgctgatccagaaggcaaaggccaatctggagaccgttatgcccggctatacccacctccagcgggcccagcccaccacctttggccactatatgatggcctatgccaatatgctcaagcgggatgtgacccgtctggaggactgcctggaacggatggatgagtgcccgctgggggccggcgctctggctgcctccacctatccggtggaccgcttcgccaccgccgccgccctgggctttcggaagcccacggataactccatggattccgtctccgaccgggacttcgccatcgagctgctttcggcctgctccattttgatgatgcacctgtcccgcttttcggaggagatcatcctctggtgctcctgggagttcaagtatgtggagctggacgacgcttattccaccggctcttccatcatgccgcagaagaaaaaccccgacgtggccgaactggtccggggcaagaccggacgggtgtacggttcgctcgttaccctgctcaccgtcatgaagggcctgccgctggcctataacaaggacatgcaggaagataaggagtgcgtgttcgacgccatcgacacggtaaaaatgtgcctgccggtgtttaccgcgatgctggataccctgaccgtcaaggaaaaaaatatgcaccgcgcggccgcgggcggcttcatcaacgctacagattgcgccgactacctggtcaaaaagggtatgcccttccgggaggcgtatatgatcgtggggcggctggtgaatatgtgcatcaagaccggagagaccctggacaccttgccgctgaaggacttccgttcggtttccggcgtgttcgacgccgatgtgtatcaggcgctggaactgaagacctgcgtcaacggccgcaaagtctacggcggcccggccaaagaggcagtggagcggcagatcgaagccatcgagcagtttgtgagggagcggacatgatgggaaaaccggtcatctacatcgacggtcaggagggcacaaccggcctgcagatcgataaacgcttgggcagccgggacgatatcgagctgctgcgtatccgcgaggataaacgcaaggatctggaggagcgcagaaggctcatcaacgaggccgatctggtatttctctgcctgccggacgccgccgcggcggaggcggtgagcctcatcgaaaatcccaatacccgggttattgacgcatccaccgcccaccggaccgcccccggctgggtgtacggcttcccggagctgtacaaggacccggagcagaccattgggacggcccgcttcgtggccaaccccggctgccatgccacgggctttctggccacggtggccccgctgatccagatgcgcatcctgcatccggattaccccctgacctgctattccctcaccggctactccggcggaggaaagaagatgatcgcccagtacgagggggaggagaagccggaagagctgtacgccccgcgtacttacggcaccaccctcaagcacaagcatctggccgagatgcagaagatctccggcctggaggcgccgccggtgttctgccccatcgtggatgactacgagaagggcatggccaccacggtgatgctccataaccgttatctgaaggggcagcccaccgcccgggagctgagtctcatcctggcggcctattacgccaagcagcccgtcgtgcgcgtggcgccttatacgcagcagccgcagttcctcgcgtccaacgtgctggccgggtccgacgggttggagatcaccgtcagcggccatgagcggcagagcatcctgaccgcccgctttgacaacctgggcaagggcgcgtccggcgcggcggtacagaacatgaatctgatgctggggtttgcgcccacggccggactcagcctgtaggaggagaagaagatgaaacaagtacccggcggcgtgaccgcccccaagggatttaccgcgtccggcgtccactgcggcgtcaaaaagggcaagggggacggcaatcagccccccacgagcaagatgccggaggtgctggagggaaaaaaggatctggcgctcatcgtctccgagcagccctgtgcggcggcggccgtgtataccatgaaccgggtgaaggccgcgccgctgtatgtgacgatggaccacctggaaaacggcgaggcccaggccatcgtggccaactccggaaacgccaatgcctgcgcccccaacagccatgagcatgccgaggagatgtgcgccctggcggcccgggccacggggctcaaaccctccgactgtgtggtggcctccaccggcgtcatcgggcaggagctgaacatcgccgccatccgggcggggatgcccgcggcggcg

SEQ ID NO: 933 - DNA, 35461 bp, unidentified
  source 1..35461: mol_type = unassigned DNA
atgtacaagataagttggttaaggagttcgaagctaagcaagctgaagaataaaagacttcacttcgtctgtttttataatttgttaaagccgttactccctcagaacgaggggtaatggcttttttattaacactgattaagaacatgcgtaaatgtgaacgggaatgattaattttttattaaatttgcaaaccaaacacacgctgatttgttataatgctcgtaatgcaacttaaaaaactcttttcggttaatttacgagaacttgcggttaaatcaggttaataggttaggagtgttaattagggagtgttaattttgtgactatgaagaagtcaacaatatggatattaggcatcgttatggggttatctttcctcagcctcttgtatctgcaaatcagctacatagagaagatggtaaagatgcgtaacgagcaatttgatgaatctgtgaagcgtggactgatggctgcttctaaagaagtggagtccgctgaggttgcccgttggttgcgggaagacatctctgaggcagaaaagagagcgtgggaattgactgagcaaggacaggcattggtgcagacacaacggtttacggtgacgtcgccggatggttccaagtattcggccatggaacttcagacgatcacaaataagccgtcagaactgccgagagcgatgatttcgcgtaagcatggcgctaagacgattcctaaaacagctcgtacacaaattgatttaatgaaagaacgttatgtgtaccagcgtggcttgttggatgaagttgccttgcagatgttatatacggcaagtagcaagccgattgaggaacgcatcaactttaagaacctggatcagtacttaaagtcgggcttggtagataacggcattgatctgggatatcactttaaggtgattgaccgggatggacgggaagtataccgttgttcggactatgtcgatgaaggtagcgagtattcttactcccagcctttgttcctgaatgatccacctgcccgtatgagtatcgtaaagatacattttccgggcaaaagagattatattttcgactcgatcaactttatgataccgtcgatgatattcacctttgtgttgctgattacgtttatcttcacgatttatatcgtgttccgccaaaagaaactgacggagatgaagaatgactttatcaacaatatgacgcatgagtttaaaacgccgatatcgactatttcgctggcggcgcagatgttgaaagaccctgcagtgggtaagtcgcctgccatgttccagcatatatcgacggtcatcaatgatgagacgaaacggttgaggttccaggtggagaaggtactccagatgtcgatgttcgacaaacagaaagctaccttaaaaatgaaggaactggatgccaatgagttgattaccggtgttatcaatacattcaccctgaaggtagaacgttataacggtaatatagagtcggaactgaacgcaacagacccgaatatctttgcagatgaaatgcatcttacgaatgtgattttcaatctgatggataatgcggtgaagtataagagaccggatgccgatttggaattgaaagtgaagacctggaatgaaccgggcaagctgatgatttctattcaggataacggaataggtattaagaaagaaaatttgaaaaagatatttgaaaagttctaccgcgtgcatacaggtaatctgcacgatgtgaaaggctttggattgggattgtcttatgtgaagaagattattacagaccataagggaactatccgggcagagagtgaactaaacgttggaactaaatttattattgcattacctttacttaaaaattaatgatatggacgagaaactgcgtattttattgtgcgaagatgatgaaaatcttggcatgcttttaagagaatatttacaggcaaaaggttattctgcggagttatatcccgacggtgaagctggatacaaagcttttctgaagaataaatatgacttgtgtgtgtttgacgtgatgatgccgaagaaagatggtttcactttggctcaggaagtgcgtgctgcaaatgccgaaattcctatcatcttcctgactgcaaagacactgaaggaagatattctggaaggctttaaaatcggtgcggatgattacatcaccaagccgttcagcatggaagagttgacattcagaattgaagcaattctgagacgtgtacgtggaaagaagaacaaagagagcaatatctacaagataggtatgttcactttcgatacacagaaacagattttgtcaacgcctgaaaagcagacgaagctgacaacgaaagagtctgaactcttgggtttgctctgtgctcatgctaacgaaatcctgcaacgtgactttgctctgaagaccatctggattgatgataactacttcaatgcacgtagcatggatgtgtatatcacgaagttgcgtaagcatctgaaagaagatccttccattgaaatcatcaacatccacggaaagggatataagttgattacaccggaaccggagtcttgatagactctttgcataaaacaaaaaaggcggtcgctatcaaagcaaccgccttttttattctttttctgacgattagtctgccaatttcttattgatggcaatgtatgaaatcaatcccagtaccatcagaactgctgaagtacctaaaatggtattgttgtttacattaccggtaaaggaacatgcaaccaaaattacagctcccaccaagactaatatcaagcccagattttttaataaacctttcatgtgtgtgtattttaatagattattatattcttgtcacaaagaaaagcataattctttaacaagcgaaattatttttgcaaaaaaaccatattttaataaagaatgaagaatgacgaatgaaaaacgaagattattaatcactaaaccctaatcgctgatcactgaatttcagtctttcgtattgaaaaatatttttctcaatacttcctggcttatgctcagttcttctacggtaatgccgcgtaatgcttcttttaaagtttggttagcgattacccgtgcgcgttcttccagttcttttccatctttggtgaggtggataagattggtgcggcggtcttttttatccgagatacggactaccagatgttgacgttccatgttatcaatcaggcgtgtcatactgggcttgtctttaaaagttgcattgcacaactcttgttgcgtcactccgtctttttcccacaaaaagatgaggacagtccattgttccggagtaatctccaaaccgttctggcggaagttacgggacagttttcggttgattgcggcggaaactttaccattcaggatggcaaaaatcagccggatgtcaaagttaaattgctcgatcatgaaattattgtttaaacaactttgcaaaggtaagtcacttctatgataaatcctaccttcaggcacaaaaaaacattaaatgtttgtagatcaaaataaaatccctacctttgcaccgcaaatttttaaacgaattattaattcattaattaaacaagtatgaatcaatacgaaaccgttttcattttaactcccgttttgtctgatgttcagatgaaggaagcggtagaaaaattcaaaggcatccttactgctgaaggtgctgagatcgtaaatgaggaaaactggggactgaaaaaactggcatatcctatccagaagaagtcaactggtttctatcagctgattgagttcaatgcagaccctactgttattgacaagttagagcttaacttccgtcgtgatgagcgcgttatccgtttcttgactttcaagcaagacaagtacgctgctgaatacgctgcgaagagaagaagtgttaaatcaactaaaaaggaggattaatcatggcacaagttcaatcagaaatcagatatttaactccgccgtcagtggacgttaagaagaaaaaatactgccgtttcaaaaagagtggtattaagtatatcgactataaggatcctgaattcttgaagaaattcttgaatgagcaaggtaaaatccttccgcgtcgcatcaccggtacttctttgaagttccaacgtcgtgtagctcaagctgtaaagagagcccgtcacttggctttgttgccttatgtaactgacatgatgaaataataggaggaggaaagtatggaaattatattgaaagaagacattgtaaacttgggttataagaacgacatcgtaactgttaagtccggttatggtcgtaactacctcatcccgacaggtaaagctgtgattgcttctcctgctgcaaagaaaatgttggctgaagatttgaagcaacgtgctcacaaattggaaaaaatcaagaaggatgctgaagcattggcagctaaattggaaggcgtatctttgaagatcgctactaaagttagctcaaccggtactatcttcggttctgttggtaacatccagattgcagaagaattggctaagttaggtcatgaaattgaccgtaagatcatcgttgtaaaagacgctgtgaaagaagttggccagtacaaagctatcgttaagctgcacaaggaagtttctgtagagattcctttcgaagttgttgctgaagaagcataattaaacttcatatataaaagaagcccggtttccgaaaggaggtcgggcttttttatttactgactggttagttctaattgtattctttatcaataaaagtaattgtttcatcaattagtttcatgtagtggctgtatgtgagatgtgggtcatcatgtacaaaagagatttgccgcatggcagcaaacccttccgggaggaggatggtgaattccaagatttctcttagtgacttattctcattagaaatttttctaaattcttgctgactgacgcatttctctaccgctgtctcttttgctttggagaatccttcataaaaaagatgtgcattttttattacggcataggcttggatgatttcgacagcaagctctttatttttaatattttgcatgacagaagaagctctgagcatttccatagcatcggtgaccggaagaaaatcttgtgattggaatgggaaatagccgtagtaattcagagagtcggaggatgcttcattcattttgtctttatattgaagcaggtagcatgcaccttctttgttgattttttcgattttcatcatctcttctattgtttcccggttgataagtaattcacttttgaccagttgcagagcctgtgccacctcttttttcttgttgtgctcctgaatcatatcacttcccacgaatgtgattgcaatacccagtacgactgcaatgaaattgcagatgaaatcacctaatcttcccttgatagctgatcgcttaattttttctatcagttttgtattcataatattagcataatatgtagattagcaaagataaggattttcagaactaatcaaataggaaaagtgatgaatcactgaagtatctttgggatggtacaaatgggcataaaaaaaagtctgttcgtgctttcgcacgtcagactttcaattctctcagtgtgttgttctgaattattcagctacaactgctgcgctatctactgctacagtatcagctgctgcggctgcctcggctgctgctgcggctgcttcttctactgctgcgattgaatcagcaatacggatagaatctgctgctgctttttcagcgtcagcttgtttgttaccacaagatgcgaaagatactgctacgatagctacggccatcaaaactaattttttcattttctttgctttttaaaaacgtaatacaatcaattgctttattaaaacgctgcaaaggtatgtactttttcaatatgttgttctccaaatcccaactttttttatgttttttttggaggttagccccttttgattactttttgtatgtttaataacatactaatcttctgcaatactgttatataagtagcgtttgatgctccttttaggagttttctcaaactcggtaggatagagctgaatctggctgactttctcgtaactggccacactgctattcaggttctttaagttctcgttcatgatggttttgaggttttcctcttggttcagtccaagggaatccaaagcttcgtaatctgcatagactaaagctaccagttttttattgcgttcgataacgagactttccagtacgaaaggcaggttgttgagacgtgcttcgatttcttcggggaagatgttttgtccgctggaactcaggatcatggtcttactgcggccacgaatataaaggtttcctttttcatccagtttacccaagtcaccagtacgtagccagccgtcttcggtgaagacttctttagtggcttccggattcttataataacctgtcattacattttcgccgcgtacctggatttcgccgatttctgcctccggattttctttgtagatacgggcttccatgatgtcgagcactcgcccggaagaagtcgggatgaattcgttccagggagcgtaactgattaacggcgcacactccgtcatgccataaccgatggtgaacgggaacttgatgcgatggaagaattcttccacttccgggttcatggcagcaccgccgataatgacttctttgaaacggccgcccaaagcatctatcagtttcttccggatttgcccatagatttgtccgtcgagcaaaggaatgctgagtgcccatttcatagtctttttatttatgataggttgaatgacattcttatagattttctcgataacgagtggcacggtaataatcaagctgggttttacctcttcgaaggccttcatcagaatctttggagaggggactttgcccaaaagtgtgacgtgagtacccacggcagtagctgtaagaaagtcgaaagcgcaaccgtaggcgtgagccaagggtaagaaggagagtactttatctccctttttcaacaactcggtgcggataccgaaagtgacatttcctgcgagattgtttcctgtcagcatcacgcccttactgaaaccggtggtgcccgaggtatagttcagcagcattaccttatcattggaaagagtggtatactgcacgtcttcccggtggaaacctttcggataagttatgtgcatttcttcatccaggtgtttgaggaaacgattgattgtttcaccgtcgcgctgatgcaggcaacggaaatcggaaagggagaatacggcacgcaatccggccaggcgttcttcttccagatgttcccagatggaatcgctcgtaaagaggaaaacagactcggagtggttgacgatatgatgtacatcattcggattaaaatcttgaagaatgggaacaacgatagctccgtaagtgatggtagccatataagcgatgcaccaacgggcattgttcttaccgataatagcaattttgtcgccccggcgcaagctgcaatgtttgaatagcaagtgcaatttggctatctcttgcgccacttgtccataggaataactctcgtcttcaccgtaatcggtatagcaaggaaggtcccagttttcacggaaactctgctcgtagagtttgataaagttttcttgtatcattgcacgaaaattgatgatttgtgcaaaagtagaaaaaatctaataattatatgtaactttgtagcagaaatgtgtttagaatagatatgattgataccaatatatttcaagataagacagcggtttactatacattaggttgtaagttgaacttctcggaaacctctactatcggtaagattttgcgggatgcaggtgtgcgtacggcacgtaaaggcgagaaagcagacatctgtgtggtgaacacttgctcggtgacggaagtggcggataagaaatgccgccaggctatccatcgtctggtgaagcaacatccgggggctttcgtggttgtgaccggatgttatgcccagttgaaacccgaaactgttgcaaagattgagggtgtggatgtggtgcttggtgccgaacagaaaaaagatttgcttcaatatctcggcaacctgcaaaagaatgagtcgggagaagcttatgcttcggcgctgaaagatatccattcgtttgcaccgtcgtgctcacgtggcgaccgtacccgttatttcctgaaggtacaggatggttgcgattatttctgctcctactgtaccattcctttcgcccgcgggcggagtcgcaacggaacaattgcatccatggtggaacaagcccgccaggctgcggccgagggaggaaaagaaattgtgctgacgggtgtcaatatcggggatttcggtaaaactaccggagaaactttcttcgatctggtgaaggcgctggatgaagtggaaggcattgagcgctaccgaatttcctccatagagcccaatttgctgactgacgagatcatagaattcgtttctcattcccgcagtttcatgcctcatttccatattccgttgcagtccggtagtgacgaagtgctgaagctgatgcgccggcgatatgatacggaacttttcgcttccaaagtgcggaaagtgaaagaagtgatgcccgacgcttttatcggcgtggatgtgattgtgggcacacgtggtgaaacggatgaatactttgagcaggcctacgaatttatcaaaagcctggatgtgacccagcttcatgtgtttagctactccgaacgtccggggacgcaggcattaaagatagaccatgtggtaactcccgaggaaaaacaccgtcggagtcagcgtctgttggaactttcggacgaaaagacgcatgcattctatgcccgtcatatcggacaaaccctgcctgtgttgttggaacgttccaagccgggaactcctatgcatggcttcactgctaactatatccgtgtggaggttccccacaatgatacattggataatcaggtggtgcctgttcgtttgggcgattttaatgaagacggaacggcgttgcagggaatggtgctattataataaggtataagaaaagtatgaaatcgaaacttgtctactggctgacttacgctggcatgtggcttctggctctgcttcctttccgggcactttatatattgtccgatggggtttgttttttgatgcgtcatgtggtgcattatcgtcgtaaggtagttcgtaagaatctgaagaattcttttcctgaaaaatccgaggctgaactgcgcgagattgagcgtgagttttatcgctatatctgcgactatatgctggaagaaataaagatgatgcgtatgtcgttcgaagacctttcccgtcgtatggagtatggtaatactgaagaatatcttgccatgctcgaaaaacatggaggtatcgttgtactcattccccattatgccaattttgagtggctgacggcgatgggagccttcatgaagccggaagacgtaccgttgcaagtgtataaacctttgcgaaacaagtatatggatgaaatgttcaagatcatccgtgcccgtcatggtggctataatgtaccgaaacattccactgcccgcgaagtgatccggttgcgccgtgaagggaagcatgtagtgatcggactgattaccgatcagtctcccaatcgcaatgaagcccatcactggacaactttcctgaatcaggataccgtatttatggatggtggtgaacgtattgccagaatgatgaattatcctgttttttattgtgaattggaaaaacggggtagagggtattgcaaagcatactttgatctgttgactggaaccccgaaacaaactgccgagggagaaataaccgaactatttgtacgtcgcttggagcagaccattcaccgtgctcctgcttattggttctggtcgcataaacggtggaaactcacacgggaagatttgaagaaacagcatgaataagatagcagttgtcatattaaactggaacgggtgcgatatgctccgctcgtttcttccttccgtagtacgcttttctgaagcggacggtgcggtagtgtatgttgccgataatggttctacggatgcatctgttgatatgctttgtcgtgaattccttaccgtccgattgattctgttggaagaaaatcaaggtttcgctgatggttataatatggcattgcaagaggtcgatgccgagtatgtagtacttctcaattcagatgtggaggtgacggaacattggcttcagccactggttgactatatggatgctcatcctgaagcggcggcttgccagccgaagatacgcagttggaggcagaaggaaatgttcgagtatgccggtgcggcgggtggttttcttgatcgttacggttatccgttctgtcgtggtcggattatgggtgtggtagaagaggataggggacaatatgacactatcattcccgtcttttgggctacaggtgcagctttgtttatccgcctgaaagattatcgtgaagccggtggattggatggacgtttctttgcccacatggaagagattgatctttgctggcggcttcgtgcacgtggccgccagattgcctgtgtgccgcaaagtgtggtttaccatgtaggcggtgctacgctgaagaaagagaatccccgaaagactttcctcaattttcgtaataatcttgtcatgctttacaagaacctgccatccaaggattttgcttccgtgatgcgtacccgtgcagttcttgactatatagctgcattgagttttatacttaaactacagttccccaatgcattggcagttcttcgcgcacggcgtgaatatcgtttgttacgttcttcttttactcctgcacgtgaagagaacctgaaaaaaacttccctttccgtgataccggaatggacaaaaagcagtatcttggcacagtattatttacgtggaaagaaatttttctcgcaattatagctttttctttttaccgattgtttattatttaaacgtattgccttatgacaaaattagttagaaagattggactggtggcgcacgacgccatgaagaaagacctcatagagtgggttctctggaactcagaattgctcatggggcacaagttttactgtacaggtactacgggaactcttattcttgaggctcttaaggaaaagcatcccgatgttgagtgggattttaccattttgaaatccggtcctttgggtggtgaccagcaaatggggtctcgcattgtggatggcgagattgattatcttttcttcttcactgatcctatgacgttgcagccacacgatacggatgtgaaagcgctgactcgtcttgccggtgttgagaatatcgttttttgctgtaaccgtagtacggcagaccatattatttcaagcccgctattcgttgatccgacgtatgaacgcactattccagattacaccggctacaccaaacgatttgaaaataaaccggtggttgccgaggcagtggagtctgcaaaaaaacggaagaaaaagagaggataaaggagacggttggttctccgataaggataaaaagaggggaagaacttcacatcggaaagtccttcccctttttctatgtgaagcttccggatgcttataacaaaaatacagacgacttatccgctttattctctacagagtttattttgaaaacagaagtgatagtatttcccatcggcagggcgatacaggctaagacactttttttaagaggataaggtttaaggatagaataggataatcttaacggtgcagctattgaagtgtcatttataagctgttttagctatctacatgccacaacagaacgcttggaaacaatcagaaagatgggaagaaagccgtatgaaaaacatgctttgctttattgttttttttcttttgcctgtagctaaacttcgtcccgcagttgtgggctctacgttttccagttgagggctgtgcagcctgcaattgcgggatggacagcccacaactgcgggacgaagtttagctgcgggcataatgacattaacctgaatgctttttgggaaaaagtaaggatcatatcaagttttatatctatcatttgactttctacataatgagagtatggggcttatcatcccttaattcctaacgaaatgctaactttattcacttgtgcgacgaataaaagagatatttgcatcaattcggataaaggttgcataacgtatattaagcgcttgtgaattagtgaattacaagattaaaagcacgctttttgagccgttttacggtgtagaatgaaactttcctacaccttcctacaccacttcctacactatctatttatctgataatcagataaacataatagtcggtgtaggatgtagacaatattgatgaaaactcaactgtgtgagatttccttttattgcttactgagttcactttaattaaaaaaaaatgtgggagtgggttaagctctttcacattgcacttccactcctgccgcatctaagtctgcacccatgggtggattacgtttagcgagttttagctcaatagctttaacggtggggaaagtacggaacaggcgttttatgatacgtccgcaaacatgctccagcaatttagaaggtatctccatctcagccttcacattttcgtatacatcggcataactgacggtatgtgtcacgtcgtcagtctcggctgcacgtgcaatatcgacttttaatttcagattaatgacaaactcattacctacttcccgctcttgctgacctacaccgtggtaggcaaagaaacggacgtcatcaaggaatatataactgttcatatcaaatagaatattcggtgaatgacaaaaataagaattacctcccagtaaacaaagaaaacaggtgtattcttccataaacaagcgtttgatttggaaaatgagttacgtagtcagccccatacccttcaggggattggggataaggcgatggtattttaaaaaaaaggcacctactatgggtgcctttttctattataaagattgagagtattatccttttcgtccggtttgttctatcagtcctttgatcttctcgttcagactttccgctttcatcagttgttccagcgtcaggtgcatacggtagcgccagtaatgtctggggttagcaggcacgttgatgcgctcttcctgtacattggggttgcgccattttccgtccatagccatccagtcctgcaaggagaggatgcacaggatggagttgctgtaaagatggttgcgtaccacttgctcacaaagttccggagtggcaacggcaggtgcagcgccgtaatgtcccagcatggtgttgtagtaccgttgcgtttgctggaaatcttcttcccaccagccgcgcagcgtagacatatcatgcgtagagatggtgcaaaccgagcggtacggataccagtccggatgtccgaattcctgtgaaggatctttcggcatgcgttgtatctccagactaaggatacgcaggtcgttcatcacccaagctacacaatcggggatcatgccgaggtcttcaccacataccagcatacgggtggattgcgtcagttgcggcaacttcttcatggcttgttcgcgccagaactcgttgtggcgatgatagtaatactgatcgtacaaacgattgaatgctgccttctcccaatcattcagggcacggtaaatgtaatcgtgttgtacgccgatgcgcggatggaatttgtgcgggtcttcacggtcgggcacaaacagtacgtcactgattaatgcgtacagtccgtcgcgtatccagatgctgtcttcgtccgtctttccggcaaagtaagcctctactttgcgctgtgtgtcgaactcgggacgcatgcgatatatttcccatgtttccgtaggctctatgaaggtctgctttacataatcagtatgcgggccgaacatttgtccgaggaagtattcatggatatagggtttcgtgaagaaatcttcgcggaatgccattccgtagccttctatttcttcgcgcgtcattggcagggcgggaacaaactggcccagcagtccgtgtacggcatgcatcgggatttcccaaatgcggaagaaacccaggatgtggtcgatacggtaggcatcgaagtattccgacatcttgcggaaacgcttcatccaccaggaataaccgtctttttccattacgtcccagttgtaagtagggaagccccagttctgaccgttcacggagaagtcatcgggtggtgcgcccgcttgtccgttcaggttgaagtagtagggttctgtccacgcttctacgctgttgcggctgatgccgataggaatgtcacctttcagtactacaccattggctcgtgcgtgttccgttgcagccagcagttgcaggtgtaggtggaactggatgaagaagtagatggcgatatgcggatagtcggcagattccggctggcataacttttctatttcttctgctttgtattctgtgaatttcggccattcgcggaagttgggtgtcttgtaggcatcgcgcagatagctgaacacagcgtatggctgtaaccattctttgttgttttcgaagaacttccggaaggcatcggatgccagaacttgttcgccttcctgtttgtatatcaggcggaagaactcccattttgtctgatttactgcttcatagtctacggtaggcaaagcattcagctctttctgccgtttattgaattctgtcattgcctttttgtccttcaacgtacccatctgtttcagatcggcatacatggggtggaacgcataaatggatatgctgttgtacggataagaatccgtccatgtatgtgtcatggtggtgtcgttgataggtaatatctgtacggctttctggcgggtaagtacagcccagtctatcatttgtttcaggtcgccaaagtcacctactccgaagctcttttcggagcgcagcgagaagatgggtacggctactccggcacctttccagtcgggtagggcgaagtaaacgtaacggtcaccgatcaccagtgtttcgttagcgcctatctgcggatcggccatgtagcggttggggttgttttcccatgccacggcacgacgctctttcttattataaaggatgaatttatactccagcgggaagctgattttcgaggcgtctacttcaacctgccattccgggaagttggcgtcgctcatcagaacggctttatccgcatcccaatctcccagaactttctggttgccgcaaatgcccagacagtgatcattgtcgatacatggagcatacgccttgatcaataatcctttcttgtggctctttggagcggcgttacgttcgggatgtgcaagcagggactccgtgaaagcagacgtgtagaagtattgctgttcgggcagattcttccagcagtcttgcaggcggtagactttcttcttgtcagccgatacatagagcgtgcggggaaggctgttccactccgtacgtgtatctttgccgtcgcgataaatgtgataactgtattgtacgatgccgttttcaggcgcttgaatgtccgcatctaaagtccagtgaatgccatccactgtttgtaaaggtatggctttaccgggctgattgttgcccagttcaagaatagatcctaagactctaacctcttcaccccaacttgtgcggtactcgatatgaaaagatagtatcatataatattagatttagtaatagctgcattgattatgcaagtatagacattattccgcataatcaagcagctaccgctatctaagttttttaaattcctatgcaaacgtttgtgcttgcatttcgcagagctgtttttatccgcaacgtgaagctccgcaagtggtacaaatgaggcaaccttcctgatatacaagtgtttcgttgccgcagttcggacatttcttgcctttggcttctgtgccgtccgttatgtatttcttcaatgcgcgttccacaccgttcttccaagtattgatgctttcgctgtccagttgcagagagccgaccagcttgataacctgttcgataggcatacgataacgcaatactccggagatcagtttggcgtagttccagtattccttgttgaacttttcggacagaccttcaatggtgactttatatccgcgtttgttctggaactggaagtcgtaacgcttgctgccgtccttgtccaccttcttaataatgtgtccggaagtaacgttcttcggcagaataatgccttcatcgtcgtcctgaagaccggtgaagatttcgtaaggatgtccgtccagcaaaccgacgaatgccacccatttttctttattattctggaaacgtacgatgtcggcatccagaactgtcgggcgggtttctactaccgtaggcggcttgcaaggaggcatttcttcttttttatcgctcttggcagaaatgagtacgcccgaacgtgagccgtcacgataaaccgtacaacctttacaaccggatttccatgcctctacatacaggcggtttaccaggtcttcatccacatcgttcggcaggttgatggtcacgctgatggagtggtctacccatttctggatacgtccctgcatcttgactttcattagccagtctacgtcgtttgaggttgctttataataaggtgattgctcaactaatacgtcgatctcttcttgtgtgtaacgtttggaaggattgtgtccttgcgcttccatccatgtaacaaatttggggtggaagacaatatattcttcaaaagcatctccggtttcatccacgaagtctacgtgtacgttagtgtcgttcggatttactttacggcgacgtttgtatacgggcaagaatacaggctcgatacctgaggtagtctgagtcatcagactggtggttcccgtcggtgcaatggtaaggcaggcaatattgcggcggccgtatttcttcatatcctcatataactggggatctgcttcgcgcaaacgattgatgaacggattattcttttcacgttcggtatcgtaaatttcgaatgcaccacgttcttttgccatttccactgatgaacggtaagcactcagggcaacggtcttgtgcactttttcagagaattcggtagcttcttccgtaccgtaacgcaatcccagtgcagcaagcatatcaccttcggcagtaatacctacaccggtacggcgtccttgtccactcttcttataaatcttgtcccacaatatacgttctgtatgtttcacatcttcgctttcggggtcagcatcaatcttttccatgatgcgttctatcttctccaattccagatcgatgatatcgtccataatgcgttgagccaacgctatatgtttctggaacaattcaaagtcaaagtatgcatccggtttgaaggggtttaccacataagaataaagattgatagccaacaaacggcaggagtcatacgggcacaagggaatttcaccacatggattggtggaaacagtgcgatatcccaggtctgcataacaatcgggtacggattcttttaatatggtatcccagaacaatacacccggttctgccgatttccatgcattgtgaacgatcttcttccacaaattggttgcattgatttccttctgcacagttggttcagcggcattgacaggatattgttgaatatatggagtacctgtgatagcagcggtcataaatgcatcgtccagtttcacagatacattggcacctgttactttgccttccgtcattttagcatcgatgaacgcttctgaatcgggatgtttgatagatacacttagcatcagtgcgccacgccgtccgtcctgagcaacttcacgtgtagaattggagtaacgctccataaatggcaccaggccggtggaggttaaagccgaatttttcactggagaacctttcgggcggatgtgcgacaaatcgtgtcctacaccaccacggcgcttcatgagttgtacttgttcttcgtctattttgaagatggcaccataagaatccgcctctccatctactccgatcacgaagcagttagacaaagaagctacctgatagttgttaccaattccggtcatcggacttccctgcggaacgatgtacttgaagtggtcgagcagatcgaatagttcctctgcacttaatggattagagtatttagcctcgatacgggctacttcattggctattctccaatgcatgtctttcggagacttctcgtaaatatttccgaaagagtcttttactgcgtacttgtttacccaaacacgcgcagctaactcgtcgccctgaaaatatcgtaaagattcttcataagcttcctcgtaagaataagtttgtttttccacgattcttttttccttagatttattttttaataagtaagagtgtagaagtgatacctatcattaacaaatgcgattgcaaagctaagaatgttttttgttatagcaaaataaaaacagaataaattatgaacaggctatgagattcccatttttgaataatagattgctgatttataaaatattagcactgttgtgtgaacaaaaagtttccaaaaaagaaaattgtttctagactttgattaaacaggctaattgattttagaaaacgtagataaactttaaactcgttatttgacaacaaattgctattctttttctatatttgcaaaaaaataaaagaatggaaatcctaaaacagagaagaacaatccgcaaatatcaacagaaagatatttcttcagatttgttaaatgatttgcttgattctgcatttcgagcctctacagtcggaaatatgcaggtgtacagtgtaattgtaacgcgtgatgcagaacggaaggctaggttggcaccggctcacttcaatcagccgatggtgaaaactgcacctgtggttttgacgttttgtatagacctgcgccgttttactaaatggtgcgaacagcgaaaagcaactcccgggtataataatttagagtggttcgtaaccggctctgtagatgccctgctggcagcacagactttttgtgtggctgcggaagaaaaaggattaggtatatgttatctgggtacgacgacttacaatccgcaaatgataatcgaagccctggagttaccggaattggtgtttcctattacaacagtgacggtaggttggcctgccgaggagcctgcacaggtagatcgattgccgctggaagctattgtgcatgaggagacgtatcatgattatactcctgaagatatagatcgcctgtatgcctataaggaatctttgcccgaaaataagcaatttatttttgaaaacaacaaagaaaccttggctcaagtctttacggacgtacgttataagaaagaagataacgaagtaatgtcggagaatctttggaaagtaataaaaaagcagggtttttaaccctgcttttttaatgatgcttggatatcatctatttctgcgcggaaagttttgtctacttcccgtaattctttaatggttttgcaggcgtgcaatacggttgcgtgatctttgtggcctattaatgcgcctatcttagccgtcgaaaaatctgtataggatttagcgagaaacatggctatctggcgtgcctgtaccacttcgcgttttcgtgatttagtatggatggtagcagtatccagtgagaaatgcttgcataccacgttgatgatgtcatcaacggtaatagatttactttcactttttactaccttccgtacaatgcgttgcgtcagttccagatcaatttccttattatatatagtagaatgtgccatgatggagatgacgataccttccaggtcacgcacgctgtcacccacattttctgcaatataatcgattacttccggagggaactgtaaaccgtcacgatgtatcttattgcgcaggatgttcttgcgtaattctacggttggtctttccagttcagctaccataccccatttgaaacgggtgatgagtcgttcttccatgccttgcaataatacgggagcacggtctgaagtcaggataagctgtttaccgttttggtgtaagtgattaaagatatgaaagaatgtattctgtgttttggtaacaccggcaaattcttgaatatcatcgataatcaatatatcaattgattggtagaagttgataaaatcgtttgtagtattgttacgtacagagtcggtatattgtacctggaacagatgtgccgatacatatagtactctcttgtccggatagagttctttgatttttgtgcctatagcatttgcaaggtgcgtctttcccacgcctgatgctccatagaaaaacagcggattgaaaattgttttcgccgggttttgagcgacagcttctgctacgctgcgtgaaagtttgttgctatagccttctataaatgtttcgaagttgtattcaggattcagatgaggatctaaatctgcaataggagcttgcggtatttctctgccgattacctttttctgtggaataatagtgcggggagtagattcgagattgacggtagtacgtgaactcttatccaccataacattatacaataacttggtgccatcaccaataactttatatagagttttacgcaacaagtcaacaaacttgtcctccaaaaactcatagaagaactggctgggtacctgtacgaccagcgtcttgtcctcatattttaaaggtatgatggggagaaaccatgttttgtatgtctgctccggaacattgtctctgatgatttcaagacagcggttccatagcccgacatgatttaattcactcataacggctttaaatacatttattaattaagcaaaacttctacgcatgcaaaattcgcaatcttatttgagaaaaacaaatgtgttttttcttgctttttatctaaaaacaataatctctttactttcaactacttatcttgtttcatgtaaatagccccacagggaggctattgcatttttataagtatctgtattctagggtgatatataagaaaggaataaattttttaacttttcaaataatctgacagatgggaatactttagtttctacatggacttactgaggctttttcttccaattctgtttgctcctattatttagacttattctatttaaagagatttttcctacttatcttttttgccgaacagggagaaatgaacataccttttcggatgtgatttcaggtcttcaagaaggctggcagcattggctgttgtagcattcaaattattgtaaagcgatggatcgtttaacaacaagccgattgtattgtctttcctgcctaattggtctgtaatcatttttgcatttgctaaagtcgaatctattctggcaaatgcggcagcgtaatctatttctttcagattatcactgacagtgacgaaattatctcctatggtgttcagctttttagtaagctggggaatatctttactcataatggcctgtaactgtctgctggtgacttccatgcttgccattgtgttttgcacgctgtgcagtgtaccgggaattgccgggtctccaaggattgtattcagtgaagcaaggatagagtctagcttgggaagcatcttttctacctgaggcatgatggtggctacctggtccattacaccattgttgacattgccttgtagggtatcacctgtcagatacttctcgcgtggattattggcaagtagtaagttcatttttacaccacccatcagttcggaggctaattcggcggtactgcctttaggaatacgcagttccgggtctacatctatttccgctaccacttttcccggttcattgtagtcataataaaggtcgcgtacaatacctacacgaaagccatcggcaaagaccggactcgatttggtcaatccattaatgttatggaacttgacgtagaaatagttggtaggcttaaacatatgaatgcctttcaggtagttaataccatataccaatatgcagagagcaataatgcccgcaattcctattctaacttctttagtaagatacttcatcatgatgttatagtcttattatttatttcttttctttttaaattcttcgatagcagcgctgacgcttgtcttctttccgtttttgaaagcaatgataaatgcgtctttgaattttggtgctatctcccgtttagttcgtaataccttattataatcggtcgatgcaccgtatgtgtatttacaaagtccgccttcctgataatactctacacctttcagcccttttagtcgtttgtcattagcggcaagcggacgggaagaagtaagtatctgtattttaaacactggagcagcactatcggtttgcctgtcagctactttttctgtattttgtttggtttcggtgttattggaaacgggggatgcaggtatctcttcttctaccctaccggcatccgtatcctccggtagtagggtgcggctgcttcctgtcatccgtatttcatgttcacgtttataagacaggaaagcacggaatattccgttggcaagtgtggtggttcccgcttccgaattgagataacgttcttcttccggattggatatgaaaccgagttctaccaggatgctgggcatggcacttgctttcaatacaaggaacccagcctggtgtacaccacggtctgcacgcttacaggtatggcggaattctttctgtaccaatgaggcaaggtgtacgctctgagacatgtatttatcttgcatgaattcaaagatgatataagattcggctgagtttggattgaatcctgcgtaccgtgtcttgtaatcactttcgtataaaattacggagttctcccgtttagcgacttctaaattggcatccgacttggctaaaccgagcgtccatgtagaggctcctttaacagttttaccgcccgctacggaattggtatgaatggaaatgaataaatcagctttagcattattggctatttccgcacgtctgtcaagtgggataaatacatctctttcacgggtatataccacttttacatcagggcaattcctttttatctgtttgcctaatttgagggcaacattcaggttgatagtcttttctttggagattcggcctaaagcaccagggtcatgaccaccatgtccggcgtcaataacgacaacgaagtcttttgcttcgatgctggtagtgcaaaaaggagagatgaacagcccgaagcaaatacagatatataatatgtgtcgtttatatagtttcatacccaaaagtcgttgcaaatgtagtggaaatttatagaaaactcacgttttacatgaagttttgttacttttccccaggatttgtgagagatttctttaaaacagactaactttgcacccgcaaattaaatagaaaaaaggtatgttagttcgttttcttaagaactggacattgccactggcgatgctttcaggtactttgggatactttattctcgcaaatgtccctttcttggcgcctaccaaaccatatattaatgatttgattgcgtatattactccactgctgatctttgcccaactgttgcttactttttgtaaagtagaaaaactgaatgaactgaaacctaaagcatggcatggctggttgctgctgtttcagacaatttcatgtctggcaattgccgctttgctggtatgctgtccgatggatgaaatatatcgggaagtatttgagggggcgatggtttgtgtgatttgtccaactgcaactgcagcggctgtcatcactggcaagttgggaggcagtgcatctacgttgactacttataccttattgtctaatttgctggcggcagtagcggttcctttggtttttccgttagtggagcctcatgctgacatgactttctttgctgctttcctgaaaatcctgagtaaagtgttcccgttgttgttgttccctttcttcctggcgtggtttctgagagtgtttatgccccgtgtgcaccattttttattgggtttccatgatcttgctttttatttgtggggcgtagcgctcgctattgtatccgggcaaactgttcgttccctagcaatcagtgatgcaccggtttcagtggaaatactgatagcctttgccggattagtggcttgttgcctgcaattctttctgggtaagaatataggtggacgttataatgaccgtatcagtggcgggcaggcactgggacagaaaaatacggttcttgctatctggatggcatatacttatctgaatccactttcctccgtgggaccgggatcttatgtcttgtggcagaatctgatcaatagctggcagctatggaaaaagagaaagagggaagaggaagaagcgcaacattaacgcaacagcaattcttcctcgttatatcttggcctgttctttacttcaatgtagattttaccgatatattcgcctacaattcccagggataccaatattgtaccacctaccagccagagggaaatcatcagagatgaccatccgggtacagtgtcgtggaagtagtaagcgcgtagcgtccagatagttacgcatacggctatcagtataaaaatacagcctagccagaaaaccatgcgcacaggtttgacagaaaaagatgtgattccgtcgatggcaaagtttaacatcttcttgaatggatatttcgactctccggcaaaacgcttgtcgcgattatagtaaacacaggcggtttggtaaccgatgagaggcaccagcccgcgcaaatagagattgcgctcgcggaaacggcaaagttgttggatagcacggcaactcatcaagcgataatccgcatggttataaaccgactttactcccattattttcatcaacttgtagaaagcgagggcagtgctacgtttgaagaaagtgtcggttttacgttcccggcgtacaccataaacaatgtcacatccctctcggtagcgttcgagcatttcgggaatggcgttgacgtcatcttgcaagtcggcatctatggaaatggcgacatcacatcgttctttgacggcattcagtccggccatgagtgcattttggtgtcctacatttccggctaggttcagcccacaggcatagggggcattttggtgtaaatccttgatgataggccaagtctgatctgtactgccatcatttacatataagatataactatcctgagagatgtgtcgttctgctatcagtttatccaataggagactgagtcttttatgtgtttcgtgtaatacagcttcttctttgtagcaaggtactacgatagcgagtactggagatttttccataatcaattattctttttgcaatattcgtaagaaatcgggagaaaaacaaattatctttctttgtatttgaaaacaaatctcactagcaggaagtttaccgggatagcgatggtaaataccggtatgggggcgaagggtttggaaaagcctaaccaaaggaacagattcagtaaacttatatgtaggatatagttgatcagatgggctcccccgaagccaaaagctttcttccaagatggcttctttccgaaggtaaaaagggctgtcagataaaaattagcaataaagctgagtatatagcctatgctgtaggctatatttacattgatgaatcgctggaatataaaatatagaccatagtgcagagcggttgcaaagacgcctaccataatgaaacgaataaattccggcagttttttcagtctcttcatattcatagaattgagaaggcaaagttagggattgttgcagaataattcgtacttttgcgcacagaaatcactaaaaacagaaatatatgtcagatgataggaagaaagcgttctggtttatagcgctactcagtatgcttgtgatactcccttttctgggagaaaccattttctattctaaaggggaaccacgtgaggccattgttgccttttctatgttagagagtggtaactggatacttccggtgaattatggtaccgacatagcttataagcctcctttcctctactgggccatcgctgccatctcttccctttttggaggagtgtcagagtattcatcccgtctgccgtctgctattgcattcctggctatgcagttggtgttcttctcttttatagcaaaacgtaaaggggtaaaaacggcttttctgacttctattcttcttctgtcttcttttgaagtacaccgggcagcggtggcgtgccgtgtagatatgttgcaagtgtcgcttattgttatttcattgtgtttgctgtttcgttgggatgagaaggagtgccgcggtattccctggctggctgttttactgatgggctgtgccacattgaccaaaggaccggtaggttctatattcccatgtgtctgtatcggtctttaccagttgttgcgtggacgttctttctggaagacattcttcttgttattgcttgtaggaatcctttctctgattccttatgcagcctgggcgggcgcggcttatgcacaaggcggacagtcttttgtcgatttaatgttggaagagaataccggtcgcttcatgggaaagatgtcctacggatcacatgagaatccgatatggtataatttcctgactgttatctggggctggataccctggactttggtattgctgatctctctctttggactgaagtggaaaaacatgcgtgtgttacctgaggggacatctttcggcgaacgtatcgggaaagcctggaaaaaattccgttcacagtcgcccttgcaattgttcacatgggtggtaattctctttattttcatattttattgcatccccaagagtaaacgtagcgtttatctgcttcccatctatccatttatggcagtgctgatagctgaatatttattggctttggtgcagcgtggggcaaaagtgtttaaaatctctgcacatatatttgcgtctctgtgtttgatacttacggtaactttcatagcggtacgtttaggactgataccggatagtctttttggaactggccgtcatgctgctgaaaatgtatcttttatgcatgctttggaagcggtttctctgtctattcctaaatggtgtttggtggcacttcctttgatagcggctgcctgcacatggatgggagtagcgaagcgggccggcgcttattccttattatatagtatcgccggatgcatgctttgtcttttcgtttctctggatggggtctatcaacctacagtgttggcagttaaatcggacaagcacctggttaaccaaatcagggaatatgtgccgcagggaacggtctactcatatgatggcatgagcttttattgtgcaaacttctatatgaatgatcagatgcgtcattttgagaaggatttgccgtccggtgagggatatgttgttttgccggagagaggaaaagaactgttgtttgaagaatttggaaatacatacgactttgaagagattttccttacgaagaagcgcagttgcgatttgcgtgatgagatttatatgtataagtttaaaaagaaataaatgtcacccgttacaatcatcgataaatattatccggaggataatgaacgtaaacacatcttgttggtgcatagtcgtttggtggccgagaaggctctttcaattgctgatcaccatccggagcttcagttggataaagactttttatatgaagccggcatgctgcatgatataggcatctttctgactaatgctccgggtatcttctgttttggagatcagccctatgtctgtcatggctatttaggggcggaactgatgcgtcaggaaggatatccccgtcatgcattggtatgtgaaaggcatacgggtgcagggctatctttggacgatattatttcgcaaaagctgccagtacctcatcgggatatgctcccggttagcctggaagagcaagtcgtttgctttgccgataagttttattccaagactcatctggagcgggaaaaaacagtggagaaagcccgaaaaagtctttctaatttcggcaatgaaggtttgaaacgttttgatcgctggtgcgaacagttcttgtagcaatctaaatttctttaaaaagggagattatccgtataatttacgtacttttgccccttcaagcggaaactataagttgattacgccattgaaagcaaatacattcatatcattcatactactacttgtcttactcctgctctccggcgaggctttttcgcaacgtcggcgtggaagaactgttcccacaggaagcgagcggacagatacctttaatatagaaggtgtacaaagaggagacactttgttgaagggggatactctgcaaaacgatacgatacaattgcagcctgccggtaagaaaaagcagcctttggatgctccggtgatttatgaagctactgactctattgtgttcactcagaatggcattgccaatttatatggagatgggaaggtgaactatcagaagatagagctggctgccgaggtgattactatgaatatggacagtagtacggtttttgcccatggtgtggaagactcattaaaagtcataaaaggaagaccggtcttcaaagatggcgatacaccttatgagacgaatacgattcggtataattttaagagtaaaaaggggctgatcagtaatgtagtcagtcagcaaggcgaagggtatgtgactggtaataatgctaagaagggtatgaacgatgagctgtacatgaagagtggccgttatactacctgtgataatcacgatcatcctcacttctacatgcagatgacctatgccaaagtacgccccaagaaaaatgtagtgacgggccctgcttatctggttattgaggatgtcccgctacctcttgccgtaccgtttttcttctttcctttctccagtagttattcatcgggtttcatcatgccaagttatatggatgactctacccgtggatttggtttgacggatggcggttactatttcgctatcagcgataagatggatttgaagctgcgcggtgatatctttacaaaaggttcctgggctttgaatgcggaaaccaattataatgttcgttataaattctccggtctgtttcaagctagttatcaggtgactaaaaccggtgataaaggcctggatgactatgcagtagcaaaagacttcaaagttgtttggtcacatcgccaggatcccaaagccagcccaaattcgtcattctcagccagtgtgaacttctcgtccagtagctatgagcgtactaatatcggtaatatgtacaattcgcaggctatgacgcagaataccaaaacatccagtgtcagctattcacgtaacttccccgatcagaaactttctattgcagctaccggtaatattgcacaaaacatgaaggactcttcgattgctgtaactttaccggatttgaacattaccttgagtactatttttcctttcaaacggaaaaatgctgtaggtaatgagaaatggtatgagaagatttctcttcgctatagtggccgcctttctaacagcattactacgaaagatgatcttctgttcaaatccaatctggtgaaggactggaagaacggaatgaaacatgaaatacctatcagcgctacgtttacattgttcaagtacttcaatgtaactccatcggtgagttatacggagcgttggtatacacgtaaggtgatgaaagactgggatccaaatataggtaccagtgggcgggaagtagaaattgatactatttatggtttccatcgagtatataactatagtgccagtctgggtgttaatacaaaaatttatggtatgtataaacctttgtttatgaagaaaaaggaaatacagattcgacatgtcataactccttctgtcagtatcagtgcagctcctgactttggttcttcccgctatggttactatgatacttatattaaacccaatgctgatggaacacaagatacgatcacttattctccatatgccggacaaatgttcggagtgcctggacaaggaaaatctggaaatatttcattccagatatccaataacttggaaatgaaatataaggataagaatgactcaatacgcaaggtcagcctgattgatgagttgggtgcgagtatttcttataatacggctgctaaggtgcgtccatggagtaacctgacattaaatttgcgtttgaaattgagtaagaactatacctttagtatgagttcagtctttgctacttatgcttatacctttgataaaaacggtagggttgtaacgagtgaccgcacggagtggtcttacggacgttttggacgtttccaaggctatgggaactctttcagttacacgcttaataacgatacatggaagaagtggaaagcattctttaccggagagaagagtgaggatgatggaaaaggaaacgaacagactgatgcggacagtgaaagtaacgaaactgatgatgcgggaacaagtaatacgcctaccaagcggaagaaggaaaaagctgctgtagatgatgacggttatcaggttttcaaaatgccttggtctataaatctgagtacaggctttaatataacagaagatacctccagaccaatcaacagagagagcatgcgttatccgtataagtttagtctgaatgcgcttaatattaatggtaatgttaagatttccaataagtgggcagtcagcttcaactccggttatgactttaatgctaaaaagatagtgcagacttctttcaatataacgcgtgacttgcactgtttcagtatgtctgccagtctttctccatttggtacatggaagtactatagcttcgttatccgtgccaatgccagtattctgcaagacttgaaatatgataagaagagtcagacacagactaatattaaatggtattaagaatccatttgatattccttttactgcatttgctttttcataaaaatatccccttctatactgttgaaacgatttatttatcggaatgcttcagtgtagaaggggatatctttatttctgattaggaattgctttttaccatgctatttcttgttctccatgttctttcaaataggcattcgctctgctaaaatgcttatttccaaagaaaccattgtaggcagacaggggagagggatgcgcagaagtcagaacaagatgcttgctccggtcaatgaatgcacccttacgctgtgcataagatccccagaggatgaatacgaggtgttcacgctgttcggcaaggacacgtatggcggcgtccgtaaaagtctcccagccgcggttctgatgagaacctgcctgatgggcacggacagttagggttgcattcaggagcaggacaccttgcttggcccaacgggtcagatttccagtggtgggagcatctgtaccaatatcatcttttatttctttgaatatattaatcaatgaaggagggaaacgaactccatcgttcacagaaaagcataaaccatgagcttgtccgggaccatggtaaggatcctgaccgatgataactactttcaccttatcgaatgggcaaagattaaaagcgttgaatatgagctttcccggagggtatatcggataatgactgtattcttcccgtacaaaatccgttagtgtatgaaaataatctttttcaaattccggttccaaacgtgctttccaactttcttctatttgaacgttcataattttgtgtgttaaaagtttcggatgctaagatacaattttaatctgatttctgtaatagagcattctttttatttcttcgaacagagataaacagaaaaggcagaaatcataaaatctctgccttttctatttgtacctggatattaaatcaagtaaatattgtgttctttacattcttcacgcatatcttccggccagatactggcttgaatttcgccgatatgagcttttcttaaatagaacatacaaagacgtgattgaccgataccaccacctatagaaaggggcaatgtgtcattcatcaggcgtttatggaaatagagttccagtcgtttttcttctccctcttgtttcagctggcgttgcagggcttccttatctacacggatacccatggatgatagctcaatgctgcgctgcaatacattatcccataataaaaggtcaccattcaagcccggaagaccattcaacccttctgtggtatagtcatcatagtccggggcacgtccgtcgtgtttctctccatcgcttagtttacagccaataccgataatgaatacagcaccatattttttcgtaatggcatgttcgcggcatttgggttccagattcggataaagttgacgtaactcttccgcatgaatgaaatgtaacttctgaggcaggcaaggcttaatctgagggtacatttcatacaccatatattctgtacgtatcatggctgcataaatacgggttacaatttctttcaggaagttcacgttccggtcttcggtagtgatgacacgttcccagtcccattggtctacatagagagaatggagatttcccaactcttcgtctgagcgtatggcattcatatccgtataaataccatatccggattcaatattatagtctgccaatgtcaatcgcttccatttggcaagagaatgtactacttcggcttgcgcatctcccaaatctttgataggaaatgatacggcacgttctacgccattcaaatcatcattaatacccatacctttcaatacgaaaagcggggctgtgacgcggcgcaaacgtaattccgatgaaaggttcaattggaagaactctttgatctgtttgattcctaattctgtttgttttaagtccaataagggtttataaccctctggttttatcagataactcataagtgtgtactatgtttttgtccggcaaatataggtataatatttatatttgcatcgtatttggctaattttatgagcaatttgtttcttattaaccagttgtggctctcaaaataatattcttatttataggcttttactgtaaaaaaagacaaatcattaggaatgtgcccgatttttttatacttttgtccccgcatttaaggctccgtagcttagtgaatagagcgtcagattccggttctgaaggtcgtgcgtttgaatcgcaccggggtcactagaaaatccttgataatcagctgattattgaggatttttttattgagtacattactcttcagacgaggaattatgccttaatatcgctaatataccacccttgtttcctaatagtttcctaatttaagtaagagttaagatgctgactattagagaagaaatcaagaaaggtgaggttaagagtgacggaacttataacataaagattagatttactcttgatcgtaagttaaggagattgtctacaagtctctttgcaacatctaaggatttaactaagtccttgaaactgaaggagggtactcctattaagcgggaagttgataaacttattcgtacttatcaagatatatgcgctaaacttcagttggaagtgaatgcttatactctggatgatgtgtttgattacttggaagctgagcgggagcgtacgcgatctatagactttattcaattctgtaaagaatggctggaggctacggatattaagggtaagaagaactacaagtgtgctgtaaatgcgttaattgcatatataggtaatgaacatttggatgttactaagctaacagctacattcttaagaggatttactgaatatttaagcgaacgcagaatggagcggattaaagtaatatctgaagctggtggacggattacatctaatcgtgctgtatcattatatcttgggagcatcagacatttatttaatgaagcgaagagacgatataatgactatgataggaatattattctcattactaactctccttttgaaaattttgtggttcctaagcaagaggctacaaggaagagggctattcctgcaaatctgattaagataattagtgaacttccctaccgttatacagtgaaaggtgaagaggccaattgtcgttacaaccttgccaaagattgtttcatgctatccttctgtttgataggcatgaactcagcagatttatataacgcagcgattaaggtcggtaataccatcatttataaccgaactaaaactagagctcgccgaagtgatgaagctcagatgcagattgaaatcccttcattgatactaccccttattgagaaatatcgagattgtacaggacaacgtgttttcaacttctatcgttcttatactactgcaagtagctttaaccgtgctgttaattatggtttgaaggaaattgggaagttgattggcattgcggacttggaatactacgcagcccgccattcatgggctaccattgcattaaataaagtaggcattgacaagtacactgtacatgctgcactcaatcatatagatgaatctatgaaagttaccgatatctacattgaacgagacttcgtgaatgagaataaggctaatgctaaggttatgaagtatgtgtttggtaaatagaccaataattccccacttgtagcaatacagatggggattatccatttactgacattaagggatatattcataatttaaccaatccgcacggtttacttctaatatagaaaattccccccaaaagatttggatgcttctgataatatgctttatctttgcattgtcgaaagtttcttgatgtcagtcgactggtcttctgaaaggctataggtctttgaaatcatgtacaatcttattccacctacggaaggcgtaggtcactataagaagacgaacagcatatccttcaaatcaaagtgaacaataacggtcattcccataaagattggctatattattaatctttgatcagagttatgaaaagaattaattatgggacagaaatagcccctaagtggttcgcagtagccactgtttcaattaacggtaaagaattggatattattccagcgtttaccgattattctattaagcaaaaagactttaataaagataaagtttatgcagcaatggataagtcaaaagttctacctactgtgttttgtctaacagatgcagaaatattcagaaaggaaggtgttcagctatttgactatcatggtcgagagttggacgaacttcccgaaaaagcaccacgcatattggtctatcttgataaagttgacaatatcaacctttggaatttagatattcca

SEQ ID NO: 934 - DNA, 18248 bp, unidentified
  source 1..18248: mol_type = unassigned DNA
atgaacaagatctcgcgtaaaggctttctgaagatcgccgctgccgctgccatgtccggtgtcaccgccggtgcactggctgcctgcaacgctgcaagctcctccactgccgcttccgccggtgcagcaggcagctacacccccggtacctacaccggcactgccgagggcatttcctctaccgtcaaggtcaccatgaccttctctgacagtgctgtgaccgacgttgtggtcgatacctccggcgagaccgcttcctacggcgctgctgctgccgaggagctgaagaaccagctgctgaacgccggctctgacgagatcgacggtgtgtccggctctaccatcacctccgatgccgtgaagaaggccgccaagagctgctttgcacaggcaaagggagaggcaactgtaacttccgttcagctgcccaccggcgacgagaccgattggctgggcaaggagcctgacattgacgaggctgccatcaccgagaccgtggacaccgacatcctcatcgtgggtgccggcaacggcggtatgttcgctgctgcttatgccgctgccaagggcctgaacttccgtgtcatcgagcagaacggcaatgtgcaggatacccgtcactgggtgggtgccgtggacggctttggcgctcaggaacagggcatcaagatggatcgtgccaagctgctgagcgaggtctcccgttacgcctccggcaagtgtgatcagcgcgtggtcaagacctggatcaacgagtctgccgagatgatcgaatttgtccgctccatcatggaggacaagtacggcgtgaagatgatctacacctacggcgacgaggccaagtggcctgcagaaaacgccgagcacaacaccgattatatgtaccccgagatcgagtatacctatgatcgctccagtggtgccgcccggaacgagctgctgctgcagtacatccaggagctgggctacgatgtggacttcaagaccagtctggccaagctggaaaagaacagcgatggccgcattaccggcatcatcgcccagagcaccgaggatgaccacttcatccgctacaacgccaacaagggcgtgctgctggcctgcggcggcttccccggtaacccctacatgatggagcagctggacccgctgggcacctccgtcaccaccgcatgctcctactctccctccgataagggctacggcatccgggctgcaatgtgggcaggtgccaatctggacaaggaggctgctcccatgctgtttgaccgcggcatcgtggcccccggcgtggatggcggctatgtggacagcgacactgcctttggcggcaaggctttccctggtaccatccgtcagtacaaccccggcacccagcccttcctgaaggtgaaccgcaacggcgagcgctttgccaacgagagcagcccctacaatgacatcgtctacgccgctgctcaccagccgggccgtgtctacgctcagatctgcgatgccaacattctggaggacgcaaagcgtttccacaccatcggctgctctgcccagacccgtaacggcggtgagaagtacattcagggtaagatggacgaggcgatcgaggccggcgcattgttcaagtgcgatacgctggacgagctggctgacaagatgggctttactggcgctgccaaggacaccttccttgctaccgtggagcgctacaacgagctctacgacaagcagaacgacgaggacttcggcaagcccgcttaccgcctcagcgccatccgcaccgcgcccttctacggctgctggctgggtgcctctctgctgaccactgagcagggcattgccatcaacgaaaagggtcaggctctggacaacgataacaagcccatgcccggcctgtatatcaccggcgatatgtccggcagcttctttgccaacaactatccctgcctgatggctggtgttgccatgggccgcaccctgaccttcgccatgaaggctgttaaacagatggccggtctggaatgatgtcactccccggaaaatgaactgaaaaccgcataaaaatgcagcgccgctgaagccctgaaaagcttcggcggcgctgttttacgtttccctctatacacaaaaaatgtcaggcagtcctcagcacacggcacggcggggagcggccagaggctcgatcaccggcgggtgcatcccttcccggtagtccagatccccctgatccatgccgcggagcagtacctcggcggtggcaatgttggtggcaatgggtacgctgtgcatatcacacaggcggagcaggttctgctcgttggagctgccgctgtcggcccggagcgggtcgcggaagaacagcaccagatccacttcatcgcaggcaacacgggcggtgatctgctgaatgccgcccagctttccggagaggtaacagtgaactggcaagccggtggcctggttcaacatccggccggtggtaccggtggcaatgacagtgttccgggacaggatgccactgtaggcggtgcagaactgaagtgcaagttctttgcgggaatcatgtgcaaggatggcaattgtcataatccgctctctcctttgtactagtgtcgtcatgcggacatctgtttgaaatggattgcagttgtgagaaggacagttccgagcgcacttcagagcgccccgccgaacttgttcccacactttccaatatagttttaccgcgtcgaaatatgggttgtcaaggggaaaatgagaatttttaccctaatttccgataaaagtacgactttgtttttgtacagaatggagaaatgaaaaatacatcatggtacaaacggaaaaataattttcgaatttttggtccgaaagtgtttctataacaaaaacagtccatccctgcaaaacaaaaatacaggccgctgtccttccacggcggcctgtaagaaaaaaacggaaaaatgttttcgcaattgaacggttcagcggatctggccgctgccgtgaatgatgtacttgtagctgcacagctcttccagccccatggggccacgggcgtggagcttctgggtggaaatgcccatttcgcaccccagcccgaactccccgccatcggtaaagcgggtggagcagttgacgtagaccgccgcactgtccaccgccgccgtaaagagggcggcatgggcctcgtcccgggtcaggatagcttcgctgtggccggtggagtgcgcggcgatgtggctgacggcctcctccacgctgtccacgaccttgacagccaggatgtagtccaggaactcggtgtcaaaatccgcagggcctgcaggggtgccggggatgatggcggcggcacgcgggtccaaccgcagctccaccggatgcagtccctttgcagtgcggtcagggcccagccgccgggccagcttgggcagaaactctgccgcaatgtcacggtgcaccaggcacacctcctccgcgttgcagacgctggggcggctggccttggcgttttcgatgatgtccagcgccttatcctgctcggcagaagcatccacgaagatgtggcagatgccggtgccggtctggatgcaggggacttttgcattttccacacaggcgcggatgagcccggccccgccgcgcgggatgagcagatctacatagcccaccgccgtcatcagggcgttggccgaagcgtgggtggtgtcctcaatcaggcaaaccgctgtttcgggcaggctgtttgtccgcaggccctcccgcagagccattacaatggcgttggcactgcgccatgcctccctgccgcaccgcaggatgcaggcatttccgctcttgatggcaagggcggcagcatcgctggtcacgttggggcggctctcgtagatgatggcgatcacgcccatgggcacggcggtcttttcgatgaccagcccgttggggcgctccacccggcgcaggactttgcccaccgggtcgggcaggtcagccacttcccggatgccctttgccatggcgctgatgcgctccggtgtcagggccagccgatccagcatgacctccgagatgtgccctctggctgcttccaggtcggcggcattggcctccagaatggcctgctggcgggcaggggagcagagcgcatctgccatgcccagcagggcggcgcggcgtacctcgcccgaggaaaggcccagcgcgcttcttgccgcgcgggcggcttccagaatctcctgtgtcgtcatgggtcagccctcctttctgcccgcaaagcgggtgcctgcgggtctgccgtctgcaatgtcgtagagcagctccgggtgggagccgttggcgatcaccatgtccgcgccctctgccgttaccatctgggcggcacggagcttggtggacatgccgccggtgcccaatgcggagcctgccccgtctgccagcgccagcacctccggagtgatgcgctctaccaccgggatgagctttgcgtccgggtgggtgtgggggttggcggtgtacaggccgtcgatgtcgctcagcagcaccagcagatcggcatggatgcagcaggtgacgatggcggccagcgtgtcattgtcgccgatggaggtgatctcatcagtggcaacggtgtcgttctcattgatgatgggcagcgcacccagctccagcaaccgggtcagggtgttctggaaattcagccgccgtccctcgtgctccacatccacaccggtgagcaggatctgcgccacgttgtggttataggcggtgaacaggcggtcgtaggtgtacatcagctcacattggcccacagcggcacaggcctgcttggtggccatatcaccggggcgggagggcagggacagcttgcccactcccatgccgatggcaccggacgagacgaggatgacctcgtgccctgcgttcttcaggtcgctcagtaccttgaccagatcctctgtgtggcggatgttcagccgcccggtggagtgtgccagcgtggaggtgcccactttgacgacgatgcgcataaacttaaccctttcccatttcctttgtcttgtcgtaggcagcaatcaccgcatcggtcaccgcgccgcggaagccgtgctcttccagcacgcgcacgccctgaatggtgctgccgccggggctgcacaccgcatccttgagctcaccggggtgttttccgctctccagcaccagcttggcgctgcccaataccatctgggctgcgtattcctgtgccttggcccggggcaggccgcaggccacgccgccgtcggccagcgcttcaatgaactggtacacccaggccgggccgcagccggaaacgctgcttgccgcatcgatcagggcctcgggcacagcgtccagccgcccggcgggtgccatcagcttcagaaactcctgctcctcctccgctgtcacattggcggagcaatattggatcatacctgcccccaccgaagccggggtattgggcatgatgcggatcacggggtaatcttcccccgccatctcctggatgcgcgcgatggaaagccctgccgccatgctgcacaggatgaagcggctcggccgctcgttcagggtgaacttaagcggagccagcagggcctccatcatctggggcttgaccgccagaaagatcaggtcggagcggcccgccacctcggcattcgtggtggtgttgcagcccagctctgcggccaacgcctctgccttggcggcagtgcggttggcaagataaacattctgtgggtcggcagccttgcagacggcccgtgcaatggcactgcccatgttcccacagcctaaaaatccgatggtcttgatcatacttgctttcccttcctttctcactcagaaagaaataaatggaacgcacattcgttccactccatccattgtaagcgcccggagccagaaaatcaagagggaacctcccggaaacccggcaaaaaggcggcgggacggctgcaaaatggagaagaacgtgaaaaaaatatcaaaatgagagattttgaacttgcaaaacggggggcatttgcgttatagtataaaggaagtattcttacttctctggccccatagggcggccaccacggtcggcggcacagtgtgtgccgctgggaaaggatggatctcgtgtcacaaactacaaaaagggcgttggaggcatcgctgaaaaagctgctgcttcaaaagccgctgaataagatcaccatcaatgatatcaccgaggactgcggcgtgaaccgtatgaccttctactaccacttcaaggacatctacgacctcgtggattggatcatggtcgaggatgccgccaaggcgctggagggcagacagagctttgagaactggacagatgcctttctggacatcctgcatcaggtgcaggacaacaaggttctggtgatgaatgtttaccgctccgtgagccgtgagcagttggaacagtacttatataaactgctggactccatgctgcgggactttgtggaccgcagtgcgcagggctttaccgtgcaggattccgacaagcagttcatcatcgacttttacaaatacgcgctggtgggcatggcactggaatggatccgcagggatatgaaggaggaccccgtccggatgaccgagcggctgaatgttctgctccacggcgagcttgagcgggcgctccgccgcttccgcaccgaccgcagccccgcagatcttgacgactgacaatattttatcaatccgggcaccgtgatgggttttccatcacggtgctttttctgtttatggctttccgtttgacaaaatgttacagtatggtcagcgcaaaatgaaaggtgaaaacctggaaaccacagcaaacggagggaataaaatgtattattccagcgggaactatgaggcctttgcgcgcccgaaaaagcctgtgggagtggatcggaaatcggcctatctcgtgggcaccggtctggcggcgctgacagctgcctgctacctggtccgcgacggtcagatgaaaggggaacacatccatctctttgaaaagggatccatccccggcggtgcctgtgatggctgccagtaccccggcatcggttatgtgatgcggggcggccgggagatggatgaccattttgaagtcatgtgggatctgttccgttccatcccgtcgcttgagaccgagggcgcaagcgtgctggatgagtactactggctgaacaaggcagaccccaactactcgctctgccgcgccacggaaaaccgggggcagaacgcccacaccgatgggaagttcggcctttcggatcagggctgcatggagctcatcaagctcttttttaccccggatgagcagctctatgataagcgcatcaccgatgtctttgacgcggaggtgttctcttccaacttctggctctattggcgcaccatgttcgcctttgagaactggcacagcgcactggaaatgaagctctatctgaagcgctacatccaccatgtgggtggtctgcctgatctgcggacactgcgctttacccggtacaaccagtacgagagcatgatcctgcccatgatccgctatctggaggggcacggcgtgcgcttccactacaacaccaaggtcaccaacattgagtttgagctgaccgagggcaaaaagcaggccaggaccatctgcctgctggtggacgatgaagcggaacgggtggacctgaccgagaatgatctggtgttcatcaccaacggcggctgcgtggaaagcacttccatcggctcccaggatcagcctgcagtgttcaaccccacgctccggcccggcaacggctgggatctgtggaagaagatctccgcgcaggatgaggcctttggccgcccggaaaagttctgctccgatccggaacagaccaactggatgagcgccacggtcactacgctggacgaacgcatcgtgccctacatccagaacatctgccagcgtgacccgttcagcggcaggactgtcacgggcggcatcgtcacggcgcgggattccggctggctgctcagctggacattcaaccgtcagccccagttcagggatcagcccaagggccagctcgtgggctggatctacggcctgttcagcaacacgcccggcgactacatcaaaaagcccatgcgggattgcaccggcaaggagatctgcatggagtggctgtatcatctgggggtccccgaaaaccagatcgaggacctggcggagcacagtgccaatactgtgcctgtgatgatgccctatatcacagctttcttcatgccccgcaccgcaggcgaccgcccggcggtggtgccggagggcgcagtgaactttgccttcatcggccagtttgccgagacgaagcgggataccatcttcactaccgagtattccatgcgcaccggcatggaagccgtgtacaccctgctggatatcgaccggggcgtgccggaggtctggggcagcacctacgatgtccgcgacctgctgaacgccgctgttcagctgcgggatggcaaacccctgagtgatctgaaaatgaactggatcaaaaaatttgcactgggcaaagcggtagaaaaggtacaggacaccgacctgggccgtctgctgctggagtataagatcatctgagcgccgggaattcagcccggcaggcagggaagagagccctgtaaaattctattgaatctggaggaaataaaaatgaataccgcatttgattctctgacgcacaaaatgcagcgtgctgcactgggcaagactgtggatctcgtgctttctcatgccgagaaggaccccgccaagacggttggacagatcgtagatctttcaaagcagttctacggcgattccttcagcgaggagacctacacacacgccaagcagaccctgaccgaccccaacagcaagtggtcgaagctcatcaactgtatgctgaaccagctggaccccaacgtggcccgcaccacggccctgaacctgggctatgaggccttcttccgcggtaccaagaccatccgcgagaatcgtgtcaaatatcagtgcaacattccctggctgatcctgtttgaccccacctctgcctgcaatatgcactgcgtgggctgctgggccggtgagtacggccacaagaacaacctgagctttgacgatatggataagatcgtcaccgagggcaaggagctgggcgtttatctgtacatgctcaccggcggtgagccgctggtgcgcaaggctgatatcctcaagctggccgagaagcacaacgatgtgcagtttgccatctataccaactccaccctgatcgatgaacctttctgcaaggaagtggttcgtctgggcaacatcgccttcatgctgtccattgagggcaccccggagaccaacgatgcccgccgcggcgagggccactatgctgccgttatgcgcgccatggatctgctcaaggagcacggcatcctgttcggcacctccatctgctacacccgcgacaacatcgaagccgttaccagcgatgagttcatgcgtttcctctgcgagaagggtgcacacttcggcttctacttccactacatgcccgtgggcaacgaggcggctcccgagctgatgccctctcccgagcagcgcaagtacatgatccagcgcatccgctatctgcgcagtgaagcctgcgatatcccgttctaccccatggacttccagaacgatggcgagttcgtgggcggctgcattgccggcggccgcaactacttccacatcaactcggctggtgacgctgaaccctgcgtgttcatccactactccaatgccaacatccatgacagcagcatcctggagatcctgcagagtccgctgttcatggcctaccacaacggccagcccttcaataagaaccatctgcgcccctgccccatgctggaaaaccccgagctgctgcgcaagatggttcacgagaccggtgcccacagcaccgacctccagagtccggaaagcgtcgatcatctgtgcgacaagtgcaagagctacgcagccaattggcagccgaccgccgacgagatctggtcccataccaagatccgcgagagccgttacgagaactataaggattggaagcccaatcagcagtaattgcaggtactccccctgaaatcttcctttttggtttatctgccctgaaagccgaagctcccccttccccaagcgccgagacagcgccgggaagggggagctttgcgtttctcggctgctctgagaaaatcatgcggtaggaatacaaaaaccggccctgtctcccatgcaggagacagagccggttttgcgattctattgtgtttgggatcactcgtcgtcggggtcaccgaaggcatcgtgatagaggtttaccatgccggattcgtcgttgcgattcaggccgtggaacaccagctttttgatgacatcatagatgacagcaaacagcggcacaccgatgatcatgcctacaaagccccacaggccgccgaacagcaggatggcgaacagcacccagaagctggaaaggccggtggtgttgcccaggatcttgggtccgatgatgttgccgtccacctgctgcagcaccagaacgaacagcacgaaccagagcgccttgatggggttctggatcaggatgagcagggtggcggggatggcaccgatgaaggggccgaagaaggggataacattggtcacgccgatgatgaccgacaccagcagggcgctggggaacttgaagatcaggcaggcaatatagcacagcacgccgatgatggcggaatccaggatcttgccgttgatgaagccgccgaacatccggtcagcgtaacggacttcctccatgatgaggtcggcccagcggggcttgaccaaactataaaggatgagcttgccctgctgcccgaacttcttccggctggccagcagatacaccgaaacgatgaggccgataacgaaatttttgatccaggtcaccacgttcaccacgcccacggcagcaccgctgaggatgttctgcatggaggggagcagggtgttcttgatccaggcatccagattggcctccaggctgtcgtaagagttctcgatgaagtccagcagctttttgttgttggcaatgagctcctgcttggagatccactccacaaagtcgccgatgttgtcccgtgccgtgtagtacagggcggtcacactgttgatgagctgcggcacgatcatcatgatcagcgcgtagatcagcagcagaccaaacaggatggtcagagcaacggccagcatgttggcaaagcggtgcatcttttccgggaacagcttgtggagaaatgcttcaagccagttgcacaccggcttgagcagataggcaatgacactgccgtagataaagggcatcaggatgccggtcaaggtcgaaacggcattgccgaagccctgaaagcggtagatcaggaaaaagaagaggatgctcaggctgatcgcgccaaagcctgcgaacattccgtagagatagggtttgatatgcggttttttgtccatcatgtcatagaaactccattcctgccgcagacagcaggattccctgcggcaatgtcagcgcttgttgctcctgcgccagatgtgcagtttttcggcttcggcgatcagctcgtcccggaaatcggggtgtgccacgctgatcagtgcttctgccttttcccagctggtcagtcccttcaggttcacacagccgtactcggtgcacaggtagtgcacgtttgcgcgggtgtcggtgacgatgctgccgttttccagggtaggacggatgcggctctcaagcttgccggtctttttattcataaaggtagaggacaggcagatgaagctcttgccgccgttggaaaggtatgcgcccagaacaaagtccagctgaccgcctgcaccggaaatgtgcttgatgcctgcactctccgcgttcacctgaccgaacaggtcaatgtccaccgcgttgttgatggagatgaagttgtcaatggcggagatgctgcggatgtcgttggtgtactccacgggagcggccatgcactccgggttgttgttcaggtaatcgtacatcttctgggtgcctgcaccaaaggcatagacctgacggcccttgtccagattcttgtggcggccggtgatcttgcctgcctttgcaatatccacaaaggcatccacatacatctcggtgtgcacgcccagatccttcaggtcactctgcgcgatcaggttgccgatggcgttgggcataccgccgatgcccagctgcaggcaggcaccgtcggggatctgcgggacgatgaggtttgccaccttcagatcgacctcggtggcggcaccggcagcggccatctggccgatgggcgggttgctgccctccacaacaccggcaacctgggagatgtgcacccagttctcggtgccacccaggcatttgggcatgttccggttgacctcaacgatgatctttttggccttatcgcagacggcacccaggtgggaagcacaggggccaaagttgaaatagccgtgctcgtccatgggggtcacctggaacaccgccacatccacggggtcagagctgtcgcgatagtagcggggcagttcagagtagcggatgggggagtagaaggagaagccctgggcgatggccttgcgctcaatgccgcccatgtgccagctgttccaggtcatgtgggcagcaggatcctcgatctggaagatggcgggcacccacatcaggatgccgccgcggaagttaacatcctccagctcgggcagacgctttgcaatggcagcgtccactgcaacgggggtgttcacggcccagccgtaatccacccagtcgccgcttttgaccaacgcggcagcctggtcagctgtcattttcttctgcgcatacaattccgtaaaatccattataaaccatcctctcttacaataacataaaggaattgtaaattccaacttagttatatcattaacaaacgggagaatcaatactttcctagcaaaaaacagggctggatgcaatataactaaaaatcttagctttttgtagagattctttggtgcacaaaaaataaattttacacaaaaaatacttgataaaattttgacgatgtgctttacttatagcgtagcaggatgcagcgtggcactgcgggtgggattgtttaaaaattaacgatataccgtagcagaagaaaagaacatcttgcacagcaaactggaaagtgctatcatgtcagaaccaatgcgcttttcaaaggcgcacaaggaggacaaaaccgatggcaactgcagtttaccccgggtcgttcgatccggtcacacgaggtcatctcgatatcatcaagcgcgcggcaaagatcaatgatcacctgatcgtggccgtgctcatcaacagtgcaaagcacccattgttcaccgtggaggagcgggtggccctgctgcaggaatgctgcaagggtatccccaatgtcacggtggagagcttcgacggcctgaccgtggagttcgccaagaagcgccacgcttcggtcatggtgcggggcctgcgggcggtaacggattttgaaaacgagatccagctggcgcagaccaatcacgcgctgatgcccggtattgagaccatgttccttgcaaccagcatcaagtggagctatctttcctctaccattgtaaaggaagccgcccgctacggcagtagcatctccaagttcgttaccccgaatgtggaagccgccgtggggcagaagatggccgagctgcgcagcaggggagagaacgtctgacccccattccttatgcaagaaacgcttcggcgttttgataaaacagtctttcttaaatcacaacatacacaatcaggaggctattcacatgaaaaagatcgttatcgcatctgcatgccgtaccgccattggtaagttcggtggcactcttgccaacgtccccgctgctgagctgggctccatcgtcatcaaggaggctctgaaccgcgcaaacgtcaagcctgagcaggtcgatcatgtttacatgggctgtgtgatccaggctggtctgggccagaatgttgcccgtcaggcttccctgaaggctggcctgcccatcgagacccccgctgtcaccgtcaacgtggtctgcggttccggtctgaactgcgtgaacatggctgctcagatgatcgaggcaggcgatgctgatatcgtggtcgcaggcggcatggagaacatggacatggctccctttgcaatgatgaagggccgttacggctaccgcatgggctctcccatgggcaagagcgagctggtcgataccatggtcaacgatgctctgtgggatgccaccggcttcaacaagcacatgggcatgaccgctgagaatgtctgcaccaacgagaccttccagaagaagtacggctacagccccatcacccgcgagatgctggatgagttctcctacaacagccaggtcaaggctgacaaggccatcaaggacggcgctttcaaggacgagatcgttcctgttgtcatcaagggcaagaagggcgacaccgtgttcgataccgatgaaggcccccgtctgaccccggtcgagaagctggcaaccctgaagcccgctttcaccaaggacggcatcgtgaccgcaggcaactcttccgccatcaacgacggcgctgctgctctggtcattatgagcgaggaaaaggccaaggagctgggcgttgagcctctggcaacctgggtcgctggcgctctggccggtgttgagcctgaggtcatgggtctgggccccatcgcagcaaccaagaaggtcatggcaaagactggcctgactgttgctgatatggacctgatcgaggccaacgaggcattcgctgcacagtctgtggctgtcagccaggctctgaacttcgatatgagcaaggtgaacgtcaacggcggcgccatcgctctgggccacccggtcggcgcttccggcgctcgtattctggtcaccctgctgtacgctatgaagcaccgtggtgcccacaagggtctggctaccctgtgcatcggcggcggcatgggctgtgctaccatcgttgagatgtaagctccccctttggaattgaaatgaatgacagcccgcgccccggctcagaccggagactctgccggggcgcgggagctgttttgaaacactgagaatctgaattggaggttttcacaatggcttttgtaaaaaccgaggtgcagggcgctgtcgagatcatcaccatcgaccgtcccaaggcactgaatgccctgaaccccgaggttctggcagacctgaaggcagcttttgaggctgtcgatcaggagaccatccgctgcatcgtcctgaccggcgaaggcgacaagagcttcgttgcaggcgctgatatcggctccatgagcaccatgaccaaggcagagggtgaggccttcggcaagctgggcaatgacgtgttcctgatgatcgagagcttccccatccccgtcattgcagccgtcaacggctttgcactgggcggcggcaatgagctggccatgagctgcgacatccgcatttgctctgacaacgctgtgtttggtcagcccgaagttggtctgggcatcaccccgggcttcggcggcacccagcgtctggcacgtctggtcggcatgggcatggcaaagcagctggtctactctgccctgaacatcaaggcagacgaggcataccgcattggtctggtcaacgctgtgtatccgcaggctgaactgatggagaacgtgctgaagctggccggcaagatcgccaagaacgctcccattgcagtgcgcaactgcaagaaggccatcaacggtggcatcagcctgcccattgagaaagctgtggaagttgaggagaagctgttcggtgcttgcttcgagacccacgatcagcaggagggcatggcctgcttcctgagccgtgagaaaccgaagcccaaggcagtgttcaccaacaactaatccgttacataatttttgatattaaaggagagatttcctatgaagatcggtgttatcggcgctggcactatgggccagggcatcgcaaaggcatttgcacaggttgagggcaacaccgttgctctgtgcgacatcaagcaggagtgggctgagaacggcctggcaaagatcaagaagggctacgagaagctggttgctaagggcaagatcccccaggaaaaggctgacgtgatcgttgcagccatcaccccgggtctgaaggaagatctgtgcgcagactgcgacctgatcgttgaggctgcttttgaggatatgaaggtcaagcagaccactttcggcgagctggataagatctgcaagcccgagtgcatcttcgcttccaacacttcctccctgtccatcaccgagatcggcaagggcctgagccgtcctctggtcggtatgcacttcttcaaccccgctgaccgcatgaagctgatcgaggtcatcgctggctgcaacacccccgccgagactgttgagaagatcaaggagatctccgtggccatcggcaagaatcctgttcaggtcaacgaggctgcaggctttgtggtcaaccgcatcctgatccccatgatcaacgaggctgccttcatcaagatggagggcgtttctgatatcgcaggcatcgacactgctatgaagctgggtgccaaccaccccatgggacccctggagctgggcgacttcatcggcctggatatctgcctggccatcatggatgtcctgtaccatgagaccggcgacagcaagtatcgcgcctgcccgctgatccgcaagatggtccgcggcggcaacctgggctgcaagaccggcaagggcttctacgtttacaacgcagaccgcaccaagactcctgttgaccagctgtaatttctgataaacatttctcctggccgtggggaaagcggtcaggaggaatttgtttgcaaccgggtaggggagaaccccgaccccgggagataaaaaacacccgttaggaggatatagcgatggattttactctgtccaagcagcagcagatggtgcagaagatgtaccgcgagtttgctgaaaacgaagtcaagcccctggctaagaaggttgatgcagaagagtacttccccaaagagaccgtcgagaagatgggcaagctgggcatgatgggcatttacttccccacctctgtcggcggtgcaggcggcgatgtgctgtcctacgtcatggcagtggaggagctgagcaaggtctgtggcaccaccggtgtcatcgtctccgctcacaccagcctgtgcgctgctcctatttatgagaacggcacccccgagcagaaggcaaagtatctgcccaagctgtgcagcggcgagtggctgggcgctttcggcctgaccgagccgggcgctggtaccgatgcacagggtcagcagaccattgccaaggaagaggatgactgctgggtcctgaatggctccaagatcttcatcaccaacgccggtttcgctgatgtctttatcgtcatcgctgtcaccgaccgcgttctggataagaagggccgtcccaccaagctgtgctctgccttcatcgttgagcgcaccgatccgggcttctccgtcggcaaggctgaggataagatgggcatccgtggttcttccacctgcgagctgatcttcgaggattgccgtatcccgaaggatcgtatgctgggcgtgcgcggcaagggcttccagctggccatggctaccctggatggcggccgtatcggcatcgcttctcaggctctgggcattgctgagggcgctctggaggagaccgttgcctacgtcaaggagcgcaagcagtttggccgcagcatctccgcattccagaacacccagttcgagctggctgagatgaaggcccgcgttgaggctgccaagtatctggtctacgctgccgctctgaagaagcagcaggccatggacggcgcaaaggtccgttacagtgtcgaggctgctcaggctaaactgatcgcagcccgcaccgcaagcgatgtgacccgccgctgcctgcagctgttcggcggttacggctacacccgtgactaccccatcgagcgcatgatgcgtgatgccaagatcactgagatctatgagggcaccagcgaagtgcagatgatggtcatttccggcgctctgctgaagtaa

SEQ ID NO: 935 - DNA, 23241 bp, unidentified
  source 1..23241: mol_type = unassigned DNA
cctggtcaacctcgccagcagcgagatgaagcgcctgttcgactggaaacgcatccgccgcgaagcgcgtatcatcacgcccgaattccgcatccgcgaaggcgaccgtctgaaaaccatcgtggtctacacgaaaatgtgccgcggggagatgacgcgccaccttatcagaaaccggattacggatccggaaatgctcaaagaattcgaatgggaagggttccggttcgatgccgcgctcagccggggcgacgactggacattcacgatgtgacacggatgcagggaacggaggagcaccccttcggcggagtgtcattgcccctggtcgacgaacagaagcctgtccgtccggtaaccgcgtcgttcggccagccgcaggatgcggttgagcgtatgcgcggggagtgtcggcgtgcgtgacagtacccagaggtattttgccgaaccgccgccgaccaatgcccaatcgtaatcgccgcccagctccatgacgttgtaatccgaataaaaaacccagaaaaaagagacccgcaaacgccccggcacctgtcccgcacagactttgccccgcgcacgtttacaacggcccgaacggtaatccgtcccgctgttgaacaccccgatgcgaccgtcgggcctcagttcgtagcgcgcctgcactccggccagcccccgttcgaacggatggtcgtagcgggcgatctcataccaggtgcccatgtagcgcgccaggtcgaacgacggcaccggagttcggtcggtacggtcggtgacaccgccgtataccacgccgatgacaagcagcgcagcggccaataatacgatcgcgattttcactccccaaacggtttttagggagcacgtaacagattttatgccgcagcacggcaaacaggagcggaaacggcagttttattcccccgcagcgagcagcgcccgcagaataccctcctcgtcgtaaccgcagagggcgtagagctgagccggggttccgtgctcgacccactcgtcgccgatgcccagcgagtgcacggccacctcgcagccgcgggcattgaaaaatgccgtgacggcctcgccgacgcccccgcgcagggaaccgtcctcgaccgtgaccacatggcggaacttgacaccgacctcggccagcagggcttcgtcgagcggtttggcgaagcgcaggtcgtaatgcgccacgctcacacccttcgccgcggcgcgttccgcggcacgggcggcagcgttgccgaccgtcccgaccgtcaccagcgccacgtccgtaccttcgcgaagcctccggccccggccgacgggcagcgcttcgaagggaacgccccgccacagacgtcccgcaccgttgccgcgcgggtagcggatcatgaagggatgaccgtattgcagaccggtatacatcatgttgcggagttccagttcatccatcggcgcagcgatcgtaagtcccggcacggcaccgaatgcagccatgtcgaagaccccgtggtgggtcacgccgtcctcgcccacgatgccgccccggtcgaggcacatcaccacgggcagatcctgaatcgcgacgtcgtggatcacattgtcgtaagcccgctgcatgaaagacgaatagatgttgcagaaaggcaccatgcccgcagcggccatccccgccgagaaggtcacggcatggccctcggcgatacccacgtcgaagcaacgcgacggcatggcgtgcatgagcatgttcatcgaacaacccgacggcatggcaggcgtgacgcccacgacccgcgggtcgagcccggccagttcgacgagcgtctcgccgaagacatcctggtaacgcgccgcggcgcctggcgaggcgatccgctcgcccgtatcgggattgaaacgtccgggggcatgccacgtggactggtcgtgctcggcaggcaggtagcccttgcccttcacggtcatgacatgcagcaacttgggcccttcgatgtcgcgcaatgcccgaagcgtgcgcaccaactccttgaggttgtggccgtcgacggggccgaaataacggaaattgaagctctcgaagaggttgctcttgttcagcaccccctgtttcacggcgttgcccgccttttggcagaggcgcagcaggcgcggcgtatgcgaaaggatgccccacaaccgctgcttgaaacggttgtaatgcaccgacgtggagattttgagcaggtagttcttcaatgcgccggtggcctggtcgatggccatgttgttgtcattgaggatcaccaggatattggtgcgtttgctggccccggcgttgttgagcccttcgaacgcgaggccgccggtcatcgaaccgtcgccgatgacggccacgacctggtgcctctcgccccgcatctcggcagccttggccatgccgaacgccgccgaaatcgacaccgaggcatgcccgcccccgaaagcgtcgtaggggctctccaacatgcgcgggaaaccgctgatgccgcccagcaggcgtttggtcttgaacgcctcgcggcgcccggtgataatcttgtgggcataggtctggtgccctacgtcccagacgatcttgtccgcgggcgtatcgaaaacgtagtggagtgcggcggcgagttccacgcagccgaggctcgacgccaggtgcccgggatttaccgagcactcgtcgatgatatagctgcgcagctcgtcgcagtaggtgcgcagttcctccgccgagagttgcttgaggtcgcggggggaatttatttttcggagtaatttgtattcatccaacgtcatggcagcacaaagatagcgcaaggagagcgacaaaccaaacttgtttgagttcgtccgaaccgcagcctatctaaaacgaggttaaagatagcacaagccgagcaaaatgccaaatttattcggacattgccgaggcgaagcctgtgttccgtaaaacagctcagaccggacatggcgccggttttttccggcatagccaccataccgcctattttctgtaaagatagtcattcttgcgtttttttcaataaaaatttttatcttcgcgttacggtaaacccatcgtacaatgaaatacaagcgaatactactgaaactgagcggcgaatcgctgcaaggttcgcagaaatacgggctctcccccgaagtactccagtcctacgccgaacagatcagggcggcagcggccacaggcgtccagatcggcatcgtcatcggcggcggcaacattttccgcggcctcacgggcgcaaagaaaggcttcgaccgcgtgaaaggcgaccagatgggcatgctcgccacgatcatcaactcgctggccctgcaatcggccctggaggacaacggcgtgaaagccaaagtcctgacctcgatccgcatggagcccatcggcgaatactactccaaggcgcgtgccatcgaatacctcgaggcggggtatgtggtcatcatcggcggaggcacgtcgaacccctatttcacgaccgactcggcttcggcgctgcgcggcattgaaatcgaggcggacgtgatgctgaagggcacccgcgtggacggcgtatacacggccgaccccgaaaaagaccctgcggccgtcaaattcgacgaaataagcttcgaagaggtgctcgaccgccggctgaaagtcatggatctcacggcattcacgctctgccgcgagaacggattgcagatcatcgtcttcgacatggacacgccgggcaacctcggcaaggtgcttgccggggagaggatcgggacacttgtaaaaaaataaggctatggcaacaaaaaagagcaacaagcagttatggatcatgctggcgctgatcgcagtgatcatcgccgcaatcctgttactgccctcgtgcggcagccgcggcggcaaagccgcggcggataccgaatcgaccacgctggtcaaggcgggcgacaaagcccccgacttcaccgtggagatgttcgacggcacaaaaacctccctcgcagaactcaaaggcaaagtcgtgttactgaacttttgggccacctggtgcccgccctgccggcaggaactgacccgcgtgcagaaggacatcatcgaccgtttcgccggccgcaacttcgtattcctgcccatatcgcgcggcgaaaagcgggaggacgtggcggcgttccgcgaaaagatgggctatacgttcccgatgggcctcgacccctcgcaggccatttacgaccgttatgcctcgaattatatcccgcggaatttcctgatcggcgccgatggtaaagtcatgctggcaaccgtgggctacgacgccgaagagtttgacgaaatgatcaaaaccatcgaaaaaacactcgaataatatggataccaagacgattctcaacgatgcctccggccgtatgcagaaggccatcgaccacctcgaagaggaacttttgaacgtgcgcgcgggaaaagcgtcgcccaatgccctgaacggcgtaatggtcgattatttcggctcgcaggtgcccatatcgggcgccgccagcgtcaccgtacccgacgccaagacgatcctgatccagccgtgggacaagaacatgctgcgtgcgatcgaaaaggccatcatcgactcgaacatcgggctgacgccttcgaacaacggcgagcagatccgcctgtcgatcccgcccctgaccgaggagcgccgcagggagttggtgaaacaaatccgcaacgaggcagaaaccgcccgcatcagcctgcgcaatgcccgccgcgacgcagtcgaggcattcaagaaagcccagaaagagggtatgcccgaggacgagtcgaaggacggcgaaacacaggcccagaaattgctggagaaattcaccaagaccctcgacgaggcgctccaaaagaaggagaaggagatcatgacggtataaatccgtccagcacatagttaaaatccggccagcacagtatgttggccggattttttcatatctttgtccgttgtaacgatccgcctatgaaaaacatccgcttcgggctttgcatcccggcattcctgttcgcgttgttctgcacgcagcaggcatccccgcagggatatgtcaagctcaatgtcccctatgctctggtgggcgtggtgaatcccgccgtggagttcgccatctcgcccaaatcgaccttacagaccgacatcgtcatctcgccatggaagtcgatcaacgaaaagcacatgctcttcgccatcttcatgggcgaataccgccgctatttcaaggagcataaccggggctggtatctgggggcaaacatcggcatgatggccttcgacatgtcgaaaccttacatcgaagggtggaaactgaaattcgaagatcgttactgcaaaggatacggcatgatgatcggcctctgcgtgggttatgaataccagttcgggaaacgctggctgctcgacgctttcctaggttgggcatggatggacagccattacaacgggtacagtttcgacggccaggtcgacatgtacccccaccgccccgtacaacccgaacatcccgacccgttcaacggctcttcggagtggtatcccaacaagatcggcgtctcgatcgggtatcgcatcttcacgccccgcaacaaacagcggacagcggacgtgcgctaaacagcagttgcggactgcggcaggcagccatgcacggaaagtccgcaactccggaaccaaagggagcagtactcccggaatgcgggcaaccggaaacagcggccggcccgggaacctaaacccggggtaaattgcagcgggcccttccgaggcacacccgcaacaagcccgcccgaccaggccgcaacccggaatcgcggcaggcggcgaccggaaatcaccgtaagcagccccgagccgcaccgcggcatacggaagccccctcccatcgcagcatacgcaatgccgcaaaataaagaaccccgcaccttccggcgcggggttctaccattcaaaactttattcagagattatttcactttcgggccggcggctacgagcttcttaccctcttcgttacccgtgaacttcacgaaattcttcacgaagcggttggcgaggtcttcggccttgacgtcccaatccttggcgttcttgtaggtatcgcgcgggtcgaggatcttgggatctacgcccggcagctccgtcgggatcgtgaagtcgaagataggcagcgtcttggtcggagccttgtcgatcgaaccgtcgaggatggcgtcgataataccgcgcgtatccttgatcgagatacgtttgccggtaccgttccagcccgtgttcaccaggtatgccttggcaccggccttcttcatcttcttcaccagctcctcaccgtacttggtggggtgcagcgaaaggaatgccgcgccgaagcaagccgagaaagtcggagtcggctcggtgataccgcgctcggtacccgccagcttggcggtgaagcccgacaggaagtagtacttggtctgctcggagttgagaatcgaaaccgggggcagcacgccgaatgcgtcggccgaaaggaagatcaccttcttggcagccggggctttcgatacgggtttcacgatattctcgatgtggaagatcgggtacgaaacgcgggtgttctcggttaccgacttgtcggcatagtcgatcttgcccttcttgtctaccgtcacgttctccagcagcgcgttgcggcggatggcgttccagatgtcgggctcgttctcctgcgagaggttgatgaccttggcgtagcagccaccctcgaagttgaatacgccgtcgtcgtcccagccgtgctcgtcgtcgccgatcagctcacgcttcgggtcggtcgaaagcgtggtcttgccggtgcccgacaggccgaagaagatagcggtctcgcccttggcattggtgttggccgagcagtgcatcgaagccatgcccttgagcggaagcaggtagttcatgtaggagaacatacccttcttcatctcgccgccgtaccaggtgttgaggataacctgcattttctcggtgaggttgaaaacgacggccgtctcggagttcaggccgagtttcttatagttcttgaccttggccttcgaagcgttgagcaccacgaaatcgggctcgccgtatttctccagttcggcgtcggtcggacggatgaacatgttctttacgaaatgggcctgccatgcgacctccatgatgaaacggatcttgaggcgcgaattctcgttggcgccgcagaaagtgtccacgacatagagtttcttgcccgacaactcctgggtagcgagtttcttcagctccttccaggcagccttcgtaacaggcttgttgtcgttcttatattcatcggaagtccaccagatcgtatccttggtggtctcgtccattacgaagaacttgtccttgggcgaacggccggtataaacgccggtcatcacgttcacggcaccggtctcggtcagctggcctttttcgaaaccgcggagccccttcttggtctcctcgcggaaaagttcgtcgtacgacggattgtacacgatctcggtcacacccgtgatcccatactttttcaaatccattttgtccataataattgttattttaataaaacatcaaatccttgattaacctaacgtcgaaaatccgcaagaccggactttaaccgcacaaaggtagaaaaacttttacacttgtgaaaaaactaacagtgaaaaaagcaaaaaatatccattatttttcccgatgcctgtatatgattcatttataagcagctatcgtatcccccaaagccgcaggaaaacccggctccatatcctgctgcaaacatacggccgcaatccgcaccggggctccgcaggatggaattcgaggcggacgcacaggccgcacttcggtcgaaatgcccatcgacggcgcacggcactcccgcccgacggaacgccgcccggacaaaaacaatgacgggagagggcgcttccggagcaaccgcatcgaaatcaggaaaccggaggtattttccgtaaatccgatccggcagccagacccgacgcacgggcaccgaaaaaaccggggcggaaagggacgacatccgggaatttttcctatctttgattaatcagcccttatacaaaacatcgttatcattataatgcgcccgataaaaatacgccacgacaggatctgcctgaaaccgttttcgatcgaatgggtaaactaccattgtttctccatcctgttaattatttccgggatattcttttcctgttattttatccgcgacctcattcagggatttcgggatcggtattggctggccgcgctcctgctgttcggcgcgggctttgctctccatgtgttacaacgcaggaaactgaagttcaagagtatcccgctctccgggcaacccgacggactgaaagatcagatccggaaactgctgtccgacgagggatggaggatcgaatacgacaatcagcgttatttgcaggccacaaaccgaaagggcatcccctatctggactgcgacttgctgatcttgagctggagaaacgatgaaatccggtgggctctggtctacgatccgtggtataacatcgcagggggaatatttacgttcaacagatacggacggaaaaccgtaaaggcgataaaggcgctcgccgccgaaccggcggaaactcctgctccccgaaaactcggataggccatggccggactctatttccacataccgttctgcaaacgcatctgcgcctactgcgacttctacaagagcgcccggctggagcagatggacggcgtgacagccgccatgcaccgcgaactggacgaacggcaggattacctgcgcggcgaagcggtcacgacccgctatttcggcggcggcacgccttcgctctacgcacccgccgcgctgaaaggactgctggatcatgccgcgctgctgttcgactgctccggcaccacggaaaccaccctcgaggccaaccccgacgacctgacggaaaattacctcgacgggctgcgcgaagcgggcatagaccggctgtcgatcggcatccagtcgttcgacgacgggtgcctgaagctgatgaaccgccgccatacggcggcacaggccatcggtgcggtgcgggcggcacaacgcgccgggttcgggaacatcaccgccgacctgatcttcggcattcccggcttcggcggggattcgctgaaaagatcgctcgacggaatgctgtcgctcggcgtacagcacatttcggcataccatttgaccatcgaacccgatacggccttcggccgccgtgcggcacggggcgagttccgcgccgtggacgaagaggtcagcgaggaggagttcctcacggtgcacgatacgcttacggccgccggattcgagcattacgaggtttcgaactatgccctgccgggatttcgagcccgtcacaacgcctcctactggcatgggacgaaatacctcggcatcgggcccgcagcccactcgttcgacggcgaagaaaggcactggaacgccagttcagtggaaaaatacatagcaggcgctcccgccgggaaggaagtgctgacccgacgcgaccggttcaacgaatatgtcatgacggcgctccggacggtcgaggggatcgatctggaagaggccgcggcacgtttcggagcaaaacggctggcgcggatgcaggaagaggcagcaccgttcctccgttcgggtacgctccgcatagcccgggggcggatggccctcccgccggaaaaattcctgatttcggatgccgtgatcggggcacttttcgaaacataacacgacatgcaacgatgtgaaacagaaatgttaagttattattaaatatttttactaattaatcgaacaaggttgttttatataaatataagtattacctttgcagcggttttcaaccgattcatcgagtaaattacaaacaagcacgacaaatatgagtaatgcaaaactgactcccgactaccttttcgaggtgagctgggaggtctgcaataaggtcggcggcatccataccgtcatctcgaccaaagcacagaccgtaacccgtaaattcgccgaccgctatatcctcatcgggcccgacctccagcacgagggggcgaaccccgaattcgaggaagaccccgacatgctgaaggcatggcgccagagcgtatacagcgacggcctccggatccgcgtgggacactggaagatcaagggcgagccgacggtgatcctggtggactttacttcgctgatcccccgcaaagacgaaatactcaagaaactctgggagacgtaccacgtggattcgctctcgggacagtgggactacatcgagcccgtgctcttcggctatgccgcgggcatggtcatcgcctcgtatgtcgacaacttctgtaacgcgacggacaagatcgccgcgcatttccacgagtggatgaccgccgcaggcggactccacctgcgcaaacacgccccctatgtggccacgctcttcacgacgcacgccacggtcatggggcgctgcatcgccggcaacggcctgccgctctacaacgacctggcgaaattcaatgccgacgaactggcccggcagttcaacgtcgtggccaaacactcgatcgagaagatggccgccacgtaccacgacgccttcctcacggtcagcgacatcacggccaacgaatgcaaatacctgctggggcgtgaaccggacggcatcacccccaacgggttcgaaaacgacttcgtatggacgggcgaggagtacgacgccaaacgtgccgaagcccgcacggcgatgatctcggtagccgaagcctgcctcgggcacaagttccggaaggaaccgctgatcgtcggcaccagcggccgctacgaattccgcaacaaggggctcgacgtattcatcgagtcgctcaaaaagctggccgcctccgaccgtctcaaacgcgaagtcctggcctatgtcaccgttccggccgccaaccgcggcccgcgtgcggacttgcaggcacacctggccgacccggccagcccgatcgacggcggacaatacaagtattcgacccattacctcgaataccagaacagcgacccgatcgtgaacgccctgaacggcagcatcctcacgaccgacgattcgaaggtgaaggtgatcttcgtgccgacctacctgaacaaggccgacggcatcttcaacaaggattactacgaactgctcgtcggtatggacatcacggtattcccctcctactacgaaccgtggggctatacgccgctcgaatcggtggcattctcggtgccgaccatcaccacgaccctcgcagggttcgggctgtgggtcgacaagcagcgcgagcacctgggcgtggaggtcatccgccgcgacgactacaacgacaaggaggtcgaggagaagatcgccgactcgctgctgcgcttcagcgcgctggacgagaaacatgtctccgagatgcgcgtttcggcctacgagatatcggaaactgcgctctgggagcaccttttcgccgcctacgaacaggcctactccgaggctgtcgaaagttcggtgatccgtaccaaccgcgccgtgctcgacgagagcaacgcccgcaacgaacagatcaatttcgtacgccagcagctcttcgccgagaagcccaactggaaccgcatgatggtcgacaagaccctgcccaagcgcctgcatgccctggaagaactttcgcgcaacctctggtggtgctggaaccccgggccccgcgacctgttcgaaggcatcgacccggcactctgggccgaatgcgagcgcaacccgatcgctttcctcgacaaactgagcgtggaacgcatgaaggggctcgaacgcgacgaggccttcctcgggcagctcgacgccgtatatgcgcagttccgcgactatatgaacgaaaaacccgacccgaagacccccacgatttcgtatttttcgatggaatacggcctgcactcgtcgctcaagatctactcgggcggcctgggcatactcgcgggagactacctcaaggaggcctcggacaagaacgtcccgatggcagccgtgggcctgctttaccggtacggctacttcacgcagcgcctttcggcacagggggcgcaggaggcgacctacgaggcacagaatttctataaactcccgatctcgcccgtgcgcgacgaagccggcaactggctgacggtcaccatcgccttcccggggcgtacgctttcggcgcgcgtctggaaatgccaggtcggccgcacggatctctacctgctcgacacggatttcgaggccaacctcgaggaagaccgccagatcacccactacctctacggcggcgactgggagaaccgcctcaagcaggaaatcctgctcgggatcggcggtatccgcgcactgcgcgcactgggcatcaagcacgacgtgttccactgcaacgagggacatgccgcgttcatcggcatcgagcgcatccgcgacctggtgaaccacaagaagctctccttctcggaggcgctggaggtgatccgttcctcgtcgctcttcacgacgcacacccccgtgcccgccgggcacgacgccttccccgagtcgatgatccgccagtacatgtcgcactaccccgacgtgctgggcatcacctgggagcagtacatcaacctgggcaagaccaaccccaacgaccccaacgagaagttctcgatgtcggtgctggcctgcaacctctcacaggaggtcaacggcgtatcgtggctccacggcgaagtgtcgaaggagatcctgggcaacatgtggccgggttatttcaagaacgaactccacatcggctatgtcacgaacggcgtacacttcccgacatggatcgcgacgaacctgcgccgcctctacgcccgctatttcgccgacggcttcgaggggcacgcctacgacatcccggcatggcagaaagtccacaacatccccgacggggagctgtgggccgggcgcatgcacctcaagaacaagctcatcaagcatatccgcaagcgttacagcgaccccagccaggtgcggctcgactcgccgcgccagatgttgcaggtcatcgagggcatcaagcccgacgtgctgtccatcggtttcgcacgccgcttcgcaacctataagcgcgcctacctgctcttcacgaacctcgaccggctctcggccatcgtgaacaacaaggagcgccccgtgcagttcatcttcgccggcaaggcccaccccaacgacaagccggggcaagacctcatcaaacgcatcgtcgaagtggccgccatgccgcagttcgtgggcaagatcctcttcctgcagaattacgacatggagctggcacgccgcatggtgcagggcgtcgacgtatggctcaacaccccgacccgtccgctcgaagcttcggggacgtcgggcgagaagtgcgtcatgaacggcgtgctgcaattctcggtgctcgacggatggtgggtcgaaggctacaaggagggcgccgggtggatgctgcccatggagcgcaccttcgccgaccagcactatcaggacgagctcgacgccgaaatgatctacaacaccatcgaggagcagatcgtcccgaaatattacgaccgcgacagggacggcgtaccccacgcatgggtggagtcggtcaagaaatgcgttgccgacatcgcatcgaatttcacgaccaaccgcatgctaaacgactacgaggaacggttctacaacaagctcgcggcacgcaagcaccggatcgtcgagggcggctacaagctggcccgcgagatcgcggcctggaaacgcaaggtctcgtcggtatgggatcagatccgcgtgatcgacgtacagcgcgtaaaaatcgacaacaaggcgatcttcgtaggcgaaaagtaccatttcgaagtaaccgtggacatcgccagcctgcgtcccgaggacatcggcgtggagatggtcattgcacagcagatcgttggcgggcagaatgccaacgtgatgcacacgatcgggctcaagcacaccaagaccgaaggcagccgcgttacctacgcactggattatacgcccgacgaagccggcacgttcgacgtggcgctgcgtattttcccggtgaacccgcacctgccccatcgcatggattttgcattggtaaaatgggcttagccaatttggccctaataatgtaaaaaagatatgaattttcggaaatgcgattgccttttcgcaaaaattcagctatctttatagaacgaaccgtatttttagaaggacatgtcagcacttactttcgacaaaagcgaattgggcaacctggagtattcgctccagcgcgagatgctctccacagaccgtatcggcggatatatgagcacgactatcgtctgctgcaacacccgccgctaccacggcctgatggtagcgcccatagacgacagcgacaggacgtatgtcctgctctcgtcgctcgacgaaaccatcgtccagcacgaccagacattcaacctggccctgcaccgcttcaagggggtatacgagccgcgcggacacaagtatatcaccgacttcaaatatacgccgacccccacgatcacctaccgcgtgggcggcgtgatcctgcggaaggagatgctgtggatacacaagcgcacgcagctgatgatccgctatacgctcgtcgatgcgcattcggaaacgcacctgcggctgcggcctttcctcgcctttcgcgacaaacacgcgctgacgcatgccaacatggaggccgacgggcactcctacccggcagtcaacggtgtgaaatgccgcctctacgggtcgttcccgtggctctacctgcagaccagcaagcccggtgcggaattcgtgcccgcgcccgactggtactacggattcgaataccagcaggatctggcccgcggttatgacggttacgaagacctgctcacgacgggctatttcgaaacggaactcaagaagggcgaaagcatcatcttctcggcctcgctcgacgaaatgggatcggtcaagaccatcgaagaggtattcgccgcatccatcgcccggcgcacgcacaagatcgacttcatcagctgcctggagcactcggcgcggcaattcgtcatccggcgtcccggcgaccgcaccgaagtggtgtcgggctacccgtggcacggggtttcggggcgccaaaccttcgtttcgctcccgggcatcacgctcgaacaggggcataaggaggactgtatcgacgccctcgacacgctggtgcgcgaaatgcgcgacggcatgttcacgggcaacgcctcggcggccgtcgcagcagatgccccgctgtggttcttctggacgctccagcaactcgaacgggaggtgggcggcaagcagatatggaaagcctacggcccggccatgaaagatattctggaaagctaccgccggggagtcggcggtcgcgtcgcgctgcatgacaacgggctggtgtgggccgctgcggacgacgtcccgatgacatggatgaacgccctgatcgacggccgccccgtcactccgcgcaacggttatcaggtagaggtgaacgcattgtggtacaacgccgtatgctacacgctcgagctggccggcaaacacggcgacaaagccttcgtcaaggcctgggagtcactcccggcacgcacgcaggcgtcgttcgtcgaactgttccgcctgccggaaggctatctggccgatttcgtagggacggacgggcccgacaaatcgacgcgccccaacatgatcgtcgcctgcgggctggattacaagatgctcgacgaagagctgcaactggaggtgatccgcaccgtacgccagcacctgctcatccccaaggggctgcggacactctcgccccgcaacctgctctacaaaggttcgcaggaaggaggttcgcccgcagagcgcgatttcgcgggcaagaacggttcggcatggccgtggctgctgcaattctacgtcaaggcatgtttcgatatcgacggggatgcattcctgccgcaggcccgggagatactcgccaatttcgacgaagacatccagagctacggtatcgggtctatttgcgagctttacgatgccgacccgccctacgcatcgcgcggcgctatctcgcaggcgtggagcgtcggggccgtgctcaatatccacagcatgatccgcgagcgcacgaaggaggaggcccgggaaagcaacaccgctgggaaagccgcgaaggcggtgaagcccgtggcgaaaagtactgccaaaaaagctgcggtaaagaaaaccgcaacggacaatacaccaaagaaaactgcggcaaagacggccatcgcaaaagaggccgcagaaaagaaacccgcagcgaaaaagagtgcggagaagaaaccgacggaaaaaaagccggccgcaacaaaggccgcgacaaaaaagataaagactgggaaataacaggctgtgacgggaggaaaatcctgccaaggcgggattccggggcgtccggacttgcaaccgcggcttgtggccgtgagccgggacgttcctgtgagaggaaaggtaaaaattgcaaaacaaggatatagttatgagagttttaatgttcggttgggagttcccgccccacatcgcgggtggtttgggaacggcatgttacgggatgacccgcgggctggcacgcaacgatgtcgacgtaacattcgtagtaccccatgcctacggcgacgaggatcagcgattcacgcacgtcctgaatgccagtgacgtggaggcgctttacggatctacgggaagcggcgcggacgatattctcgagaagatgtcgttcatccacatcgactcgaacatggtaccttacatctcccccgaagagtacgaacagtaccaggagcgctacgtcaaatccggacagaaagtctggtcgacgaccgatgcctggaaacaacgctataccttctcgggcaagtacggcgccaaccttatggaggaggtcgcccgctatgccgtagtcgcggcgcaggtggccaaagacctcgaagggcagttcgacgtgatccacgcccacgactggctcacctactacgccggtatcgccgccaagcgcgtatcgggcaagccgctggtcgtgcatatgcacgccacggaatacgaccgcagcggcgagaacgtcaacacgcaggtctacgccatcgaacgtgcaggcatgcatgccgcagaccgggtgatcgccgtttcgaacctcacgcgcaacatcgtcatcaaccgctacggcgtcccggccgacaaggtcgtgacggtacacaatgccgtgcggttcgccgcaggccagtgcaaaatgcccgaacggggcgtggacgacaagatcgtcacgttcctggggcgtatcacctaccagaaagggcccgactatttcgtcgaagccgcggccaaggtgctgaagaaagtccccaacgtacgtttcgtgatggccggctcgggcgacatgatgaaccatgtcatccgccgcgtggcgcggctgggtatcgccgacaggttccacttcaccggattcctgcgcggcgaggacgtacacaagatgttccagttgtcggatgtctacgtcatgccgtcggtctcggagccgttcggcatatcgcccctcgaggcaatgcgttcgaacgtcccggtgatcatctccaaacagagcggcgtggccgaagtactcgactatgccgtgaaggtcgactattgggatgtcgacgccctggccgatgccatctacgggctgatccagtacccggcgctggcgggaatgttcgcctcgaaaggcctggaagaggtcacgaacctgaaatggaacgatgccgcagccaaaatcaaaaccgtatacgaagcggtgatcgaagagaataaaaaacaataaaatagctaccctatgaaaaccgtctgcttatattttcaggtacaccagccctggcgactgaagaagtaccgcttcttcaacatgggcaaggaccacaactatctggacgacctgctgaaccgctccatcatgcagaaagtcgcccggcagtgctacctgccgatgaatgccctgctgctgaagctcatccgggaaaacaagggtaagttccgctgctcgttctcgatcacgggcatcgccatcgaacagttccgcacctatgcgcccgaagtcctcgaatcgttcaaggaactggccgccacgggttgcgtggagttcctcgccgagacttactcccactcgctggcctcgctggcttcgaaggaggatttcaccgaacaggtaaagctccacacggcgctcataaaaaaggaattcggggtgaaaccgaccgccttccgcaatacggagctgatctactccgacgacatcggcgccgccgtggccgaaatgggctttcgtacgatgctggctgaaggcgccaaacacgtgctgggctggaaatcgcccaactatgtatacgccaacgccgtcaaccagaagctgcgcctgctgctgcgcaactacaaactctcggacgacatcgccttccgcttctcgaaccgcagttggaacgaatggccgctgacggcggacaaatatgtgaaatggctcgcttcggacgatactccgggcgaggtcatcaacctcttcatggactatgaaactttcggcgaacaccagaccgccgacacgggaatcttcgagttcatgcgcgcgctgccgaaggcaatcctcgccaagaaaaacggtctggagttcgcgaccgtcaccgaagccgccaagaaacaccagcccgtagcagtactccactgtccgcacgtgatgtcgtgggccgacgaggagcgcgacgtgacggcatggctcggcaacgagttgcagaacgaagcgttctcgaagctttacgcccagaaggagaagatcgcggcactgaaaagccccgacttcgactatgtgtggagtttcatgcagacctccgaccatttctactacatggctaccaaatggctctcggacggtgacgtacactcctatttcaacccctacgattcggcctacgacgctttcatcaactacatgaacgtcctctcggatttcatcatcgaactggacaaggctgtggcggcaaaggccgcaaaggcgaaataacgggcaaaagaaagatttacgacacactacactaccgaatagcgaaacagccgggatccgaggatcccggctgtttttccgttggtctgtctcgggcgggccaaacaaccgcccgtaaaaggcaggaatatccgccgctacccgattcaacgacggatattccataagatgcccgggcattccgtgcccgcagccttgcgatcgtcagaaagccgcaatccgcgcaagaaacgggagccgcacgagaaacaggagccgtacaaaaacctcaaccccacaaaaaaaccgggctccagggtaacgaacccacaatgcggatcgaagagaacgcagggaaactcccggatataaaaaaagcggcagaccgcgcctcttcggtctgccgcaggcaggagttttacttgaaaagtgggagttgttgttaccaaaaaactttggggatgtgcgactcctgccttgggagtatttccgggttcccggcgctgctgcgaggcagcgccggattccgcgggaaagggattcaataattattttttgttctcgaacgtcagcgtgatgttcatcgggtactccttctctgcgtactgcttggttgcatccagcgaatacttgtaggtgaaggttacctgaatctgagctgttactttaccgcccagcaggtcgtcggaagcagcaacagtcatttcaccggtggccggatcgaacttgaagcgcgagaagtcctccgtgccagatacgacgctcgaatacgatgcgtcaccgaacttaacctcgaagccgtatgcacccgtagcgaaagtcgttacgccgcttgcatcaaccaaatcattaccgaagatgtcgcgcgggagcatatgtttcggattgccgtagtttttagcggccagtaccttctcgtaaacgttgacagttgcagccgtcttgacagctatcggcgttgcaagctcattgaagtttgtaccccagcttgcgatgtcgatcgggttggtaaggataacctcgaaagtcttcgaagcgatgggcagcccctcgtaagtcatctcggcaactactcctacggaattcagaccgcagccgttccaatccatcgtccatgcatccgacgtaacgttagttccgttggtaatcgtcggtaccggagttaccgtaggcgtcgttgcagccagagagaacttcagaccgatcttcgaagcatcggtaccgtcgggataagccgcattgtaggcattggtcagggtgatggtttcgaccgtgaagctgttgccggtcttgtctgccgtacccatgactactacgttgccctcggcattgacgctggtacccttggccagatagaagccctgatccttgttgatcgttacactgccttcgattgcgatcgagaagactgcatcggcgatcgtgtagcaagcgccctcaggtgccgtgaaggtataggactcggcattgtcgaagtccacatagctgcgctggaagtctacgcacagacggtcgtaactagtccctgccttaccgattccattgtaacgaacggctgcttcgagagcctgcgtcgtggcgtttttctgctcgttgttcttcatttcgccggggttggtgctctgacgcatgaaagcgaggaattcactggcatcggcgaagaaggtctgatcttcgggcagcagttcgtaaacggctttttccgcaaagttttcctgagcgattaccgtcagtacctgtgctccataattgctgatcttggcctcgggcatattcagcgtgtatttgagatcagaaggcagacccgtgagggtgatcttacccttcagcgtaatctcctcggcctgaccgagagttacggtcttctcgatatcgagcgtacccgaaccacccttgtaaccaccaatccaatagtcgaagaacttggcgtcgccattggtgttgatcgtcgggaggtttacagactgaatctggatgccctggttaagcgttccggcttcgtcgccgtaggtgacggtccatgtgttgtcggcttgaaccgatgctttgaactgatcgtactgagccttggtgagtttattagctccggcagcatcaaagacgatgttctggataagataagcgccattcgtcgagtaaatcgagtaattccatgtagcgctggcattgaggttttcgatggcaggcagctggaagcgcgtaagtgtagtctttgcggtgtaggcagcggcgccgttcgtcgcaacgttctccgtctcgccgacagcgtggatagcggttgtcacctcatctacgatcgttttgtctacgttggcgggaacgccttcctggatcgtgatcttgacgagctggctcttggccgcagcatccttcatcggatcggcgggatcgaaaacaaccttcgtcatacccgaagcaacagtccaactgctgcgggtgtatacgggcttagcatcaagctcgacatcccagttaccctgctcggcagccttatcgagcgaaatgatcgtattgcccatcttgtaggcgaacgagtactcgctgagcatcgtgagcggttctgtctggttgtagaccatctcgtactcggcaccgctagcggggatctcgacgagttttttcgcatcgccttcgccctcttctttggccagaacgatattggcgatagcgttatagtcgtcacctaccgtcggaatgtaagcggtagtatattcgataccggtatcgaccgaagtatcctcatccttagcaaccgacgatttgctggttactttcagcgcgatagcataggtctcggcagcatccgaaggagctgcggcggggtaagtataatccgtgcttacgaacatcgtgatcttaccgtcagcggagccgacaacatcgccttcgatctcgaacttgggtgcctcggcacgcgtaaccttttcgggaacgaacgagaatacatccttcgaagcattgtgcttagcggcgagctgcgtagccagcgttttgggcgaaacaaggaaggtcatctcgctcttggcgcccgtcgtcagacggatggtctccgagcctgcggtaacaacgataccgccgaagttggcgatgccatcgatgctcttgggaacataaaccagcgactggatgcggccggcgagattctcgacagcgctccagagattcttgatctgcgcatcataattttcgaaacgctccttcagatcggcttctttcaggtagatggccttaccttctgaatcatagagctcgtcgttgataccgtcctgaatcatcgactcgatagccgccttcagggttacattggcatcggtcagctctttgatgatcgtatcggtgatggccttacccatctcggccttaaccgtctcgtcgtcgaggtagttagccatataggtagcgaagttgtcgccgagaaccttcttgatggcatcggtgacagtggccgtctccgaagatacggaattggcaacagccgtgagtatctgatcgatctgagtcgccgataactgatcggtaccggttatgtaacctttaccctcgacgaagagcctcatctgctcctcggtaacatactcacccttgatcagagcctgcttgatgatctcctgaattccggcttgcagtttacccatggtttcctccgaagcgatcatcgtctcgaagatcttctcgacatcagcggcagtcaactgacccttggtcgcctcatcgatcagcttctggacttcatctttggtctgatatccctgagcctgaataagttttaacacctcatcgctagtcagccaatctttcagatccgacttcttggcatagtctgccagccttttgtcgagttctgtctggaggccgctgttggtaacgaaagacgagaaatctatcccattcaatttgtcggtaacaacttgaagggcagaagcgtcggccttcaactcgacttgacctttcaagtcgttgatctgacctttcaggtcgtcgatatcgtcgtcgtagtctttacaaccgacaccggctaacaatgttcccgtgaggaaca

SEQ ID NO: 936 - DNA, 10804 bp, unidentified
  source 1..10804: mol_type = unassigned DNA
atggaaaaattcagcgtcaaaaaaccgttcaccgttctggttgcagtcatcatggtcatcatgctgggccttgtgtccgtgcagaatatgcagaccaacctgctgccaaacgtgaacacaccgtacctgatggtggtcacggtctatcccggtgccagcccggagcgtgtggagagcgaggtctccgacgtgatggagagcgcgctgggcaccatctcgggcgtgaaaaacgtcaccgccacctcggcagaaaactacagtctgctgctgatggagtttgaggatgatacggacatgaacagtgccgtagtcaaggtgtccaacaaggtggatcagaccaccgccagcctgccaagcacctgtatgaccccctccatcattgaatataccctgaacatgaatgcttttatgaccgtggccgtcagccgcgagggcagcgattcctatgagctggccgatttcgtcaacgacaccatggtcccctatattgagcgtcagggcggcgtttccaatatttccgccaacggcctggtcacccggatggtgcaggtgcagctcgatcaggaaaagatcgatgccatcaacgaaaagctgctggaggtcattgacgtgcagctggccgatgcaaaggcccagctggatgatgccgaggcccagatcgaggcaggcagaaaggagtacgagacccagctggccaattacgacaagctggtcagcgataccatcaacagccagtactccggcgagctgcaggattccttcatgctggtcaagaagcaggcacaggcccttctggagagcgtcaaccagctcattgccgtggtcaacgagcctgagatccagcaggccctgatcgatgtgcgggacggcctgcagcgagtcgtggacaagttcaacgagaccggaatgcaggatatcgattctctgatcgagatcgtggcggagctgcgcgatatcaccgataagctgaccaccgctctgcaggatctgcagcagcgcctgaacgcgcagggcgacaccgccggcacaacggccggggagctggtcgatgacctgcaggtgcagcagagcctgagcaacatttataacacgctggagagcaccatcaaggccatggacaacgtgcccggcctgatggatcagttcacccagatcgtgggcagctattcccagcagcagctgcaggcctatatcaagttcaccgaggcccgcgagatgctgaacgattacgagaagcagctggaagatgccaagcagcagtacgaggatgccaagcagatggccatggagaactccgacgtggccaagatgctggatatcgacacgctggcacagctgatctatgcccagaacttctccatgcctgccggttatgtcaaggattccagcaacaagtcctggctgctgaaggtcggcgaggagtacgacagcatcgaggatatctccggtgccctgctgctccatgtggacggctttggcgatgtccgcctgtctgacgtggccgatgtgcagatcatcgacaacgcggaggacagctttacccgcctgaacggcgagcgctctgtggtgctgaagatcttcaagagcaattcttccagcgccggtgaagtttccggcaactgcaaggctgccttcaaggagctggaacagaaatacgatggcctgcatgtggtcgtgctgtccaaccagggcaactacatcagcatcatcgtcagcagcatcctgagcagtatgctcatcggtgcggcccttgccatcatcgtgctggccatcttcctcaaggatatcaagcccacgctggtggtcggcatcagtatcccgctgtcggtgctgtttgccgtggtgctcatgtacttcaccggtctggatatgaacattatgacgctggcgggcctgtccctcggcattggtatgctggtggataactccatcgtcgtcatcgagaacatctaccgtctgcgcagccgcggcgtgcccgctgcccgcgcggcggtccagggcaccaagcaggtgggcatggccatcatggcttccaccctcacctctgtctgcgtgttcctgcccgtcatcttcacatcgggtgtcatcaagagcctgctgcagcccatgtccatgtgcatcggctactgtctggctgcttccctcatcgtggccctgacggttgccccggcggcctcctctaccctgctgaaaaactccaagcccaaagagctcaagtggttcgacaaggtgcaggaaaagtacgtcaagagcctggaatggtgcttccagcaccgctgggcaccgctgggcgcggcagtggtactgctggtgttctgcggctggcgcgtgatgtccatgggcgttgagatgctgcccaccatcaccagcaacgaggccatcgtcaccctctccaccgagaaggatctgaccaaggaagaatcctatgctgtggccgagaatgtcattgatgccctgctggctgtggacaacgtggaagaggtgggcgttaccaccgacagccgcgtggccggaatggatgtcggccagctgggtctgccccagaccatcaccgacctgctgaaagccgccaacagctacggcacctaccagatcaacgtgatgctggacgagagcctctcctcccggcagatcgaacaggcccgcgaggcgctggaggaagctgtgaacggcgtggagaactgcaccgccacagttgagatcagcggaatgcaggagctgaccagccagctggatatgggcctgaccgtccagatctccggcaacgacatcgacaccatgactgccctctccgagaaggtggtggatatggtcaacgagatggacggctttaccaatgccaccaacggtctgggcagcggcgatgccaccatcaacctgcagatcgaccgagataaggttcgttcctacggcctgaccgtggcgcaggtctaccagcagatcgccgccaagctgaccaccaccaccacggcccagacccccgttgccatcgatggctccaccatgaatgtccagatcagcaacaatctggaccccatgaccaaggaaaacatgatggatatgacctttacgacctccgtcatggccgccgacggcaccaccgagaccggcacctgcacgttgggcgatatggccacctgggtcaccggctccaccccggactccatcaccagcaagaaccagacccgctatatcagcgtgacggcggacgcggtggagggaaccaataccaccaccgagacccgcgcgctggaaaagaagctgaacgagtttgccgcatccgatgaaatgcccgagggctgcagcttctatatgggtggcggctctgagatcaacggcatggtggtggatcagatgggccagtggatgttcctggcgctgcccttcgtctaccttgttatggtggcccagttccagagcctgctctcccccttcattgttctgttcaccattccgctggcctttaccggcggcctgctgggcctgctgctcaccggccagcagctgaccatgatctccctgatgggcttcattgtcctgatgggcacggtcgtcaacaacggcatcgtgttcgtggattacgccaaccagctgcgcatcggcggcatggagcgccgtgcggccctgatcgccaccggcaaaacacgaatgcgccccatcctgatgaccaccctgaccaccgttctggccatgctccagctggtgttcagcggcgatatggccagccagctgatgagcggcatggccatcgtcatcatcttcggcctgacttacgccaccctgatgaccctgtacgttgtgcccctgatgtacgacatcctcttcaagaagccgccgctgaacgtggatatcggcgatgagaaccttgacgacatccccgatgatgccgccgagtatatcgcccagaacaccgctcagccggagtaagaaaacttccccaaagcacccttcacagccatgtgaggggtgcttttttgatacttgcagtatagataaaatgatgataaaatataaacgtagaaaagtactctttttctgaaacgaaaggatggcggaaatgcggttcgtacagttggatgagaagaatgaagaacgcatgaatgctatccgtaaattcaccctgatggatgacacctttatgacacaggtgttttcaggagataaagagagcacacaggagctgcttcgcatcatcctgaaacgaaaggacctgaccgtcgcaaggtctgcaacacagcttacgatcggcaatctgtttggccgttctgtacggctggacatttatgcaacagatgatgcaggcaggcagtatgatatcgaggtacagcaggaagataagggagccgctccggaacgggcgcggctgaacagtgcgatgtttgattcccgcctgacaacttctggtgaaaaatattctgacctgcctgagacatatatcatatttattacggcaaatgatgttttgggagatggtcttccggtttacaatattgaacggacgattcaggaaaccgggaagctgtttcacgaccgtgcacatattgtatatgtgaacggcgcatatcgaggaacggatgaggtcggcgcgctgatgcaggatttccgctgtgatgactatcgggatatccggaaccccaaaataagggcaagagtaaaatactttaaagaagaaacggaaggagtggcagctatgtgcaagacaatgcaggtgatcgttgatcgggaacgagaagatgccgaggtggcaaagggaaagcgcattgcgctcaatctctggaagaacggagagcatgatctggataagatcgcccagaccacagaactttcgttagaacaggtgcgggaggcaattaccgaaccgtattctgcataagaaaccttctccaaagcacccttcacagccatgtgaggggtgctttttgtcaacttgctaaaaaaatcgccgcagctttggcacagtctccaaaaattgaggaattcaataaaaaatattgacaggggggggggtagatgtaaaatgagttcacaatacagaaggtgtaggggtatgctttctgtgtggtaaaatatcattttacattggaggttctacaaatgaaaatgctcaagaaaatggccgcccttctgctggccggcgttatggcaatggcactgctcaccgcttgcggcgatgacagcacgccttcttttggtaagcaggttgaggatgcaacttttgcttctgtaaaggcatctactggtattcaggtaaatgatgcagatctgaagaaactcgctgagagcaagattgatctgattgacaccgagaagggcacttttgattttaagaaatcctactccgctgaggaagcccaaaagttccaggaagatgtgtattcgactggtaagggttctatgacgatggcattacctctgatgaaggatggcaaaatgcagaacaatggtacctatgaagtaatggaaattactgcggataacattggaagtctgaatcagggtacggatgctatgcacgatttgctggataagatggcaagtgtaaatggtatgtctatcaaaattacgaaaattggtgttgcagctaagactgtaaatggaaagacttacgctgcaattgcaatgacctatgaggttacagttgatacatctgcaatgcccaagcagtaatatctaatctgacaatacaagccccggagcgcctacccctggccctccggggcttttttgggcttatggggcagaacttacaaaaaaattctcaaaatattggatagaatcccttaaaaaatgccaacacagaaggagaaaactgtgatataatcaaaacaataaaggataaaatagagagtgtgctgtcctgaaaaaatacaaaaggaggcgagccctatggcacagtttctctccaagccctttggcatgaccccaaacggcgaaaagatcaatgaatacatcatctcgaaccccggcgggctggcggtcagtgtgctgaactacggctgtatcatcaagaatatctgggtgcccaccaagcgcgggccggtggatgtggtgctgggccacgacacctacgccgattacgtcaaggactttgaatcgtccggcagtacctgctgcggcgcgttcgtgggccggtacgccaaccgcattgagaatgccgtgttcaatgtgggcggcaagacctaccagctggaagccaacaacggcaaaaaccacctgcacggtaccttcccgcgcaagctgtatgaggtaaagacctttggcgataccctgcttctggaggcggaaagccccgatggagaggatggtttcccgggaaatctgaagatctcggtgcggtatatcctgaccgaggacaacgccctgcggatggattaccgtgtctcctctgatgccgacaccatcatcaacctgaccaaccacacctacttcaatctggatggcggcggcgatgtgctgggccagaagctgcgcatctatgcgtcccgctatctggagggcaacaacgagacctgccccaccggcaatatcctgcccgtggcgggcacgccgatggatttccgggcgggcaagcccattggccgggacatcgacaccggcttttcccagaccaccatggtgggcggcggctatgaccactgctttgtcatcgacaggggccgcggtgccagccagagcctgtgcgcctgggcttccagcgataagaccggcatcagcatgaaggtctataccacccagcccggcgtgcagctctacaccggcaatttcctgcaggactgccctgcccccggcaagggcggcgtgccgatgcagaaatacggcggctttgcgctggagacccagcacttcccctgcagcccctcccacccggagttcccctccaccgccctgcgggccgggaaagtgttccgcgccaacaccaccctgcggttcttcaccggcaaacagtgcgggaaactgtaaaatgcagccctctcaggcaaagcctgacggctttgcctgagagggctttttctctgatttgcacaaagcgttccatcactccatgtgcaaaacacaaaaaacgcttgtaaatcaatgcgcggaaaaataaatggaaacaaaaatccatccttataaaattcccgttacttgattctgcggccaaaacgttgtatccttgtggcagaaggcgggcctgccccgcgcaagcaactttggtgacgagaagagaggtacttttatggcaattttggtttccggcggtgccggttatatcggcagccacacctgtatcgaactgctgaacgctggctttgacatcgtggtggcagataactattacaacgcttcccccgtggtgctggatcgggtcaagcagatcaccggcaaggacttccggttctatcaggctgatatgacaaagcacgaggacgtggagaagatcttcaccgagtgccctgatatcgatgccgtcatccagtttgccgcctacaaggctgtgggcgagagcgtttccaagcccatcgagtactactataacaacctcaactgcacgctggtcattctggacgtgatgcgccgccacaactgccgcaacttcgtgttcagctcttccgccactgtttacggcgaccccgccagcgtgcccatcaccgaggacttccccgtgggtgccaccaccaacccctacggcaccaccaaggcctttaccgagcgcatcctgaccgatgtctgcaaggctgaccccactctgaatgtggccctgctccgttacttcaaccccatcggtgcccacaagtccggcctgatcggcgaggaccccaacggcatccccaacaacctgatgccctacatcgccaaggtggccgtgggcaagctggaaaaggtgcacgtctttggcaacgactaccccacccccgatggcaccggcgtgcgcgattacatccatgtggttgacctggcccggggccatgtctgcgccatcaagaagctgcagaccaactgcggcctgttcatctgcaatctgggcaccggccacggctacagcgtgctggatgtcatccatgcctttgagaaggcctgcggcaagaagctcccctatgtgatcgatccccgccgtcccggcgatatcgccgagtgctatgccgaccccaccaaggccaagaacgagctgggctgggtggctgagtacggcatcgaggagatgtgtgccgacagctggaactggcagaagaacaaccccgatggctaccacaccgtgaagtaaacagaactgttctcaaaacgcacctttgaacgtgaaaattcaggggtgcgttttcttttgcccggaaacctgccggaacaggagaaagatctctacaaaaaacagcggggacaggcgggaatttttgccgctccctgccttgacaatgcctttgagttagcttatattaagactgttcatatacactaacattttgtcgaaggaaaggcatctgccatgacattaaaggaactgaagatcggcgaaagtgccgtgatcgatacagtgggcggaacgggagaactccgccagcattttctggatatggggctgattcccggcgagaaggtcacgctggtgaaattcgcgcccatgggggaccccatggagctgcagatccacggctatgagctgaccctgcggctggacgatgcggcacggatcgagatcaccccggcggaagcacccgcagcagccccggcacggaaggccggccggatggtggagcacccgggcctgggcgagggcggccgctaccacaccaaaaagggcgaacacccgctgccggatggaacggtgctgacatttgcgctggccggaaatcagaactgcggcaaaacgaccctgttcaaccagctcaccggctccaaccagcatgtgggcaactttccgggcgtgacggtggaccgcaagagcggtgccatccgggaacaccccgataccgaagtcaccgacctgcccggcatctactccatgtcgccctattccagcgaggagatcgtgacccgccagttcatcatcggcgaaaagcccacgggcatcatcaacatcgtggatgccaccaacatcgagcgcaacctgtacttaacgatgcagctgatggagctggacacccccatggtgctggcactgaatatgatggatgaggtgcgcggcaacggcggcaccatcaacatcaacgagatggaagcgatgctgggcatcccggtggtccccatttccgccgccaagaacgagggcgtggatgagctggtggatcacgccatccatgtggcaaagtatcaggagcgtccgggccggatggacttctgcggcgaggatgaccacggcggtgcggtgcaccgctgcatccacggcatcatccatctcatcgaggatcacgcccgggcggcggggatcccggtgcgctttgccgccacaaagctggtggagggcgacccccgcattgaggaggccctgaagctggatcagaacgaaaaagagatgatcgagcatatcatcctgcagatggagcaggagcgcggtctggaccgcgccgccgccattgcagatatgcggttccactttatccatcagctggtgaatcagaccgtggtaaagccccaccagagcaaggagcagctgcgcagcgcaaggatcgaccgcttcctcactggaaaatatacggcgatcccggcgtttgtgggcattatggcgctggtgttttatctgaccttcggcgtgatcggcgcggggctgcaaagcctgctggaattgggcattgagaacctgacgatccttgtggacaatgccctgacggcatggaacgtcaacgatgcagtgcattcgctggtgatcgacggcatctttaccggtgtgggcagtgtgctgagcttcctgcccatcatcgtgaccctgttcttcttcctttccctgctggaggataccggctatatggcccgcgtggcctttgtgatggacaagctgctgcggcgcatcggtctttcgggccgcagcatcgtgcccatgctcatcggctttggctgcacggtccccggtgtgatggcaagccgcacgctgccctcggagcgggaccggaaaatgaccatcctgctcacgccctttatgagctgctcggccaagctcccgatctacagcctgtttgcggtgaccttcttcccggagtacgccgcactggtcatggtgggcctgtatttcctgggcatccttgtgggcattggtatggcctttctgctcaagggaacgctgttcaaaggcgaggccgtgccctttgtcatggagctgcccaactaccgcctgcccggcctgaaaaatgtggcccagctgctctgggaaaaggcccgggattttctcgagcgtgcctttacggtcatcttcctggcaaccatcatcatctggttcctgcagaactttgacttccagctcagtctgaccgcagacccgcaggagagcatcctggcctggatcgccagcggcatcgcgccgttgttcgcaccgctgggctttggcgactggcgggtgtccacggcgctgatcaccggctttatggcaaaggagagcgttgtctccacccttaccatcctgtatggctcctctgccgcactgggcgcggcgctcagcccggcggctgcggctcccctgttggtgttctgcctgctctacaccccctgcatcgccgctgtggcatcggtcaagcgggaaatgggcggccgctgggccaccgttatggtcgtaaaccagtgcgttgtggcatggcttgccgcgctcgttgtgcgtttcctcgccgtggcggtgctgtga

SEQ ID NO: 937 - DNA, 7396 bp, unidentified
  source 1..7396: mol_type = unassigned DNA
atggcagcaagaatttcaaaggcggatttcgatgaaaaagtattaaaaagcaagcttccggtaattgttgatttttactcggattcatgtgtggcctgcaagaagctggcaccggttctcggagatatcgaggatgattatgaggataagcttcacgtatacaaggtcaacacaaactttgacggagagctcgctgatgagtatgaggtgactgcgaatccgacactgcttttcgtaaaagacgcagaggtcttagacagaaaggtcggcgcacaaaagcctgccgatttgaaggcgtgggttgaagcattattatagtttttagattattatataaagcagtctgatacaggataataacacttacagataccacaatctgtgacacaggaggaaataaaatgactatcacagtagcaggagaaaagaaagaatataaggatggacttacattaccggagcttattgagcttgagaatgtagatatgcctgagtatgtaacagtttcaataaatgaggaatttgttgccacagaggataagccaaagacagtgcttaaggatggcgacaatgtagagttcctttacttcatgggaggtggatgctaatggcaatgactgatgagcagatcgaacgctattcacgccacattatccttaatgaggtgggcgttaaaggtcagaagaaattattaaagggcaaggtgcttattatcggtgccggcggacttggagctccggcagcaatgtatcttgcagcagcaggagttggcacaatcggtattgtggatgcggatgaggtagatttatccaacctgcagagacagattatccacggaacagccgatgtgggcaaagccaaggtaaagtcagcaaaagagacaatgaacgccatgaacccggacgttcaggtcaatacataccgtatgtttgtagatgcgtcaaacatcagagagcttatcagggattatgatttcatcatcgatggaactgacaatttcccggcaaagttcttaatcaacgatgcatgtgtgcttgagaaaaagccgttttcacatgcaggaatcatccgtttcaagggtcagctcatgacatatgtgccgggagagggaccttgctacagatgtgtattcaagaatccgccaccaaaggatgcagtgcctacatgtaagcaggcaggcgttatcggagctatgggcggagtaatcggttcgcttcaggctatggaggctatcaagtatttaatcggtgttggagagttgctcacaggatatctgcttacatatgatgcactcaccatggagttccacaagattaagcttccaaaggatacacacaactgtgcagtctgtggcgaccatccgaccattctcgagccaatcgactacgagcaggaggtctgcgaggagacagcgggcagatttgatgcacctcgtacacaggaataaaaagacagtaaggaaaggaacgatatgagtatcataagaatgaaatatccgtttctggatgaaatagcaaaatatgctaaagagcatctgccggaggaggcgtgcggtctgatagcaggcagtgaggacgaaaacggtcgtctcatcacaaaggtatattacctgacgaatacagaccatgccgaggaccatttcacaatggatccaaaggagcagctggcagccataaaggacatgagagcaaacggccttaagccgcttggcaactggcattcacacccgtctagcccttcaaggccatcggatgaggatataaagcttgcatacgatccgaatgcaagctacatgataatgtcgcttatggcagaaaatcctgtaatcaactcgtttcatatcaagggtggacaggtcacgaaagaggatttacgaatatattctgatgaatattacttctaaatcatatgttaatgttttgagtcgcagcgaaagctgcaaagaaaagtcagcttcatcgaagatggcttttcttttttagagaaagatgttattatagcatgtatatttaataaaacgaaagagcgtgcgaaaatgaaattaaaaacgaaggaacttacaacatgtgcactttttgcagcgcttattgtagttggagcatttatcaagattgatatcccgcttcctatgtacaccatgcattttacattacagtggttttttgtgctgatggcgggatttctgcttggggcaaagctggcatcgcttagcgtgatagtatatttgtgcatcggactggtgggagtgcctgtatttgcggcaggcggcggtcctacatacattttaagaccgggctttggattcctcttaggctttgtgcttgcagcatttttaatcggagcaatcacagaaaagcttaaaaagaccaatgcgtttacactcattcttccggcaacggtcggactggtggcatattatacagttggagcaatatacttttactgcatgaaaaatttctatgcggcaacacctgtcagctggggcatagtaatagtggattactgtctgataactgttgcaccggactttatattatgcgtatcggcagcagtgttttctgctaagcttcgtcctgtttttgcaggaatattaaacggttacagtgtgaagaataaggcggaaaataaagcataaagcgtataataaagtataaaataaggcatgaaataaagtatggatatggtattacagggagataaaaatggcgtattttccgatgtttgtggatatgacggaaagagagtgtctgatcgtcggcggtggaaatgtggcataccgcaaggtgatcgtaatgctggattttggtgcgaaggtcacggttgtggcagaggatatatgtgatgagctgagaaagcttacaattgatgatatagcaagcgatgataaaacgggctcatatacggcaaataaagaaaacaatcagacagactcggatgcagcagatagaattatgttcataaaaagaaagtttgaacgaaaagactgtgacggcatggaaatggttatcgctgccactgatgacaatgctttaaatcatgagattgcagagtattgcagagctaatggcatcatggtaaatgcggtcgatcagaaggctgattgcagctttatttttccgtcatacataaaggaaaagaatcttgttgcggcattttcgagcggaggaaacagccctgtgctgactcagtatctgaaaggcaaagagcaggagattcttactccgtttcttggtgagctgaacgaatacatgggacagatccgcgaaaaagtaatagcgcaatatgacacggaagccgagagaaagcgtgtatttaaagaaatattgtgtgcagctattgataatggaaaaattccggaaatatagtttaaagtatggtattacagattttaagttgttgttcatttataaattataaatggaaaatggcatgatccgtaggagagtaaaatgaggtatttaataggaacgagaggctcaaagcttgctcttgttcagactgattacgtgatagataagttaaaaagggcatatccggatgatgattttaaggctgttatcataaagacaacaggcgatttagagcagaaaaaggcactcgataagattggctcaaagggtatctttgtaaaggagatagaggaagagcttttatcgggaaagattcatatggcagtccattctatgaaggatatgcctgatgaaccggcagtagggcttacatttgcaaaggcatggaagcgtgaagatccaagggatgttttggtgctaaaaaatgccgcttcactggatgagcttccttatggtgccgtgataggaaccggaagcaagcgcagaaagtatcagcttttaaagctgcgtcctgaccttaaggtggttggcatacgcggaaatatcgatacgaggcttcgtaagctatatgatggtgaaattatatatgaagaggtttccgataatactgtaaataacaatgagatagctaacgaaaaacagaataagtataacgaatatagactggatggaatcgtacttgcagcggcgggaataaagcgtatcggaagagattctgagatcacacagtacttttcagaggatgatatgattccggctccggcacagggcacacttgcgcttgagctacgtgctgacaatgctaagctgatggcaaagcttgatgctttgtcagatgagaaaaccaatctgtgcgcaggcattgagagagaatttttaaagcgaatcggtggaaactgtcatctgcctgtggctgcatactgtgatattgtaagtgaaaaagaccgcggtaatgatagcaacaaaaataacaggctaaagcttcttgcgatgtttggctcagaggatggaaaacagcttgcaaggacagagcaggtatgggatatgacatcagacagaaacgatattgtggagcgtgcggtgcacgatattcggtataaattagaaattgactaaagtttattgataccttttgaccctttaatcataataattcagtagaaaaataattaggaaaatcatgagagaaaacacaggaaaagtagtattagttggagcaggaccgggagatacgggcctgctcactttaaaaggagaaaaatatataaaacaggcggattgtctggtgtatgacaggctgtcatcaccagagtttctttcaatggcaaaggcaggctgtgagcttatttatgtgggcaaggaaaatcacaagcatgtcatgaagcagaatgccataaacgagcttttgtacgagaaatcaaaatatcatgagcttgtagtccgtttaaagggcggagatccgtatgtctttggaagaggcggagaggaagctctctacctggtagatagaaatgtggaggtagaagtggtaccgggtgtcagttcatcggttgcagcgcttgcggctgcaggaatacctatcacacacagaggtatagcaaaaggctttcaggtcatcactgcgcacagcagaaaggatgaggaggcagatatagactattcccttcttacagatgagacaatcacctgcgtatttttgatgggtcttgcgcatgtaaaaagcattgcagcagggcttatgaaagcaggacgaagagcggatactccggcagcagtgatatcgaacggcacacttgccgcacagcgcaaatgtataggaacgcttgcggatatcggagaaaagattgaggaagcaaagctgacatcaccggctataatcgttgtgggagatgtggtttcactgaatgacaggcttgatttctttgaaaaaagaccgctgtttggaagaaaaatcacagtaccgtatatcaaaacaaacgaattgatagcaaaattacagcagcttggagcagatgtcacaccggttaagacaggcataataaagccgataataattcctgaatttgccgataaagtaagatcggcagactggatagtttttacaagcaaaaatggtgtaagatcatttctctataatctggatctggcaggggcagacatcagacttatagcaaatgcaaggtttgcagtagttggaaaagctacagaaaaagagcttgcaaagcatcacataaaggcagatattattccggcagaacagaccggaaaaggacttgcaggagaattgagttcgtatatgggcgataatgatgaaatcaaagtctgcattttctcggcaaaggaggcttcacctgacattgaggcagggcttaaagaaatatgtgaattagaaaaaattgatgcatatgtaaatgagcaggcatatgagagtattcctgaaagcattggaaaaatggtaagtgaagcggtttttacaagcgcatcaaatgtggaaagattttttcatatgctgccggagaatgcatacgtggaaacagcatactcgataggtgaaaaaacaacagcagcattagagcagcacaatgtcagagagatactgcaagctgatgacagcagctatgaagcactggtagatacaatatgttataaagcttaagaatttatgatgacaaaagttatataatctgaatttgtcaaaacgcgccaaatgtaatatactatatccaaccgaaacattaacataataaaggagaagcacaatgaaagaatacagtataggtacaaagtgtgtacaggcaggctataaagccggaaacggagagccgagacagattccgattattcagtcaactacattcaaatatgacacaagcgaggacatgggaaagctttttgaccttgaggcagagggctatttctacagcagactgcagaatccgacctgtgacacggtagcaagaaaaatcgcagctatggagggtggcactgctgccatgctcacatcatcaggacaggcagccaatttctatgccatgttcaacatatgtgagtgcggagaccatatcgtggcatcatcatccatctatggaggcaccttcaacctcatcgcggtaactatggcaaagatgggtattacagctacattcgtatctcctgatgctacagaggaggagctgaatgcagcattcagaccgaacacaaagcttatgtttggtgagactattgccaatcctgcgcttacggtgcttgatatagagctttttgcaaaggtggcacacgagcacggagtaccgcttatagtggacaataccttcccgacacctgtaaactgcagaccaattgagtggggcgcagatattgtcacacactctaccacaaagtacatggacggacacggagccacactcggcggagcaatcgtagacagcggcaaattcgactggatggcacatgcagataaatatccgggactgtgcacacctgatgacagctatcatggcatcacatatgcagagaaattcggcaaggaaggtgcgttcatcactaaatgtacagcacagcttatgcgcgattttggttctatgcagtcaccacagaatgcatttatgctgaatcttggccttgagtcacttcatgtgcgtatgccaaagcatgtggaaaatggacaggcagtggctgaatttttggaaaatcatccaaaggttgcctatgtaaactactcagggcttccttcaaacaaatactatgagagagcacagaagtatcttccaaacggaggctgcggagtcgtatcatttggcttaaagggcggcagagaggcagcgtctgcatttatgaaggcattaaagcttggtgcaatcgagacacatgtggcagatgcgagaacctgctgcttaaatccggcaacaagcacgcatcgtcagatgaatgatgagcagcttaaggaagcaggagtgccggcagagcttatcagaataagcttaggtcttgaggacaaggtagatttgattgcagatatctcaaacgcactcgatgccataaaataa

SEQ ID NO: 938 - DNA, 5387 bp, unidentified
  source 1..5387: mol_type = unassigned DNA
ttagttcacaccaagatacttggcaacgaccatacgctggacttcggaagtgccctcgtagatctcggtgatcttggcatcgcgcatcatgcgctcaacgggatactcacgggtgtagccatagccgccgaagagctgaacagcgcggcgggtgacgtcggaagcggtctcggccgcgaagagcttggccatggcagcgtccatggagtaatcctcgtgattctgcttcttcatagcggcagcgtaaacgaggtactgggcagcctgagtgcgggtgtgcatgtcggccagctggaactgggtgttctggaactggctcaggcggcgaccaaactggatacgctccttggtgtacttgacagcctcgttgatggcgccttcggcaagaccgagagcctgggaggcgataccgatacggccgccgtcgagggtcttcatggcgatcttgaagccttcgccttccttaccgagcaggttctccttggggacgacgcagtcttcgaagacgaggtcgcaggtagagctgccgcggatacccatcttcttctcgtgcttaccggtggagaagccggggaagtccttctcaacgatgaaggcggtgataccgtggttacccttgctcttgtcggtcatggcgaacacgacgaaagtggaggcaacgttaccgttggtgatgaagcacttgctgccgttgaggacgtagtcgccgttctcgttcttgacagcggtggtctgctggccggaggcgtcggtaccggcgccgggctcggtcagaccgaacgcgccgatcttgcggccggacagaaggtcaggcagatacttcatcttctgctcctcggtgccgttctcgaaaatgggagcgcagcagagggaggtgtgggcggaaacgataacagcggtggtgccgcaaaccttagcgagctcctccacgcacatggcataactgagaacatcgccgccggcgccgccgtactgcttcgggaagtaaatacccatcatgccgagcttggccatcttttcgacggtctccatggggaagcgctcttcctcatcgagttcctcagctaaaggcttgacttcattttctgcaaattcgcgatacattttgcggaccagcagatgttctttggacagatggaaatccatagtcttttgctccttcactataaaaataattggattgtctaatttttcacaaatcagttccgtgacttacattatatcctgtgcgttttattttcgcaagaggaactatcattcctttttggaattcgtgctttttgccgaattcattaaagtctttttgacatttccgttccttttatgacagttttctgtcattttcaggaatcctttccattccaaaagagaaaaagggaggcagtttttgtaaactgcctctcctttttatccttttagggacggattacttcttgctgtaatcgtagaagcccttgccggacttcttgccgagctggccgccgcggaccatcttcttgagcagcagagcgggacgatacttcggatcgccggtctcgctgtagaggacgttcataatggcgaggcacacatcaaggccgatgaagtcgcccagggcgagggggcccatggggtggttcgcgccgagcatcatggccttgtcgatatcctcgacagaggcaacgccggtctcgaccaggccgatggcctcgttgatcatcgggatcaggatcttgttgacgacgaagcccggagcctcagcgacctcgacaggctccttgccgatctccttggagaggttgtagatgaagtcgaaggtctcctgcgtggtgttggcgccgcggatgacctcaacgagcttcatgctgggcacggggttgaagaagtgcatgccgatgacggcgtgcttgaggccgagacccatctcggtgacagacagagaagaggtgttggtcgcgaagacggcgctctccttgcacatctcgtcgagctcgccgaggagctgacgcttggtgtccatgttctccgccacacactcgatgacgaggtcggcgtccgccgcggcagacttctcctcgacgaggatgttgttcaggatggcgtccttggcctcttcggtcatcttgcccttctcgacgcgcttctgcagggaagcggcgagcttatccttgtggcgctgagcggaagcgacgctggaagcgtacatcagagcggtgtggcccttggccgcgaagacctgagcgatgccgctgcccatggtgccggcgccgaaaactgcaactttcattgtgtgtatcctcctacaatataaatagataattctatggaatcacttgttgataaagggctcgtgcttgcgcttttcgaggaaggcgcccatgccctcctgctggtcggcgctctggaagcaggagccgaaggccttctcctcgatcacgacggcgcggtcaatgtcgacctgaagaccgtcgttgatggcctgcttggacgcgcgcaccgcgatgggcgcgttgccagcgatctggccggcgagcttttccgccgcggcgtagaggtcagaaagcggatagaccgcgttgacaaggccgatgcggtaggcctcgtccgccttgatgttgcgggcggtgtagatcatctgcttggccatgccggggccgacgaggcgggcaaggcgctgtgtgccgccaaagcccggcgtgatgccaaggcctgtctcgggctggccgaagacggcggtatcggagcagatgcggaaatcgcagctcatcgcgagctcgcagccgccgccgagggcatagccgcccaccgccgcgatcgtcgggatggggaacgcttcgagcttgcgcatgacgtcgttgccctgcttgccgaaggcctcggcctcctccttgctgagctccttcatctgcgcgatgtccgcgccggcgacaaaggacttctcgcccgcgccgcggacgatcaggcagcggatctcgcttaagtccaccgcgtcgagcgcggcatcgagatcggcgagcacctgagaattgagcgcgttgagcgccttttcgcggtcaatgatgagataggcaatgttgcccttgggttcatatttgacaaaagacatcgtgtgtctcctcctgtcttcttcaactcccccctattatatgggcggcaaggcatatttgcaagagaaaaatcacttttttcaaaaaagtttcacacttttccagtgtcattgcaagaaacgttgcattttaaatgatcttttctcccaatgcagcaactcttgtataaaatttttaaaatgacttgtctcttgcaccaattttcgatatgataggctttaattataggaaaacgaggttcattctatgcgaatgcgcaaaaagaaaaacctgcttccccgcatggagcggtgcggggcgtatcagatcaaggacccctacgagcgcaagggccgctggcacgacttgatgcccgaggcgaaggagatccgcgtggagctcggctgcggcaagggccgcttcaccgtcgagacggcggcggcggagcccgacgtgctgctcatcgcggtcgaaaaggtgcccgacgcgatggtcgtcgcgatggagcgcgcggcgaaggcagagctgcacaacgtcttcttcatcgacatcgacgccaaccagctccctgagatttttgatcagggcgaggtcgaccgcatctatgtcaacttctgcgacccgtggccgcccaagcggcaggccaagcgccggctgacgcacggcaatttcttgaaactctaccgcaaggtgctcaaggacaacggccaaattcatttcaagaccgacaacgacccgctgtttgagtggtcgatcgaggagatcccgcagttcggcttcaccctctctgaggtcacacgcgatctgcacgcgaacggacagcgcggcgtgatgaccgactacgaggccaaattctatgccgagggcaagaacatcaaccgctgcgtcgccacgatgcagccgtgggaagagcccgaggaagaggatgcgcccgaagaggcggacgaaacggctgaataaaaggaaggctttcagccttcctttttgctttcttccagatacggcgaatacatcatcaccgcgtcgttcacggcgacaggcgtctccgcgagcagcttgccctgcaaatcaaacgtctgccggtagagctcgttgtggcggatgtagccgccccagtactgcgcgcgcatctcgtggttgcgctcgacgacctcatagcgctcggtcggctcggcgctcacgcgccactcgccctcaaggtctgttttgccgacgcggacgcgcatctgataggtgtcctgtgtgtcgttgcggatcatcaggtcaagataggggtaaaagcaggtcgcaccgctgccgaagggctgcgtgcggttcgcgtcgggaaagacgtcgtagccgtggcggtggcgctcgacgaccgtgagcggcgtgtgcagcgtcatccagtagatgaggtttgagagctggcagagcccgccgcccgtcgcggccagatacccgccgttgcgcaggatcatgccgggcagataccccttccccgccgtcggctttccgatgagataccagtagctcatcgtttcaccggggcgcagcaaaagcccgtcgagccgcgcacaggcgaggcggagattcgtcaccttgttgcgctggagctgcatgtcgacgtccttgagctttcgcatgagcggtgtatggtgggaaaacgcctgatatgctaagtcttccccgctgcgctcgcgcgcaaaatgcttccgcatcgaaagccatctgagttttcgctgcgcgctaaaatacgcgccgccgagcttcagccgcaaattagagcgttttttcggttcgcggacggtcatatgcttccctcccctgtttttctgcttttatagacgcaaaacggcgggaaaaagttccaacattttcttatttcaggctcatcacgtagatttgacacgggttccactcgtcccagagcgtcgggaatacctcaaactcgccaaaaccgagggcgagatagaagcggttcgtcgcgtcgtactcagggtacttccccatctgcacggtcttgacctgcaaaaacgagtagccaagctccttcgcccgctgcttcgctgcggcaaagagcatcttgccgacgccgcggcggtggtattctttcagcacacccatgacatagagttccgccgtatccctccccgtttcggcaaggtaaaggaagccgacggcgttctcgccgtcgaacgcggcgaaaaacggctgcttaacactcttttcgatgtattcctcgcgcgcctctggaatgccaaaccagtcgggcagcgattctaaaataaagcgcgtaatgcgccgcttttcatcgggagtcgtaatttctctgatctccat

SEQ ID NO: 939 - DNA, 6884 bp, unidentified
  source 1..6884: mol_type = unassigned DNA
gtaatatttgattttatatttgtacaagctctaatttgctgtttttttcgctttgattgcatttttattgagttaaagctcttttgtatatcttcatggtatgatgaacgtataggcctttacaatcattcttattgtggcatatatctttttcttgacttatattttcaagcgtattatctattgttactgtgtcgtgaacgagggaatgtctttttatttgagaaaaagatagccgattttgcttttcacatctttcatactcattattcgtcttgtatcgtgatacccattttcttcatgagaaaacatgcattcatattttgtgccacaccttcccgtaatttataagagaagctgagctcattgtcttttatatctgcttcgaaacagtaattgcgtattttttccgggaactgatctgctagtgtgcctagtaaaagatcgtgtgtagctatgataccatttgcctgtagatgcatgaactgacggatcagatcgagtgaacctttttgtttgtccgcagagtttgttccttttaggatctcatctaaaataatgaacaattcttttccttcattcagtaagtcgatgatacgtttcaatcgcttgagctcggcaaagaaatacgattcattatcagtaagggaatcggatgtacgcaagctggtaatgagttgtgcaggatacaaggtcaattgcttacagcaaacaggacagccgatacatgccagcagatagttgacgccaatcgtacgtaggtatgtgctttttcctgccatgttagctcctgttataattaaaaagaacggtctggatgggatgacggcatcatttttcacacattgctccgcagacatcaatggatgtcccatagccgttgccacaaactggaaaggtttgtttgaaatagaaggataagtgtattccggatgattgtatgcaaaagtacccagtgaacaaagagcatccagttcgcctacagtttccagccatttcatcagatggcgtccgtagcgttccttccatcgctcgatacggacaacttgtcttagctgaaagaaaatacttccttccaatatcacataaagtaattgattattgcgaagatccagcctgtccagttctttggagagctgcatcagagcttcagcaggtgaatgtccgtcgatattaagccggtctattaattgttgtagttcggttgctttccatgtttcctgacgggctaatgtaatcagtttggcataactgtttagtgttttcagtttttcgccgtatgcttgctgaactaacgttgctcttttgataatagcgaagctgataatgacaaacagcataaataccagtccgaaccagctcattgagcacattcccgtcaatcctcctgcaagcaatacgatgttaataagaggtacaccccataatgccaattttacccatgtcgcttgcaataaatctgagggactttcactccatcggcgtatttcttcttcgtcggatatctttccatggtttactgttcccattatccgaaactgttcacggaactcatgcctttcgctcatgtcccttacagcctgttggcggcgttctattaatgctttttctgttaagtgctcttgcatccagctggcgattgtttcttttccaatatgcgtacatgtacggttgattgcttgaaacagcgagcggcgtccgaataagtcgagatcgaacgaatacgggtgttctggattggcaaattcttttccttcatcaaaatccgagaagtcaccttccagtcctttcagctcctcctggttgatttgtaattgagtttccaaccactctttccgtgcgaataaccggttatgcagctttatcaagattagaaaaggcagaaacgtgcaacatgctgcgccgatcagaacccaggtcccggcgtgaaagaagataatgatagccgctattcctgccagaaaaaatgcgatacgtagcagactgatatgcagaatatgtttttttactcggattaattcttttgtcgtttcggtaattcgtgaattataccaatctttgggagttgtcataaataaaaaatgatgatttgcggacaaatgtaatgaaagagagactattctacaaccttcagatattaaatactcgaaaaatgcggtctagatgcaatcatacaccgtgaggtgctttagatgttgtaatagcttgcagaaaactaaaatatcgtttacggtgaagggatgagataacagaagcagaaaaccaagaaagacagaaagctagaatatcgcttactatgaagcttgtaagaggtgaaacaactattgtgcagcaaactctggatatttgcttaatttgttgtacaaaactttctgtagtttgtacgaattttaaaaaaacttcatgatgttttcgggaaaacttcagcttgttttctgacaatattgggcaagaatctccaatacctgtttctggcgtggaataaacaaggttgagagaatttatatataaaaaatagcaaggatattgaatgcttacaaaaaagtcgctccagtagacttagtgagaatactgaagcgacctcttggattattcatgtggctatctgccgaaaatcaaatacattgcatagcctgttccagatcggcaatgatatcatctacgttttcgatacccactgacaaacgaatcagatctggagctactccagcttctatcagctgttcgtcggtcagctggcggtgagtatgacttgccggatgaagcacgcaggtacgtgcgtcagcaacgtgtgtcacgatacatgccagtttcagttcatccatgaacttgatagcatcttcacggctacctttcaatccgaatgcaataacaccgcatgaaccgtttggcatatatttctgagccagttcatagtatttgctgctcttcagtccgcagtaatttacccattttacctttggattagcttccagccattcggcaaccttctgtgcattttcacaatgacgaggtacgcgcaaatgcagcgtttccagtcccagattcagcaggaaggcattttctggtgattgtatagaaccgaggtcacgcatcagctgtgctgttgctttagtaatgtaagccattttgccgaaagctttggtataggtcagtccgtgataagattcatccggctgagtcagtccggggaatttatcagcatgtgcttcccagtcgaaattaccgctgtctactacagctccgcctacacacgttgcgtgtccgtccatgtatttggtagtagagtgtgttacgatatcggctccccattcgaacggacggcagttgataggtgtggcaaacgtattgtcaacaatcaaaggaactccgtgcttgtgagcgatacgtgcaaatttttcgatatccagaacattaatgctcggatttgagattgtttcgccaaacaaacatttggtgttcgggcggaaagctttttcgatttcttcttccggtgcatcagcatcaacaaatgtacactctatgccaagttttttcattgtcacggcgaagaggttgaacgtacctccgtagattgttgacgagcagacaaaatggtcgcctgcttcacagatattgaatactgcataaaaattggcagcctgtcctgacgaagtaagcatagcagctacaccaccttccagtgcagcaattttagcagcaacggcatcattagtcggattttgcagacgagtatagaagtatccgctttcttccaggtcaaacagttttgccatctgttcgctggtgtcgtatttaaatgttgtactttgataaataggcagtacgcggggctctccctttttcggagtccatcctgcctgtacacacagggtttcctttttgaatttctgttccatattgtaaagtttaaattttctttttaatttctacgacgggcaaaagtaagaaataatcttcctttattgtgcgttttcaggaaaaaagatttatatttgagattatataaaaacaaatgatatggaagatgatatgaaattcaggcatacattgccggtacagattcgtttcagtgatgtcgatcagtatggtcatatgaataactcttcgtacttctctttatacgatttggcgaaaacctcgtatatgcgtgaggtgttcggagataaagactggaaacacatcggtattgtggttgccaatatcaatgcagactttctggctccggtctttttctcggatgatttggttatccatacttcggtgatacatttgggacacaagagctttacattgcttcagcgtgcggtcaataaagcgagtggtgtcttgaaatgccagtgccgtaccattatggtaggatatgatgtagccagtaaggaaccggtagaattgccggccgattttaaacgtgctatttgcgattatgaaggcaaaacactcgaagagttgtcacaaccgttgaaataatctgtttattattaatcaagaagaatcagataacaagatatgaaagtagcgattatcggagccggcaatatgggcggagctattgcacgcgggctggcacaaggccattatgtgaaagctagtgacattatagtaaccaatcccagcatacccaaactggaaaaactgaaggctgagtttcctgaaatccatacttcttccaataacagggatgccgctgatgcagatgtagtgattgttgctgtcaagccgtggaaagtagaagaggtattaaaacctttgcgccttcgtcagccccagatactggtttcagtagcagccggactgacattcgaggatctggcacattttgttgacccggaaatgcctatattccgtgttattccgaatacagctattgccgaacgtgccagtatgaccttgattgcatgtcgtaatgctacagaggagcagactgaagccatgctgggagtctttaatgaaatgggacttgccatgctgatagaagaaaagcagtttgccgctgctacatcgctcgcttcgtgtggtatagcgtatgtcatgaagtatgtacaagctgccatgcaggctggtgtggaagctggattgcgtccggctgaagccaagaaaatggtggctcagacattggatggtgcagcacgactgcttctgcgcgatgaacatacacatccggcaattgagatagaaaaagtgacaacaccgggtggaataaccatcaagggagtcaattcactggagcacgatggatttacttcggctgttatcaaagcttttaaggcaagcatgtaatatctccattctcaatactcaatattatgaaaaataacattctgataacgatggctatcctgattcttgtcggtcttgctgtacagggaatttttggagtggcagcggggatattggtatcctccatcatcggtatcatttatggtactgtaaaaaagaacaggcagtttgtaaagtggtcggtgacagctctcgtcatcgacctgatttgcatcgtgctgttctatgtaggattggcaggaggaatgtaatatttattttacgaatcctttcttagcccatttcagactgttccagcgtctgacgaaaagaatggcacgtatgttttcgtcgagcaggaaggcacaccacatgccggcaagaccccatccccagtggatgcccagcaggtaactgaagccgacagaaacagtccattgtacggtaaatcccatgtagaaggggtagtttacgtcacctgccgaacgtagtgcattggtggcgtagatgtttacggcgcgtcctatttctactactacatcgataatcatgactgtcacccccagacggataatttcttcattgtcggtcaggaggctgaatatgaaatgtcctcctgctgcccagatacatgaaagaacgagtgaaaccagtatggaaagccgcattacatatttccccagtaaataggctgcacgtattttcttttgtcctaccagatgcccgatgctgattgctcctccctgagccattgcaatggcaaacagataaacgaacataataatgtttacactgtaagtgcgggttgccagtgcattattgcctagcatgttgatcagataagtgattactacctgagagaagctgtaagagaggttttcgccggctgatggcaaaccaactttcagcagattcttcagctcaatccacgggaaaggacggaaatatgcaagtgggaaacttggtatatgtttacggaacaggataatgaatagtacaatcatacttactccccgggctacggaggtagatattgcagctccttcagcgccaagtaccggcataccgaactttccgaatatcagggagtagtttcccactatattcatgatatttaccagcacggtgaccagcatggggtatatggctttattggcgctgcgcagcgatgcagagattgtgagtgatatggcctgaaagaaagcgaatgcacctacaatttccatgtagccgataccatatttcagcaattctggccgaagtcccatccagcctaatagcgtggtagcaccgaagtggaggataatacttattaaaatccctacgacaagattcaggagcaatgaaactcctgttacttgtatcatgttcttgtgcattttagctcccagatattgggaacataatacggatgtaccgatgttgataacttcgaataccagaaaagcaaacataactatctggtttactactcctacggcagctacactttcgtcagaatactggctgagcatgattgtatctactgctcccagcatcattatcaataacgtttcaataaaaatcgggataaccagtttggtaagtcctttacgaatatttgtctgttgaattgtctgttccac

SEQ ID NO: 940 - DNA, 13808 bp, unidentified
  source 1..13808: mol_type = unassigned DNA
atgaaaaacattttatttggagttttactattaactggtatttgtttttctacttgtaaggtagaaaaggatgtggaaatagttcaagaagaaatagctccgggagttattaaattgactaaaggggaagttgatacttatactccttatgctgttttgggaggaaaacctgtttctgaggctatgcacgaattgtctgaaggaaaacttccttttagtttggatgatgtttgtttaaaggtatgcgatcgaggatgtgtggtagagattcctttggataaagatgaacaactgtatggatttggattacaatatggaacatttggccaacgtggtttacgtaaacgtccaattgtaaatgataatcctttaaacgatttgggatacactcatgcaccacaaccattttatgtttctactaaaggatatggtattttagttaatacagcacgctatacaacatttctttgtggatcaaatcaacagattagtcaaaatgtacgtccaacagaaggaaatagaaataaaatagctgtcaatacagaggaactttatgaaaatcgtagtggtggaaataaggtttttatagatatacctggagcaaaaggtattgagattttcgttattgcaggacctactctgaaagatgttgtaaaacgttataacttattgtctggaggaggttgtttaccacctatgtgggggttagggtttaagtatcgtgtaaaaggagatgctgttcaggatagtgtaattcgttttgcacgttattttcgagaagcaaagattccttgtgatgttttgggcttggaacctggttggcaaactgcaacgtattcttgttcttacttatggaatgaagaacgttttcctgatcacaaagagatgctgaataaattaaatagcttaggatataaagttaatctttgggaacatgcttatatacatccaacctcacctattcgagaggctatgatgccatatgctggagattttttagtttggaatggtttggttcctgatttcttgttgcctgaggcacgtaaaatatactctgattatcatcgtacgttagtaaaagaaggtatttcagctttcaagctagatgaatgtgataattcaaatattgcatatggttctgcaacatggggattccccgatatgagtcatttcccatcgggagtagatggagaacagatgcatcaaatgtttggttcgctttatgtcaacactatagacagtatttatagagggatgaatcaacgtacgtatcttgattatcgttcttctggtatgtttatgtcatcgcgtaatgctgttctttatagcgatacttataaccataaagattatattcaagctatttgtaattcggcttttggtggtttgctttggtgtcctgaagtgcgtgaagcttattcggataaagacttttttcatcgtcttcagacagtgattctttcaccgcaggcaatggttaatgcatggtatttacagtatgctccgtggatgcagtttgaccgtagtaagaatgatcgaggagagttccttccggaagctaaactgtatgaagactatacacgtacgttgataaatttacgtatgcaacttattccctacctttatagtgctttttataaatatcataaagaaggggttccacctttccgaccattacttatggattatccagatgatatacgtttacgtgatatctctgatcaatatttgataggtgatggattaatggctgctcccctatatgaaaatgcaaattctaggaaagtgtatttcccagcaggcatttggtataattttaatacaaatgaaagatatgagggaaacagagagtatgaagttgcaacagattttgatcagcttccactttttgtgcgtgagggtactttattacccttagccgatgctgtgccttatgttactcaagaaacagtatttaagttgcattgcaaagtttatggagtatctgaagcatcatgtcttttattagaagatgatggggtttcttatgactttgaaaaaggattgtttaatttggttactttagaagccgttgataaaaaagtaaaaatgaataggacaggtaaatgtaaacttaagcgttatgaaataaaaagttacgaattcataaactgataactcattgacagattgattcttcctgtttatttgataatatattatatttgtttttaataaaattaatctatgaagaaactattagttataactttatgtttaagctcattattctcttgtagtacgcataaaaagaaaagtcagtgtgaactctcttcatatgctgtagctttattggatagtacattaaagtattatagtacagctagaattggattatttcatgaaaactatccttcaaaagatgatgatatggttacttatctggctggtgaggatactattcgaaagaatagagttgcttatttatggccaacatctggaatgttttctgctgtaaatgctttgttacgggcaagtgatgataaccgatttaaacaaatgttggattcaatgattattcctgggcttgagtgttactgggattcgttacgccttccagtctgttatcagtcgtatattgcagaagcggggtattcagaccgtttttatgatgataatttgtggattggtattgattttcttgagagttataaattaacccaaaaatcaaattatttatcttctgctgaaaaaatatggaaatttatagaaagtggacgagattcagttttgaacgatggtatatattggtgtgagcagaagaagttatcaaagaatacatgttctaatgctccggcagctgtatttgcgttaaaactgtatgaggctacaaatgaaaaaaaatacttagaagcaggaaaggaattatatcattggacaaaaagttgtttgcaggattctgcagattatttgtactttgataatatttctctggatggtaagatcaatgaaacaaagtttcagtataatagtgggcaaatgcttcaagcagcttctcttttatataagcaaactggagaaaaggaatatcttaccgatgctcataatctggcaaaggcttgtaatgattacttttttgaggatttccaaacagaagagaatcataactttagagctttaaaaaatggtaatatatggtttgttgcaataatgctaagaggttttgaagagctttatcagatagataaaaatccggtttacttaaataatttcaaagaaacattggtatatatgtggaagcataatccaaatactaacggcttgtttggaaatgatgtttttgttcatgatattgataaacaaaaggaatcgaagtggttactgactcaagctgccttaattgaaatgtatgcgcgtttgtcagtttttgaataatgaaaagaacagaaagctaaagctttagcaattgataaatttgaagaacttacctgagtttacagtattaatgtattcttaggtaagttgtttttattaccatagcgaacttttgtaaaatagatataatgttatatactatgaagattaaccgtgttttattattgggactggttttagtcaaatcagtctttgttgctgtttctcaggagcggtgtgtgcctgtagggatgctttgtgaatatttgagtaatcctttaggtattgatgcattacatccacgtttaagatggcatttggatgatgtaagagataaggctatgcaaaaagcttgtagagtattagtaagtactgattctttaaagcttgctgataaaaattatgcagattgttgggatacaggtaaaaggaaaacagagacaatgcaatttgtatataatggaaagaagctgctgccgtttacaaaatatttttggaaagttgaggtatgggataaagatggtaataagacgagttctgatattgccagctttgaaaccggaatgcttgaaatgcataattggcgaggatcctggattagcgatgggagagatatggattataagcctgctccttatttccgtaaggaatttgttgtaaataagagtatatattccgctagagcatatattgcagtagctggattatatgaactttatatgaatggacagaaggttggaaatcatcgactggatccgatgtatacacgttttgacagacgaaatttatatgtaacttatgatgtaaccaagcttatacaggaggggaagaatgcgataggtgtcttattaggcaatggatggtataatcatcagtcgattgctgtttgggattttcatcatgcgccttggagaaatcgtcctgctttctgtatggatttgcatattatgtatgctgatggtacaaaagatattatctgtacagaccgtgactggcgtaccagagaagggggattattgtttaatagtatttatacgggagaacactatgatgctcaagcggagttagatggttggaatcttccaggatatgatgattcaacgtggcgggaatcgtcttatcgcagtgtcccatcaacttgcttgactgcacagcaattacatcctattcgctctgtagagacatatgtagctcgtcgtatgaccagtctgtcagattcggtttatgtatttgatttcggacaaaatatgtcaggggttacatctcttaaagtgacaggagagaaaggtacagtgattcgtttaaagcatggagaaagactttattctaacggtagggtgaatacatccaatatagatgtgtatcatcgtccggtagatgattcggacccttttcagactgacataataatattaaaagggcagggagaagaagaatttatgccaaagttcaattataagggatttcgttatgtcgaggtgataagtagccatcctataaagctgaatgaacgaagtctgacggcctattttgttcatagtgatgtaccacaagtgggatttatacaatcttccgatacaataattaatcgcttgtggagagccacaaacaaagcatatctttcaaacttgatgggatatcctacagattgtccccaaagagaaaaaaatggttggacaggagatgcacatttcgcgattgaaacggctttatataattatgacggaattacagtatatgaaaagtggcttgccgatcatcgtgatgaacaacagcctaacggagtccttcctgatataattcctactggaggatggggatatggaacagataatggtcttgattggacaagtactattgccattattccttggaatttatatctgttctatggcgatcttaaacctttgactgactgctatgaagcaataaaaaaatatgtagattatgctgaacggaaaagtataggccgtttgacggactggggaagaggtgattgggtcccggttaaatctcattcctctaaggagttgacatcttctacctatttttatgtagatgcaaagatattgtctgagacggctaaattgctgggtaagaaagaggattacctctactattcgaaattagctgaagaaataaagcaagccattaatgctaaatatttaaactatgagacaggggtttacgccagtggtactcagacagaacagagtgtacctcttatgtggggagtaactccggaacatatgaaacgtaaagtcgcacataatttggcttgtaaagtcagagaatgtggatttcatttagatgttggtgtattaggagcaaaagcattgttgaacgctttgagtgagaatggagaggctgaaactgcttatcggctagctgtacaggatacgtatccttcatggggaaattgggttgctaatggtgcaactaccttgcttgaaaattgggatttaaatgcaactcgcgatatttcggataatcatatgatgtttggcgagattggcggatggttatataaaggtttgggaggcatttatcctgatgtcaagttcccaggttttaaacatataatattaaagccgtatgtccctagggatttaaagcaatttgaggcgacttatcattcttcttatggtaaaatatactcaggatgggaacaagtgaatggtaaaatcacgtataaagttattgttcctcctaattcaacagctactttgtatcttccggataatttgtctggtgatgataaaagtatagagttggaatcaggaacttatatttttgatttgaagtttaaagaatagggatttaaatctagaattttgggatgcataatacaaaaaggagttgtatcaatgggatacaactcctttttgtttatcaacagtggattttataaaacttcggtattgtcttgttgtttggctggatgcggatagtctatggtgtaatgtagccctctgctttctttacgttccatagcctgacgcgtaattaaatagccgacattaatcatattacgcagttcacagatttcacgtgaagcctttacacgcttaaacaatcgttctgtttcttcgtataagatgtccagacgattccatgcacgaacaagacgaagattgcttcgtacgatacctacgtatgattccataatctgatttacttctttcatgctctgagtaatcaggatgcgttcttcattgctgattgtaccttctgcattccattcaggaatatcttcattgaagtcatagcggtcgagaacgcttaaagcatgtttcgcagcagagtctgcatatacgatagcctcaataagcgaattggaagcaagacggtttcctccatgcaatccggtacaagagcattctccgatagcatacagacgtttgatgctagattgtccgtccaagtcaactttgataccgccacacaagtaatgagcggcaggagccaccggaatataatccttggtaatatctatacccaggctaagacattttttataaatattggggaagtgtttctttgtttcttccggatctttatgagttacatccaaatatacatgatcttcaccccgttgtttcatttcactatctatggcacgggctacgatgtcgcgcggagcaagtgataaacgtggatcatatttttgcataaattcttctccgccgagatttcttaatacagctccatatccacgcatggcttctgttattaagaaactaggacggtctcccggatgatacaaggctgttggatggaactggatgaattccatatcctttacaagtcccttagcacgataaaccattgcgataccgtcaccagtggcaaccagcggattggttgtatgggtatatacagcttcacatcctcctgtagccattactgtgacttttgaaaggaaggtatctacatctcctgttttttcattcaatacataagcaccaaagcatttaatgcccggtgtatgacgagttacgatgatgccaagatgatgctgagtgataatttctacagcatagaagttggtaaatactgtgatattaggatgtttttttacagcttcgatcaggctggtctgaatttctgctccagtattgtccttatggtgtaaaatgcggaattcagagtgccctccttctttatgtaaatcgaattctccgttttcggttttatcgaagttaactccccagtttattaattcttcaatctgagcaggggcattacgcactactttttctacagcttccgggtcgctaatccagtcgccagctaccattgtatcgtggatatgcttttcgaagttatccactttcagattcgttacagaagcaattcctccttgtgcatagtaggtattggcctcttctagtccggctttgcagatcagtgcaaccgaacctttatgcgcaactttcagcgcaaagctcattccggcaattcctgaaccgataacgagaaaatcgaattttcttaccataataaaatatgtatatattgttgcaaaactacaaaaaaactgacatgagagcactgtctctttgttttttttctaaagaaccttatgataagtatggttttcggtgataaattgctatcttcacaaagaattaataaatctcgtagatataatggacaggacttttcactctaaagtagactggtggtactggttactgatggctgttaccgcttttttattgttcgatttcttttggtttcattataccatagccacattactggttgctgctgtgatgatatttgaaattgaaatgttaatacatacacgttatattgttacgggtagtggcaagttattgattgaaacaggacgttttgtggctgataaaactatattactgaatactattgtcggcatgtgcgaagtaaattctttctccattgctcctgccctttctgttcatcgagttgagataacttatcgtgtcggtgataaacatgaaaaagtttttgtctctcctcaaaatgcggaagattttatccgatgggtacagaaaaaaatgaaaagtggcgaaaatacagatatgatcgataactaaaatatgttttatgaaaaatttcaaacctcgaaaatcggtaaagagatttatatgtgaaactcttataagtgctcttgtcctgactgttatattaggtataatctattatcaggaaagactttgggtacttgctatggtattgatttttatacttgatgtattgttctgcatgtttgaagaaataaaagaataccggatagatgatgatggaacagtacatgtagtttgttatttaggcttttcaaaagtcgttttgaagggaattaccaaagtgtattttgacccccagcgtaaagctctgcgtatcattgctgaaaaaagtgacaggtggtatcctttacaggagccggaattgtttgtagatactctatacgaatattatccggatatggaatacgaaaactggagctgatataaattgaaacctattaatctaaataaaataatatgaaattccaacttgcaattattggtggaggtcctgccggatatacagctgccgaagctgccggtaaggctggattgagtgttgttctgttcgaaaagaatagtttgggaggtgtttgtctgaatgaaggatgtataccgacgaagacattgctttattcagctaaagtatacgattatgcccgtcatgcatcgaaatatgctgtaagtgtaccagacgcttcttttgatttgccgaaaattatttcacgaaaagccaaggttgtccgtaaactggttttagggattaaggctaaactggcagcacagcaggttactgttgttaatggagaagcttatattgtggataagaatactgtacgttgtgcagatgaaacgtacgaatgtgaacatctgattatttgtacaggtagtcagactgttattcctccgatacaaggtattgatcaggttagttattggactcaccgtgatgcactcgataataaagaattgcctcgttcgcttgctattgtagggggaggagttatcggaatggagtttgcttctttcttttctagcctgggagtacaagtaaccgtcatcgaaatgatgaatgaaatcttgaatggcatcgatcgtgaacttgcggcttctcttcgcacagaatattcaaagaaaggagttaaattcctgcttggcgccaaagtaaccagtctttcacaggatgacgaaggaatacatgtacattatgaaaatgcggatggagcaaacagtatatgtgccgataagctgttgatgagtgtaggtcgtcggcctgttacagaaggctttggtcttgaaaatctgaacctggagctaacagagcgtaggcatatccgtgtcgatgctcatttacgtacctctgttcctggagtatatgtatgtggtgatctgaatggcgtttctttgctggctcatacggctgtgagagaagcagaaatagccgtaaaagatattttgggtgagccggaagaaatgagttaccgtgctattccaggagttgtttataccaatccggaaattgcttctgtaggacagacagaagaggtgttgcaggcaaatggtacttcatatcgtacagtgaaattgcccatggcatattcaggacggtttgttgctgaaaatgaaggttcaaatggagttattaaagttttggtagacgataaagatacggtgcttggcgtacatatattgggaaatcctgcttccgagttaattgtcttgggaggtatgatggtagaagaacaccgtaatctggaatattttaaacgttttgtttttccgcacccaacagtaggtgaaatctttagagaattgtaatatatgaagcgaacaggactagtattaatctctctcataatatgttgttgtacactggctgcccagtctattgccggaaagctggatgcattggtttcttcagaaaaagtattgacgacttcggaggttggcattagtgttttcaatttgacacaaggaaagcaggtgtatgcctatcaggataaaaaactttatcgtcctgcctccattgaaaaagtgataacatcggttactgcattggcagagcttagagaatattatcttttcaatacacggattgcttatacaggaactatcgttcaggacagtatattacagggagatttatatctagtcggtggattcgatccggagtttatggatgaggatatgaataaactggtagaagctgttcataactccggaatacgttgtattcaagggagcctgattgcagatgtatcgttgacagactctatttattggggggcaggatggtcttgggatgatactcccgaagcctttcagccatatttatctccgctcatgttaaacagaggatgcgtaaatgtaacagtaattcccacatcgaagggaagaaagccgaaaatagaggttataccagaatctgattattacaccgtttgcaatttagctcagagctatgctccgcaatgtggaaaactgaaagttacccgtaactggctggataatggtaatacgatttgtgtggatggaaatgctaattacagatgtacaaagacactgaatatgtattcgtcaaaagatttttttctgcatacatttgcttatcgtttaaaagaaacgggtatttctatacagtcagtccggtatggaatatgtccggatgaggcaactggtatgtatacattttcacgaccgttggaacctgtattaaaacgtgcgttgaagaaaagtgataatctgtctgccgaagcaatgttttatcatctggctatcagtcgttctgggaaaaaaaatgtaggttttaaggatgcgcaggaagttattcactcctttatgaagcatgagatcgggcgtaatcccgataattacagtatcgtagatggcagtggtgtatcactttacaattatatctctcccgatttgatgatggagtatctgaaatatgcttatgcacatcctgagatctttcatacattttatgaggctcttcccgttgcgggagtagatgggacactgcattatcgtatgaagcagggaaaagcatatcggaatgtacgtgccaagaccggtactgttacagggataagttcacttgccggatatgtaaaagcaggaaatggcgatatgcttgcttttgttattatcaaccagaatgttttacgaggtaaggaagctcgtgcgtttcaagataagatttgcgaaatattagcacactaataaaaagaaattagtatatttgtgaacttagaaaattagaataaataaatccgtgttcgtaaacggaaaaacaatttgcttttttaaggttgatattagttattaacaatataaacactaaagaaaactatggttaatttttcactcgaaggtaaagtagctcttgtaacaggagcttcttacggtatcggttttgcaattgcaacaggttttgcacaggctggtgcaaaaattgtattcaacgacatcaagcaggaactggtagacaaaggtcttgcagcatataaggaactgggtattgatgctcgtggttatgtttgtgatgtaaccaacgaagaagctgtaaatgctttggttgcccagattgaaaaggaagtaggtgttatcgatattctggtaaacaatgcaggtatcatcaagcgtattccgatgtgtgagatgtcagcagccgaattccgtcaggtaatcgatgttgatttgaatgctccgttcatcgtatcaaaagctgttattcctagcatgatcaagaaaggtcacggaaagattatcaacatctgttcaatgatgagtgaacttggccgtgaaacagtatcggcttatgcagcagcaaaaggtggcttgaagatgcttacccgcaacatcgcatctgaatatggtgaattcaacatccagtgtaacggtatcggtccgggttatatcgctactcctcagaccgctcctttgcgtgaacgtcaggcagacggttcccgtcatcctttcgatgctttcattgttgccaagactcctgctgcacgctggggaaatccggaagacctgatgggtccggctattttccttgcttcggatgcttcaaacttcgtaaacggtcatgtgctttacgtagacggtggtattctggcttatattggaaagcagcctaaataattttagctcttcccgagcgatataaaaaaactagctgaagtttttcctaaaacttcagctagtttttttattttttgtacaaattttcggtcaaacttcacgatgttttttccggcttatgcgctttatccaaagataatatcctgtaagtggtaaaatacctcctacgaatgcagacagaaaatatagaatacgggttatgatacctccccattgtccggtatggaatgaatatatgattcctttcatcttgctggatataggttgttcattggtatcatagattgttatttctgtaatttttccagtatgagcatcaaacaatgctgtgtcacctttccgttttcctgtctgaatgatctgtgcattatttttgtttaactggattgtgccatagctgttatactttgtttgcagttccgcaagggcagtatcccaggccagatagtttgtttgctctgctcgctttcttttttctttattattatgtccttctccatgtgcggcagtctgctgtggctgttcggtagaagctccaaagagtgcataaaatccggtacgataccatcggaacgaccacgttagtccggtaagagccatgattagcagaaagatggttgcatagaaacctaatgatacatgactgtcgtaccagaaacggaaccagcctttgttgcatgataatttaagccggttttgcagacttttgcggctacggggccaccagattactaaacctgatatcagaataaccaccatgagcagggtacttatacctacaatggtttttcctgttgacggagctcctttctgagcaggagcatccagtaaccagcgatgcaatttgcggacagtctggaagaaagaacttccttctacccatccgtttatttctcccgaataggggttaatacttaactggcggcgtccggcatttttaaagcttaccatccaggcttcttcaggatttcgagccatttgcaagctgtttacttccagggtatcacttatttggttattaataagtgcgacaatctgcgaaggttttagcggcgtagccccttctgtatagtctacggtatatagatgaggactgactgcacgggttatttccttctcgaataccaggagtgcccctgtcaggcagacaattgaaataatcagcccgacaggaacagatatccataagtgtatttgtttgaataattttctcat

SEQ ID NO: 941 - DNA, 6122 bp, unidentified
  source 1..6122: mol_type = unassigned DNA
ccgctgatccttgccggtgtcgccgccgtaggtaaagcgcttggctacggtctgaaaggttgctgccagactatcgccgaagttgccggtgaacacgctgggctcggtggaggaattgaaggtatactcgcccggttcggcgcacacctccaccacgcggccctgctccacgatgagcatgcactgtccgtctgccacggcgatgccgctgccgttggtgatgatgttgtcctcgccgttgttggagctgcggcgggaggtgcgcttctggcccttgaccatcagcacatccttgtccagagaatcgcagtagaaaaattccttccactggtctgcaagagttccgcccagtgcgcccatacctgctttgatcaaacccataataatttcctcctgtatgttttattgtttttgctctcttctttatcatgcagaacgatttcgtttgtaaaaaaggttctgcctgctcaggggtaagggtcagataattgatattataatcatactgcaatgcggcgctgaacgcaaggaatttctaaccgttgccacctgcctttgcagcttctttcacaaaaaagaacaccggagcgtccatagagactccggtgttccgaaataatatttttatgcttgtcccgtacccaaaaaaggcttagaaccgccgccatgtatccggcataaacagcaccagcatggggaagatctccagacgtccggccagcatatcgaagatgagcaccagctttgcggggtctgcaaagcagccgaagttctgcattgggcctgccatttccaagcccgggccgatgttgttcagggtagcagccacggcggtaaagttcgtcaccatatcaaagccgttcaggctgatgaggaagaaggaggccgcaaagataaagatataggccgcaatgaacacgttggtggtgcggatggtctcgtggttcagcagcttgccgtccatgcgggcgggcgctaccacctgcgggtgcagggcggtcttgagctccttggccagggtcttacccagaatgaggaaacggctcaccttgatgccgccgccggtactgccggcgcaggcgccaatgaacatgagcatgaccagaatctctttcgagagggtcggccacaggtcaaaatcgcagctggaaaagccggtggtggtgatgatggagcccacctgaaaagcggcctgccgcagcgcctcgccaaagctgttgtacatactataaatattcgcagtgatgatacccactgccacgacgatgaccacaaagtagccccgcacctcctcgctggcagcagcgcggcggaacttgcgcatgagcagcaggaagtaggcgttgaagttgacgccgaacaggatcatgaaaatggtcacgacccactggatgtagggcgaaaagctggcaaagctgtcgttgcggaagccgaagccgccggtacccgccgtaccaaaggcagtgagcatggcttcgaacaggggcattcggccaatcagcaggaacaccagctccagcacggtaagggcaaagtagatgccgtacaggatcttagcggtggactgcaccttaggcacaagcttgtccacctgcgggccggggctttcggctttcatcaggttgacgtgagagccgccagtcagcggcagcagcgagagcagaaacaccagaacacccatgccgccaatccagtgggtgaagctgcgccagaacagaatgccgttgggcagcccctccacggcgggcaggatgctggcaccggtggtggtaaagccggagaccgtctcaaacagggcatccacggggttcgggatgcagccggtgagcacaaagggcaccgcgcccatcaccgagatgaacacccagcacagcgaggtagccgcaaagccttcgcgcatatagaacaccttactgcggggtttgatggtgtgcagggcgtagccgatgccagcgctgacggcagctgtgagcagaaacacgcccagcaccatccactcgccatacactaagctggcggcggctggcagcagcaacaacgcgccctcgatcatcagcacatagcccagcagacggaaaacgatcgcatagttcatagtccgcctccgtcagtgctccacgatatcgcgcagatcgtgcagaccgtgctccagcgtaaccacgatgacgttatcgcccacttggatttggtcgccgccgcggggaatcaggatcttgctgccgcgggtaatacagcacagcagcaggttctttttcaggtgcagctggctcaggggcacaccggtagcggcgctctcctcgtgcactgtaaactccagcgcctccacgcggtcatccagtatgcggtacagagtcttgatgttgttgcctgcctcgttttgcagggcgcggacgtactgcacgatgtagtcacaggtcatgtacttggggtagaccacgctgcccagatccagcccggccagaatatcgtcaaattccagacggttgaccttggtcaccagcttgccattggagtgctttttggcaaacagggtcagcagcacgttctcctcgtcgatgttggtcagcgccacaaaggcttcggtggattccagaccctcggaaagcagaaactcgcggttggagccgtcctcgttcaggatctgtgcgccgggcagctgctcggccagttctacgcagcgggcggcatcccgctccacgatacgcacccgcacatggttttccagcagttcctgactgaggtagtaggcaatggcaccgccgcccacgatgagggcgttgcgtaccggctgcaccggcagatgcagctgctggaagaaggcatgggccttttcctgcgtagcaaggaaggtgacctgatcgcccttttgcagcacaaagttaccgttggggatgatgaccccgccctcacgctccaccgcgcacaccagaatatcgctcttgagccgggtggggatctctcgaatggctacgccgtccagtgcatcgggcagcgcaaacttgatcagccgcacacggccgtccgcaaaggtatcgatcttgctggcaccggggaaacgcagcagatgagagatctcctttgccgctgccatttccgggttgatgatggcggaaatgccgatctgctttttgataaagtccagctcgtggctgtaggatgggttgcgcacgcgggcaatgccgtggcagtggcccgcctttttggcaaacatgcagcaaagcaggttcagttcgtccgagccggtgaccgcaatgaacacgtccgcatcctcaatgcccgcctcagacagggtggtgatggacgagccattgcctacaatgcccagcacgtcgtagctttcggtcaggtgctccacgcgcgctttgttggtgtccaccacagtcacgttgtggccttcctcgctgagctggcgcgccagagccgtgccgaccttgccgccgcccaccagaatgatcttcataacaagtcctttctcctttggcagccccttttcccggggcatacaagtacagtgtagtataccatatcccgatgcaaagttctaccgtttgtcccgcaaatacagcgaattgcttaaaaagcgacagttcttttgtgcaagatggcctgttctcagcgtgaaagcgcaaaaagggactgccacacagctttgtgcagcagtccccttgggacgaaacgatttagaatgcccaccgcgtacgctttgggcatcctcagcggaaaaaaaaattgttataagagcaatgccgggccgcctgcgggctgcccggcattgcattttcacggaaaaacaggtttttcccctgctgtccggtctcagtaccgctctacgccgtccttggtgacaagggcgtacaccagcggagcttcctccggcttttcagcgccgtacacaaggccgctgcggtactcggctgcggcagcttcaaacttgtccgcagcgccgtagaaggtggcaaggctttcgcccttatggacgtagtcaccgcgctttttgtgcagggtgatgccggcggcaaagtccagcgggtcgccctttttctggcggcctgcgcccagcagcacactggcagaaccgatcttttcggcatcgttggccgtgatgtagccgtcctgctcggccagcagctcgtagctggcggcgggctgtgcaaacaggctgtaatcgtccagtacccggatgtcgccgccctgtgcggcaaacatttccttgcacttggcaaaggcagagccgtccgcaatgacagcctcggccatagcgcggcagtgggcggcatcgcccttgcctgccagcaccagcatattggccgccaattgcaggcacacctcggtcaggtctgccgggccgtggcccttgagcacgtccatgctctccatcacttccagactgttgccgatgttgtggcccagcggggtgtccatatcggtgatcatggcagctacccggcggccgtggtgggtaccgatggcaaccatcagctgcgccagctcaatgctctggtcaacagttttcataaaagcaccggtgccggtggtgacgtccagcaggatggcgtccgagccggaggccagctttttggacatgatgctggaggcgatcagcgggatgcagctgacggtagcggtaacgtcccgcagggcgtacatctttttatccgccacagcgataccctcgctctggccgatgaccgacagaccgatctggttcacctgtgcaaaaaactcctcctgcgagagggcggtctttgtgccgggcacgctctccatcttgtcgatggtaccgccggtgtggccgagaccccggccgctcattttagcgatcttcaccccgcaggccgccacgatgggtgcaatgaccagcgtggtcttatcacccacgccgccggtggagtgcttgtccaccttgatgcccggaatgggcgaaaggtctaccatcacaccgctgtgcgccatcacatcagtcagttcggcggtctcctcattggtcatgccgcgcagatacaccgccatcatccatgcagccatctgatagtcggccacttccccgctgacaaagccgttgacaatagcttccagctcttcccgggtgtgggtgccgccatcccgcttttttgcgatcagatcataaatacgcatcgtttcacgctcctgttcttactgtttttgggggcgttttatgcccggatttcctgccatacgctcttgccgtccagcgtggaggcgtccacttccagatattcgcagatggtctgggcgatggtgccgaagcacagcttggtgcccagatccatacccgcctttacgcccttgccgcagaccagatacggcacatactcgcgggtatggtcggtggtcttggtgtaagaggggtcacagccgtggtcggcagtgatcatgagcaggtcaccctcccgcatacccggcaggaaatcggccagaaaacggtcgaactcggtggcggcggcagcgtagcctgccacgtcgcggcggtggccgtaaagcatatcaaagtccaccaagttcacaaacgccagaccctcaaaatcccgggtctgcaaggccttggtaaaggcaatgccgttggtgttgccggtggtcttgatcttttcggtcacgccctcgccgtcaaagatatcgtagatcttgcccacagcgatcacgtccttacctgcgtctttcagcagatccagcatggtggcgcggggcggcttcaggctcaggtcgtggcggttggtggtgcgataaaaggtgtcggcgctgttgccaaggaaggggcgggcgatcacacgacccacgccgtacttgcccttgagcatttcccgggcgatctcacagtagcggtacagctcgtgcaccggaacaagctcctcgttggcggccacctgaaaaacgctgtcggcgctggtgtagacgatgagggcgttttcccgcatggcctgctcgccgtagtccttcagtacctgcgtgccggaatagggcttgttgcacagtaccttgtggccggtcttttgctcatactcccggatcagctcctctgggaagccctcggggaaggtgggcagcggctccgggctgactacaccggcgatctcccagtggccgatggtggtatccttgcccat

SEQ ID NO: 942 - DNA, 54638 bp, unidentified
  source 1..54638: mol_type = unassigned DNA
tcaattaaggtgccgatatcgattgccagagcaaaaaaggacatcgaaaaggaaattgatttaagggagtacctgccatcagggctgtcgattgtaggggagacgacgacggtttccgtccgttgtgatattgagaagaatggacagcgtgtgctgggacttacatcttcggatattgccgtgagaaatctgccgaaaaattatacaatgaattttgagccggaaaacggaaagtattccgtagaattgttaggcgaagatgcgacgctggcggatgtaaatgtaggagatttaggagcttatgtggatttgaacggattatcggatggctcgcatacgcttgaattaaaatatagtctgccgaccggcgtgcaggtgaaaaataaaatcaagattaaagtcaaactaaaacgtcaggaaggtgaggtgacagatgcaccaagcacaccaactccgacagtggagtagaaactaaaaaaatcccggtggcctgccaaggagcagacgccgggatttttttgatattttttacaatgggatatttccgtgttttttatgaattacatcaatcgagcgtttatctgcaagcattaagatgtcggcataaacacgttctcttgttgcctccggtttaatgatttcatccacataaccgtgcatggaagcaatacttggattcatgaatttttcattgtattcatcaatcttttcgctgcggaaagctgctttttctgcagggttcatattcttcatctgtttaccatacaaaatatcagcggcaccatcggcacccataacagcaatctcagcggttggccatgcataaacaaaatcagcacgcaggtgtttactgctcattgcgatgtaagcaccaccgtaagctttacgaaggataacattaattttaattgttgtggcctcagagtaggcatatagtaattttgctccgtggcggatgattcctttatattcctggtctttaccaggtaaaaatcccggcacatccgttaatgtaagaatcggaatattaaaagcatcacagtagcggatgaatcgtgctgctttatcagaagagtcacagtcaaggacgcctgccataaattttggctggtcagcaatgataccgatgacaactcctttaatgcgtccgaatccaacgactacatttcttgcaaattcttcctgaacttcgataaaggagtctgtatctacaattccgttaatgacatcgtggatgtcgtaactgtgattgctttcttttggaatgatatttgctaaattctcattaaaagtaacattttcgttgtatttaggaagtgccggacggtttgtgtgcaggtagccatcctcatagcacggaggaataattgaaatcaattccttcacgcggcggaaacattccttttcgtttggcatatgaaaatgagcgacaccgcttttggatgcgtgcacattggcaccacctaattcttttgctgtaatatcttcatttgttacgcttttgataacttttggtccggtaacaaacatctggctgatttcatcaatgacaaagataaaatcggtaatacccggtgagtaaaccgcaccaccggcacagttaccggcaataatcgaaatctgcggaatgtatccggatgccattgtattatagtagaaaatctcaccatatccggctaaggcatttacaccttcctgaatacgggctccgccggaatcgttgatgccgataaccggacagcggctctcgattgccattttaattgcattggcaattttgaaaccgtgctgtttaccaagagtaccgccgataacggtgaaatcctcagagtaaatcacgactttttgtccgccgatggtaccgtaaccggtgattacgccatcataaggaaattgtccctttttaatgttaaaagcatcttctaagttcgtaatgttcgagccaatttcacgaaatgaatcttcatctagcagcatgcaaatacgctctaaagcgtgaagtttgccaagcttgtgctgcttctccatattgtaagttgacattgttcattctccattctttcttaaaatatcacttgatactacgaaacctatcatataccataaaaagaaaaaatgtcaatcctatgttggctttttttgtagaatagttgacgaaatacgtatttgggtgctataatcaaatgattgaaaaaataaaaaggatggactagagaatgattcaattttttaataatttcctaaagtacaagtatcttatgggacagcttgtgaagaaaaatatcaagctccgttaccgtcgttcttatttaggaatgttatggacactgattgagccgctgcttacaatgattgtattgtcggttgtgtttggcagcttgttaggaagaaacagtaccgatgctgcatttgcaggcgtgccattcccgatttatgtcttgaccggacgtttgctgtattcgttcttttcatcagcaaccaacagtgcgatgcgttccattcgtacaaacggcgctatgattaagaaagtgtacgtaccaaaatacatttatccgttttccggcattttggcaaacttcattatatttttgatttcgcttgttgtactggttggtgtaatggtatttttcttagcaaccggtcagtaccatgcaccgattaacggttatatggttatgacggtgattccgctcttaaatttgtttatcctatcaacgggagtcggcatgatattatcgactttatgtgtattcttccgtgatatcgagtatttgtggagcgttatgttaatgctcatcatgtattgcagtgcgattttctatttcgcaagcaacatgagtggtgacacacaaaaactggtaaaattgaatccattatttggcgtgattgacaatttccgccgcgccttttttggacagccttttgatatgagattattgctgtatacatccgtttttgcggttggaacattggttattggtatgattgtattttatcggaaacaggattcctttatcctgaatatttaaggtgtaaggcaaattggaggttattatggcgaagaagtcattagcaatgaaaatagagaatgtgagtatgaagttcaatctcagttctgaaaaagttgataacatcaaagaatatgttattaaaatgataaaaaaggaattgatgtttcaggagttttgggcactcagagatatcagctttgaagttcagaaaggtgaccgtgttggtattatgggattgaatggtgccgggaaaagtactcttttaaaagtaatttccggtgtgttaaaagccacacagggaacggttacaacaaatggcaagattgcaccgcttcttgaactgggagccggatttgacagacagtataccggtgctgagaacatttatctgtatggtgcgatgcttggttacagtaaagagtttttggaagcacgttacgacgaaattgtagagttctcggaacttggcagttttatcgatgtgccggtaaagaattattcttccggtatgcgtgccagactcggtttttccgtggcaacaattgttgagccggatattttgattctggatgaggtacttagtgttggagatgcgaaattccgtaaaaaatgtgaaaatcgtattcagagcatgtttgataaaggtgttaccgtcattttcgtatcacattcgaccagtcaggtcttaagaatgtgcaacaagggcattcttttggaacagggctgtctgattgcacagggggacgtcgaggacgtagtaagtgtgtacgaagcaaagatgagtgagaacgaataggaggaaaagaaaatgaaaaaagtgattacttatggaacttttgacttacttcatgtaggccacattaatttacttcgccgcgcgaaagcattgggggattatctgattgttgttgtttcctcagatgaatttaacgccggcaagggcaaaaaagcgtatcattcttttgaagaccgcaaaaaaattcttgaagcaatccgttatgtggatgaagtgctgccagaatatacatgggaacagaagattgatgatatagtaaataataatgtcgatgtttttgttatgggagatgactggaagggcaagtttgatttcctcaaagactactgcgaggttgtttacctgccgcgtaccgaaggaatttccacaacaaaaattaaaaatgatttgaatatgaaagactgagaaaatgattaaaaaaacaggctatgtgctgtttgctttctttttctatctgttccgcctattacccataaatcggcagaaagtattttttgtcgcaacgcatgatgacagcaaagagggaaatatcggcattgtggcagatgctataaaaaatcagtttccatccatgaaaatggtgtatctcacaaaaaaagacggcatacgaagaccattttcgtttttctttggaaaagcgtttcatatggcaacggcaacggtgatttttctcgataatgagttcatgccgatggcgtatatgaaatttaataaaaatgtgaaagtggtgcagttgtggcatggaaccggtacgattaagaaattcggcttggattcggataccggggaagtaaaaagactagcaaaaaaagcaaatgaaaatattacgcacttgattgtcagttccgaatgtacggcaaaatggtataaaagtgcgtttggtgtagacgatgaaaaaattttcccgattggactgccgcgcaccgatttgatgttagatgaatctaagaggcagaagatgcaagagcgtttttttgggcagtatcctgatttgaggggaaagaaaattacgttatacgcacctaccttccgagattcacaggttgaaaatccggaaatttgtttggattttgattcccttaatcaatgtatgggagagaatgaggtgcttcttatccgtctgcatccgcacgtggcagagcattgtcctgtcggtatatgggatatgtatccggataaaataagaaatgtttccgattatccgggagtggctacgctgttatctgtggcagaccaattgattacggattattcatctattatttatgagtactgccttttggaaagaaaaatgattttttatgcgtatgactatgaagtatttcagaaagatggtagaaatttttacgaggactatgagaaatttgtgccgggaatgattgtatatacgcagccggagctggaaaaaaactggcatacggcttacgaggatgactcacaacgagagcagttttgcaggcgcattttcaagtatcaggataaaaatgctgtaaatcgacttttatgtttgatttttgacaagaaataagatataatgttgtgagcgtattattaggctaatttgagaacggagggctacgagtgaaaacattattagagagaaagattagtttagtagtaattattttgcagtttttagtttccttgttagtttgtatttattttggaacaacagggcttgtaccggttaagtacatggttgcgattgcagtcgttatggttgtattgcttgtctatcaggtgatgagccagctgacaaactccagttatatatttggacgtgtgttagccgttctgttttgtgccgtgttccttgttggtgcgaactatgtgagagagagtatggcagcattccagaatgtcggtggtgcaaccaaaaaggttgatgttatttctttctacgtcatgaaggacgatgcagcaaagacattagcagatgctaaaaattactcttttggtattctaagacagcaggaccgtgagaatacggacaaagcggttcaggatgcaagtaagaaactgaacaagacattgaacacggttgagtatgatgatccgttgactatggtagatgccttgtacgcaaaagaagtgcaggcaattatcatgaataaaagttttgtagatacggttaagagccagtataagacattttctacggacaccagagagctggatgcaagcaagattgagtcagaagtagaagaattggttgataccgatgtaacaacaaaaccatttaatgtttatatcagtggtattgatgtatatggtaagattggacagacaagccgaagtgatgtaaatattattgcgacggttaatccagttacaaagaaagtattactgacatctacacctcgtgattactatgtaccgctgtacagtaagggcggtaaatcgtattccggaggtattccggataaactgacccatgccggtatttatggtgttgactgctcgattaatacactggaaaaattgtataacattgacattgattactacgtgcgtgtcaatttcaccagtctgaaaaagattgttgatttgcttggcggtgtagaagtgtattcggattatgacttcatttctgactggggtccacacggtgccggtacacattataagttcaaaaaaggttataacaaagtaaatggtaagaaagcattggcattctgccgtgagcgacaccatttcgcaaatggtgactaccagcgtggacgtgaccatcagcatatgattgaggcaattttgaacaaggtgatgtcaccttccgtactgccaaatttctcaagtttgttgaaagaatcgaagtccatgttccagacaagtatgtcaaaggacaagattgtatcgctctgcaatatgcagttgaatgatatggcaaaatggaagattgcttatgcgaatgccgagggtaccggagctaagaagacgaccttctcgattcgctcaacggcactgtatgtttgtgagccaaactacaattccgtgaagaagattacaaagagaatgaaaaaagtaatgaaggaaacgaaagaaagcgagagctcggcttccgataagaatgacgttattaagtaagacattacatgagataaaacggccgctttttagcggtcgtttgtcgtgaataagtggggaataaaattgattacgaaattacaggatttgtttattcttctccttaatccatggattccgattgtgggaagaataaaagacaaggtaaggtaccggctgattacgctgtgctttgtaattgaccttgttttgttttgtatcgtccgctacggacttcataaggaaagctatttttataatacggtttgtggtatttttgttatgtttgccattgccatattatcgcttgaccggacattggttcatattcactggagacgttctctttggattgcttggtttggtatgtgcatttcctttaccgtttcggatattctagtgccgaaaaaaatgtgtggactgggtctgattttagcttttgtctttaccgctgtattttttgtgtggcagaatcatacgagaaaagatttgttgtggcagtgcttcaagaatgccataaaatggtcgtttgccgttatgtcggtgatttcctttttgttccgtcctctgtatgatggaggcaggtatgccggcatttttacaaatccgaatacgtttggattgtatttgtatattattatcgctgtatttttgtcggatttggactggtgtgtggagaccggccggtcttgccggaaaaacattgtaacgtatgtttcgcttgccttatgctttttctatctggaaaaaagtcaggcgagaacttcactgattgcggttgcagcaattgtgctgctttggattgtactgcggttttatttggccaaaaagacaaaaaattaccggacctttttaggaaacttaggctgtatggcagtattcaccgtagtgctgtatcctctgtttttaatctgccttttgcatctgccaaacattgttggacatccgattgtgtttgaaggaaaacctttgtattatacaagtgaatttcaggggaataaagaaaaagcggatgagccggacgatgttgtggtgccacagtataaagatgtggaggagacacaaaacaagaaaaatacgattgcaccacgcaatatgtgggaacgcatttggtataacatcaagtattcaaagggcttgaatgctattacgaatggaagaattgatatttatcttgcctattgggataaaatgaattttaaaggacatgccagcacctcaatggtagtggatggggaaaagaaaaaccattcgcataacaactggattcagtttggttacacctatggacttttcagtatgtttttctatggtgtgattacgttattaggggtagcgttttctttgaaattttacctgacacagagaagaaaaaatgcaacatatgcttttttgataccggcaatctgtatcggatttgttattgctacactgacggaatgtttgtttctgccgtttgaagtatttccggcatttgcgtactggtttgcatttggtgatttatttgtgaaaaaagtaccaaaaaataaatttttacaggaattagaggacgaggcatgatataattttgacatgtaaacgtcttagtataaaaaaatgattgaaagataggagaaaaacatgaaggaaaataataaaatatggttgcgttatatcatatgttttgggctgattgccattctatgctacttgtttccatataccggagatgactgggcatggggaagtaaaatcggtatcgacagattaaacaactggtttgaaaattacaacggacgatatgtgggaaatcttatcgttttggcaatgacgcgctcaaaccttttaaaggcagttattatgtcattttgcttaacaggaattgtagcactttgcgagtatatatttaaaagaaaatgggttttttatgtaagttgtgttgcacttgttttgatacctaaattgatttttcgtcaggccgttgtatggacggcaggttatgcaaactacgtaacctcaatgtttttcacattgttatttatagcgtatgtttatcctatttttcaggagacaatgccacgaagaaaagtttggcattgtctgccgctctttgtgttagcggtaataaatgcattaattgtagagcatttgacaatttataatgtggttttggcttgtggtgtgcttgtgtatacaatttgtgttcatcgcaaggtggttgcttctcatgtggcgtatttaatcggaagtgtggcaggggcagcttatatgttttcaaattcggcatatcatacgatcgcaaataatcaggatcagtatcgtcaaatggcagagggaggagtaatcagtcgtgcatttgacaattatgtcaatgaaattgcaaagcatctttgcctgaataattgttggatgaatttagcaatcgttattgtatgtgccatgatttataaaaagatctattctgacgtaaataaaaacagaagtgtgttagtagcaaaaatttgtctggtagttatggcaggatttacgacatggtctttgttgtcgtcctttggcatcagtacatttgcaaaacagaaccggttattatattttgaagcggcttttgtggcagcttacatgattgccctcattatttattgtattcttattggcagtcaaaaaaaatgtttatggaaagttttgttttggaatgcgggaattgtttgtgttgccgcgccgttacttgttgtaaatccgattggtgagagatgcttttttgccacgtatatactgtttttgatgctccttttggaactgcttatccttttagacggagaagagaaagaaagccggatttttacaaagacattttgtaagacatgcgcagttgtgtccattttcggattagggttttatcttaatattttttcctcaatctatcaggtggataaagatcgattggctagaattgagagacaggtagaggcaggtaaaacgtccgtggaaattcggcacttgccatacgaatcttatttatggacagccactcctgaatgggagccatggattgagcgttacaaactgttttatggtctgcctgaggatttggaaataaaagcagtatgggaatacagtaagaaaaaataacaagattacggaggaatgttttatggaaaggaaaaaaatttcagttgtcgtgtccgtatataatgaggaattgtctttgaaccaattctataagacaacagtaagtgttttggacaagtgtgtttgggactatgaacttattttcgtaaatgatggcagccaggatggcagtattgaattgttaaaaggttttgcaaaggaaaatgccaaagttaaggtggtggatttttcgcgtaattttggacatgaggcggcaatgattgccggtattgatcatgcacaaggggatggagttgtgtgtatggacgcagatttgcagcatccgccggcatgtattccggacataattgctaagtttgaggatggttatgaagtgatttcgatgattcgaacgaagaatgcagatgccggaattattaagcgaattacgtcaggtgccttttataaagttttgaatcttatgtcgccggttaaatttgaaaataattcttctgacttttttgccatcagcaaaaatgttgcaggtgttctgcgaaaagactatagagaaaaaatccgctatttaaggggatatgtgcagagtgttggattccgtaaaacaacattggagtttgaggcacagaagagagaggcaggggaaagtaagtacagcattcgaaaactgctgcatttttccattaatgcgctgtgcagcttttcggatttgccattgaaactgggaatgtattcaggtgtatttgtggctctttgtggttttatattgatgattttcactattataaacaaaattgtcaatggagcaccggcggggtattctacaatcattgtagttttatgttttatgtttgcggttgttcttatggtaattggaattataggagaatatatcgccgttttatttgcggaaattaaggatcgaccgatatatattgtcagagatatttatcaggaagagaaagagactcatggaggagagaaagagtgaaagtttcggtaattgttgctgcttataatgcagagaaatatgtaacagagacgatggaaagtctcgccaatcaaagtatcgacgattatgaaattattgtagtcaatgatggttccaaagaccacacgattgacattttgagggattatgaaagccgttatgacaacataacagttgtggacaaggagaatggtggaccttcttcggcgagaaactgcggactggatttggcaaaaggagagtatgtatacttctttgatgcagatgatgtcttagagttagacgccttagaggcactgtatgagcgtgcaaaagaaaaaaaggcagatttagtcattgctaagtatgatatttttaatcgttttcagacttttgcagtcaatggaatcaatgatttggtgcagatggaaaaaatagataaatatgagccacagattctgtggacgttttctctgtgtaataaattatttaaacgctcaattattgagcagtatgaactgcgtcttccaccgatttcctattcggaggatggggcatttttgatgcgttatgtataccgtacgagccgaattaccggacttgaccgtgtgattttccattaccgcagaatgttcgatggtgaggcggagtcgattacggcttcgatttcttcttggaaaatcaaagattacattgaggcacaccggctgattttggagtcggcaaaagaaagtattttaattgattttccacagtacaaagatattgaggaagtaaaagagaataatgacgatattcacaaatatttaaatgaaatcagccgaaaagaagtgcagattctgttggatcagttttatgcgaaatactggacactgccaaaggagacaattacgcatctggtttcggaaatgaatgataaaatttcaacattggatatgcgtgatatttcgatgttaaaagattctcacccggaatttgcacttgacaatcttgcggtagacaaagaggatttgctttctcatgcgtggtttaccattgccctttatggggagaaagaacaggaagaaaaatttttgttaagtattcagagtctgacactacaaaatctgattgccattcggattataatgccacttttctggaaagagacagtggaaaaagccggatttttacaggataatatggagttttttgatgtaaaaacaagagatgaactgtattatcaggcattggaacaggcacagacgccgtacattacttttgcggatgccaaagtcagttatgcgaataatgcatttaagtatgtggttaagaactttatcaaatcaccggcagattttatgtcagaattgatatatcaccgcaattttggagatatgcaggcggtacttttcagcacggtggcattgaattccgtaaagacaggctatgaaaataacccatacatgggtatggattacacacttgccaataaattttttaagacggaatttttgaaaaatcaaaccctagataagtcaaaaagtctgctgtcacatctgacacagtggtaccatagaggatattttacgtttatgaatgaccgtattgtattctatgaggatttggaagcaacatatgtggattatgttggaacgaaggaaaccattccgatgatgaaggaatatttggtagatagaaaagcagatttgaacagcccggagattgttccggatttaaatgagattatgccgaagatgcttcgtttcccgtctgaaaacatcggtcagattttgttccgtaagatggtaaatttcctgcgacgctatccggtaaaagagcaggtgctgttttttacggtgcgaaaagacggtgaactagagggcaatgcaaaagcattatatccgtatgtcaaaggaaagaaagtgatttgtgccaagcgtctgccacataatccttttacgaaactttatatgtactataaaaacattacaagccgtgttattgtaacggatgactataaccgttatctgcgtcacttccagctgcgtcagagccagcgtgttgtacagttgtggcatgcctgcggtgcgtttaagaaattcggacagcggggaaccaacatgtcgattgctgcggatcatgcttatcatgtgcagtacaatatggtgacggtaagcagtgacagaataagaagtatttatgcagatgcctttgatatcgatgtgcacaaggtaaaggcgttgggatgtccgagaacggatgcattttatgatgaaaagctgatggatgagacaaagcagaaagtatatgctgcacatccggaattcaaagatcgctatgttattgtatatgcaccgacatttcgtgatataggggatgacagaacgcagtttaaaccggatttggattttgataaattatcaaaagacttactgccaaatcagatatttgtaatctgcccgcatccggtcatgaaaaataaaattgtagagaagtcttatgacaatatcgaagttatcagagatttctccacaaatgatatgatgttggtatcggatttgctggtaacggattattcttctgttatttttgaatatgcgcttttgcgaaaaccaatagcattttactgttatgatttactcaattataaccggggcttttatctgaattatccggatgatttgccgggggatgtttatgagacgcagcaggcacttacagcgtatttaaagtcaccggaaaaagatacgttgacagaaaaatatgaccagttcattgaaaaatatatgggagcgtgtgacggacacagcagtgagcggattgccgctatgattaatcagtatatggaggaagcgaaacatgaatgagacagaaattacatttttgagcagccgcggacgtgggctgagtaatgaccttgcgcttttgaaagattatcttgcgaaacaatccggagaggatgtaaagctccgctattatttgaataatgaaagacataaaaatccactggcagcacatggttaccgccgtgcgaaaaaggattttatggagggtatgacaaatgttgtctgtgtggatgcttctctatcaactaaaattaataacttagcaccggaaggcagtcggattttactgggtgttccgtatgattaccagtttaagaatatgtttttaatggagtcaaaaggaaaagaatttaatttaaatacctttgcaagatttacgcacatcattccgggctctccatttacggcagatttgttaaaacgggcgtaccgtttagaagataaagaaataatcgagggtgtttccctgccgtttgcctatgatataggggatgctaaaagaagagagaatgtctcggaactgatttattattactttccgcatgcaagagacaaaaagattctttctgttattgtatatggtgatgaagagatgaaaaggaaggattgggaaactattgatgtaaagcaatggatgaaagagcttggggaagaatggtttgtttttacaaacagtgaaattttgatggaaaatgcattttctatgggaaatcaatacaaaaaaagctttggctatgtaaaccggattctcccggttccggatttgttgtatgctacagacgttttggtgacaaataacggacgtttggcttctgcattttcaattttagaaaagcctttatatgtttgccgctacaacaaaaattattttgaaaaatatgtaagtttaaaatatccggaaatgtattttgaaaatgccgggaggttgtgtgagacagcatatcaggtggatgtgtgcaatagagcacaggcggattttaacgcaagtatgtcatatggtattgagaaaaatatatatgatcaaacgttgaaatgcttgttagattgaatgagaaagagaggaaaaagatgaatcgaattgcaaaatgggataatgcaaaatttgtgttaataatattggttgttatttgccatttttacgaaaattatttaggaagttctaaattggtaaattccttgttcttctccgtttatacgtttcacatgccggccttttttctgatttcaggtatgttttccaagaaaaccgttaaggaaagaaaaattgtaaaagtagtaccatatctgctggtttatttgtttatgaaaatgtttggttattttgtatccggtattatgaatggaggaacatttatatcggttgatttcttcagggaaccgggtgccgcttggtttattcttgcgttatttttcatgtatttaattacgttttataccaaacaatttcgacctgcttatgttttgattgtatctgtttttgtttcaatggcagcaggttactccaatatggatacgaatcttttctgctggttgaggattgcagttttttatccatttttttatactggatatgcattgtcaatggatacaattacgaaatggacagaaaatagaaagttgaaaatagtttctgtggcagttatcctgatatattttttagtctgctatgtcggaattgataaattgttttgggcgagatttctgttgacgggaagaagttatgaggcacttacgcatggtgcattttatggtggtattttacggttgtttacgtatgtgttatcctttgggcttgtgttcgcttttttatgcatcattccaaaaggaaagaatattttttctcaattaggaacgagaactttgggtgtttatgtatttcattataatttcattaacctttttgtgcattcttgttggtacaaggcactatatcataatttcccaaatacatgggaaattatacttgttttatttggaattgtggtgaccttgatttgctgcttgaaaccatttgatgcatgctgccgtgcgattttgtccagtaaatggaaacttcgcctcgatgatgagttgaaatgacaaactatctgtgatatgatgaaaacaacgaatttttttggaggttttagcagattatgatatttggagtattgttagcaggcggtgttggaagccgcatgggaaatgtagagaaaccgaaacagtatatgaatattggtgacagaccgattattattcacacagttgaaaaattctttgtgaatgataaatttgaaaaaatccttgttttgtgtccggaacagtggatttcacacaccaagaatcttataaaaaaatatttgggggagacagaccgtattgctgtgatggcaggtggtacaacaagaaatgagacgattatgaatgccatttcttatattgaggaaaactatgaagtggatgatgatacgattattttgactcatgattccgtccgcccatttgtgacacatagaattattgaggaaaatattcgttatgcacaggagtatggtgcctgcgatacggcggtagctgcgactgatacgattgtacagagtgaagatggcaaggtgatttcatctgtgccggaccgcagtaagatgtatcagggacagacgccgcagacattccgcttaaagaaactgaaatcgctgtatgaatctttgaccgatgaggaaaagaaaattcttacggatgcagcgaagatttttgttatgaagggcgaagacgtatatctcgtagaaggagaagtatcaaacattaagataacttatccttatgatttgcgtgtggcagaaacattgattcagtcggagcaggaggattaagagcgaatgcttaatacagtataccagttggtggctcctcgtaaattcgaggtcacttatgaaaatatcggattgcaggatgatgacattatcgttcgtccgacacatctttcgatttgtaatgcagaccagagatattatcaggggcttagggaagaacatgtacttcgtcagaaactgccgatggcattgattcatgaagggattggtgttgtacttcgtgacccaagtggcgagtttgagccgggggaagaggttgtgatgataccgaatacaccggtagaagaagatgagtttattgcggagaactatcttcgctcaagtaaattccgtgccagcggatttaatggatttatgcaggaatatgtcaaaatccgcaaggacagattagttcgtctgccacagggaatcaacaaagaagtagcggcatttacggaaattgtcagtgtcagtgttcatgcgatttcacgctttgaccgttttgcacatggtagaagaaatgtggtaggtatctggggcgatggtaatttaggttatattacggctgtatttttcaaaacaatgttcccggatacaaaactatatatttttggtgtcagcaaagataagctttctgattttacatttgctgacgcaacgtatcaggtaagtgacattccggagaatatggaattagatcatgcttttgagtgtgtgggtggagccggttccggaaaggcaatcgaccagattattgattttattaagcctgagggaacgatctctatattaggagtatcggagtatccggtaccgattaatacccgcatgattttggaaaaaggattgagagtattcggaagcagccgaagcggaagagtggattttgaaaagacggttgaattatatagagagcatccggaaattatcaattacctgtctaatattgtaggtgcggtaattccggttcgttcgatagctgatatgaaaaaagcatttgagatggacattcagaagtcctttggaaagacgattatgctttgggagaaatgaggtatcttatgatagcagtgattgtaccaatttataatacagaaaaatatttacgggaaacaatagacagtgtcatttgccagacactgtcttttgcagagcatatccggctgattttgttagatgatgccagtacagatggctcatttgccatttgtgagcagtatcagaagcagtatccaaagcagattttagtaaagcactatgacacaaaccagggtgtttctgtacttcgcaatgaaggcgtacggattgcgggagagatgggtgacgaacttattacctttttagattcggatgacaagttaacagatgatgcaatggaaaaagcaaaaatgtattttgaatcacatgaggatatttcggttgcggctattgctgtaaaatattttggcacaagagacggagagcagcgcttaaattggcgctttcaggaaatggatgttgtggacattaaaaaacaatatacgtttccacattattatgtaggtggcgttttcttgagaaaacgtgttttaaatgaacttcattttgatgagaccatgaatttttgggaggatgcgctggcgattaatcaggtgattgtgtcagaaggaaaatacggactgattcaggatacattttatttttatagaaagagagaggatgagtcctctttagtggatacggcatggcataaaaaagagcgttatacaacgctgttatcgtctggttatggacagttatttgcctactcaaggaaaaagcaccatcgtattattccttatgtgcagtacatggtagcgtatcatatgcggcttatgatgatgaaaagtaagcagagcattatcgaagaaattttatcggaagaagagttggcggcactcagagatgatgtgcagaaggtattaaaaaagataaaagtgaaatacattttacagattccgacgtcacttccgattattgagggaatgctctcaatgcgtgccggaaaacaggtgcgtgccaaacgcgtctacaaggacaatgactgtgtacttatgtataagggcgttgaattagccagaatgtctgagcgttccgttaaattgttccatatcatagaagatgagggatcggagtttaacggtatgtggagagggcgtttctgcacaccgatttacgctatgaaaaaagaagattatatctttgccgagcataacggtgtacggattaattcagaagaatttatttgccgtaaacaaatttttattcttggaaaacgtctgcgatgctactatcatgcagggtttgccattgcgattccgaaagaatgggatcgtgctgtgtttggaattcatattgcagaagcagatgcggatattttgatgaatgagattgtatttaatgaggtaaggctgatttattttaaaggggaaacagaagaacatgatgaattcgaaatcgacagagatgatgaaaaagacatgtaaagatcatttttttaaagcagggcaatggttttggtttgtgtttgtgtacggcattgctttgattgcctttagcagtttgatacaaaaatctttttttgcgatgattttactgccaattgttgtttatggaatatatcatttttttatgagagaacgaattgcctttaaagagataaattatcagattgttttttatgtcgtaagcattgtttttgctgtgtttatgttttttgttgcttattccgtgcgtgtgcagattttttcatgggattggggaaaagtaattcgttctgcaagtgagtatacattaacagataagttgacagatactacgtactttgcaagatatccgaataatcagttttggtattgtattttgacattttttttcagaatggttcattttatatggccggagacggggctaaatgaattttatttagcgtctatagcacttggatgtgttatgacagtggcatctatcttgttgcttcatcacatagcggttcttatttggaatgaaaagaaggcgttttttgttggtttaatgacatggttttgtatgccgttgtggttatgggctatgtatgcttatacggatatagcaggaatgcttttgctggtagttatgctgtattgctacacgaaggctgttttgagtgaacccggctggaaagttttttgctggttgtgcttatttggagtggctgcatctgctgcattttcagttaaagttactgtgtttattctctttattgcagttttcgcctgcttattacttcaaaagaaatcatggaaaaagattattgccggtattgtcattgtagcaatttcgtttggagtcggtcatggattgtgtaattatgtaaagtcttctgtaattccgttagaagaatcgtattgcgatgcctatgaatttccgctgacccattggattatgatggcacttggatatgggggatatcagcaggaggatgtcgattttaccatttcatttaattcatatgaaaagaaaaaagaagctaatataaaagagattaagaaacgattgaaggcacgttctttccatgaaagttttaaattttttggttatgataaacaagttagaacatggggagatgctacacttgccagctgtgtatatttagctgaaggcccacaggagcctgacaatatattaaaacaatttgtgacattaaaaggaagcaaatactggatagctcttttgtatatgacgctatattatggcttaatacttgttgggatgtttttatcggcacgatttgcagtaaaaagaaaatctgatgcaaaagcggtggatatgccgatttttgcttcaagtattacgatgcttggaatagcattgtttcagactatttgggaatgtaattcaagatatttagttgtatttattcctattatgattttgttagctgccgatggcttttttgcatggagagattaccttagaggggagaggataaagtgaaacactatcatttttcaaaatccgacacatcaattgcgaaattaattgctattagtttgatgcttttgcatcacttatttggatttacggatcggattttgcctgagaatatgtaccagagtttatatatgtttcgcgggcagcctatagaagcagcaatctgtgcttcttttaaagtgtgtgttgcgttctttttgttccttagtggatatggaacatatctgagtatacgtaaaagtaaatcaatttcgaaaatgattgcaaatcgtatatttcggtttttaaaatacatatggcagggtatgattatttttgttccaattgattttatattaggtgtgacaaaggtaaatctcacatcctcatggacaattcaatatgattttgaaagcattattcttagcatgcttggatttgaaaagtataatggtgagtggtggtttgttatgccatacatatttttacttatgatgacgccgcttatgtttcggtttttaaagagaaaaaaagctgatttctttacagattttctcgttgttttggggattgctttgttttctttgtatggtatccctaggttgatgagttatgatatgttgattgactttaaagggacagtatgggggattctgctttgcaacgttgtttacctacttccaatttatctatttggtatgatttttgcaaagtatcaggtattctcgtattatcatcagatattaccgaaaggaatattaagttaccctgtattattatttgttgcggttgcaggtttttatatgcgttataaaattggatcttcttatgactttttcctggttggacctatgatttatgcgtgtgttatgcttattaagaaaattccgggagttatctgggtgtcaaaaaaggcaggaagatatattacttttgtttggttgattcatagtttttacgtgtttcaatttggacagaaatttatatattccttcggaaatccgatattaatttttatcgtgctgacagtggtttcttttgcttcagcagctgctgtttactggctttttaccggattatccaaaggagtcaagaaaatcagatgctttcataatcggacagtgtaagtctgttttccaaaattatatcaatggcctcacgtacaggagcgtcgccggacttttgagtcagaacaaaatcaacatatggaagcaatgcggcagcgcagtcagccggtgcaaaggtaatgccggctgtttgcattgcagacagatcattcatatcatcaccaatatataccgtttgttcaggagtgcagtcatatttcgccattacatttttcaagatatcagctttatcgcgaacaccctgataaagcacggtaattcctatttcttcgcatcgtctggtgacaatttttgaacggcggccggtgatgataataggaacaatacccttttttattaagagtttaatacctaatccatcttttgcgttaaatgctttcattacctcaccgtcattaccaatataaatttttccatcggttaatgttccgtcgacgtccattgcaaacaatttaatttttgaaaaatcttttttcatgtgagtacctccggtattagtgattattcatccattaccgtttcaaagtaagatggtgtaatgaatgagatagggcagcttgattttctcgtatttttataatcaacaagcatgctttttatatctttatttgcttcttcagcatttaatgtatttctggttttttccatggctttttcaacgtaattcggattttcactattatggctgtaaccatcaaaacctgcgatggaaatgctattcacattcatcaggtctagcagacgaagaagaagcacgccagaattatcgagctgctcccaaccgcattttaccaatcgaagaaaatcgataataaagagattatcatctttccttgtcgttacatttgatgtcacaatttttttacatttattaaaagccgcttcattacgccaatactggtaccggtttttgttgctgaaatatgcaaaatcaatcggataacaatcggtgagaagattaacgctaattacaataggattcttctctttataaaaatgctgaatttgtccctggcatgttttaatcgtgtgaccgggaagaagaaccaaaatatctttcccactgagtgcattttgaagtgatgcaatggcagaatcatcctcgcagtgtgtattttgataatccaaataggtcttttcgagaagcgagtagtcgtaccgttttcgctccaccgggtccaaacggtttagtaaaaagttaatatcgcggcttgcaattcctgcctttgccgaaaggtaggagatgttgtttacatgcgcactgtgcgaaccggcaagaaaatatgggatggagtagccccattcataactgttatggaaaccgtcgatataattgtctataagatctaaaacaatatcaatatcataaccactattaaacttacggttcatatactgcatgacaagttctgtatttgtatttcctgcgccacgtcccatgcctgccattgtgctgtctacaacaatatcgcggagtccctggctcatatcgataaaatcctgagatagagcaaaggacatctgcaggttattatgtgagtggaatccaattttagcatttgcccataaattatgatgaaccagataaaatacacgctgtaaatcctcacgatacagagaaccgaaggtatcgacgatggaaaaagcatatggttccaattcatttattttttcgatcaagtctaaaagctcagcatctgtatatcctaatatgtcaacaggctgcacataaagtttgtatcctttattgacgattgctttacaaaaatcaataacttcaaaacgttcgcttttaaaaaagcaggcacgtacaccatcaattgaagtgccgtcataaggctctaagttatcaatatggtatcggctgtaatcggcaaggcagacataagatgaatgccttttgtctgtaggtaaaaatgagcggagctgtgcagcattattaaagatggttgtgccctcccgatgtggttcgtctttcagaaatccgcattcaataacatctatgccgctttctgttaaaccttcaataattccttttattgcagtattgccaaattgactgtcaatcaggtatgcaccatcgcgcagtgtacaatctaatatatttactcgtttcataaaaacctccctgttaaaattgatactaccattctgatggaagaagccaattctcatatggtatcatatgtccaaatgcgtcaatggcccctttcgctgttggatagtagcggcctaccatactatttttaattgcaagaagttccggggcaatctgttctcccggaattttattgcttgaattgtaatagcgtccaaaataatatagggtagcagatttattggtcatcttattataacattgtgttaccatttgggaaatcgttttgtgtaaaaactttccatattcaccaaaaggattatgagtggcaatcaaatcccattttttgtaggataagataagattaatatcttcctgcatagcatttttacatgtggaaagcatgtcggtttcatactttccgttactaaatgtttttcggacgtccgggtaatccaaaatcaggtatttgtcatttgtcgtacgcattgtttgctcaaaggctgttcttcgttttggattccagccatgcgtcatgcagacaacgagatattcaccttctataagatgtccgccgccccaaagtgtctcgtcatccggatgtgcggtaatcatcactttttttatggaagttaagtcaaggttatctaacatttgtttcgtaatgtagccttttgtacgagtgattttaagattccagctgcatgtaagagctggatttgtcttatatactgcagtaatagtaacagtttcaattggacgaagggcagttactgtaccattttcatcaacggttgcagcggttttgttgctggatgtccatttgattcgatgatccgttgcgttggctggacctgtgactaactgcattttatgtgatgttccggattctaacgaaacaggattgttctttgcaaattctattgaggtatatggtatatcctcaatggtaatatgatgtcttgccttttttttactttctttcttgcgaactgttatagtaacctttcctgcatggtgggatgtgacaacaccatccttattgactgtggcaacacttggattgtttgacgaaaaaacaagggtatcatccgttgtgttttttggagaaagagtagttgtcagtgctatttgttcaccaacatgtgcggtattttttccggaaagtgtgattttttttatcttgatgcgtttttttacttttaatttaaatgaagtgcgctttgctgttccttttaccgaagcggttatggttgtagaacctttttttttggcttttacaatgcctttttttgaaacagacgcaacttttttgtttgaggaggtgaaaattactttcttaaaacgcgcattatggggggttaccaatgttttcaattccagtctatcgccggttgccatggcttcttttggtttgtttgttattttgattgatttggtacgaaaataggaaacgacacgtacagaagctgtaatatcgtttggtttaccgggaattttgagagaaattgtaacggttccctttttctttccggtgacggtgccatgtttgtttacagaagcaatgctggaatcactgcttttccatatccaagcggctttgttttgcgttgaaagtgttgaatctttcacttgcattgtagttttttttccaatttgtacggatttatcaggcatatcctgagctgcctgtactttgatataagtactgctgcatgttaaaaaaaatacagcacccaagaaaaataagattttttttgttatagtcataataataacatctccttttgttaaaaatcctttggtttataaaataaaaaacatatgtgaagaaaatatgtcaaatggacacattgttttttcttattatgttttcaaccaaggcaacgtgttccggtaagtccacgccaatggaggtataggttgtttcttttaaacgcatgtgataccctttttgcaaggcacgcagtggttcaataccttcacctttttccaattctgtctgctccatatttgcaaatttcaacaaaaaatcttttttataagcatagattccgacatggcgaaaaactcgtgctaactgaccgtcttttatattggacggaataacagagcgggagaaatacattgcatctcccgtgtcgtttgttactacctttactgtgcttgtggcacggatttcatcaggatctgtgatttccttttttaaactgccaaaataaaccgattcatcttccgtaaaaatggaaatcacttctcggatcatttccgggttaatgacaggttcatcgccctgaatgttgatatacaaatcaccatccgtgtgttcggcaacctctgctacgcggtcggagcctgtctgatgggtatcttttgtcatttttacattcatgtcgtatttttcgcatactgcacgaattcttttgtcatctgtggcaacataaatttcgttaagttccttgactttcatagcctgatgatagacccagtatatcattggttttccgcagatttcaaccaatggttttcccggaaaacggctggatttataacgtgccggaataacaccgattatcttcattttgattcctccatttttttactcaaaacatcttcaagttttacgcgtggaaagatttcaagatttccaccgcgagttgcattatagatatgaatattatgtttctttgcatacgaatcaagaagtgcatatacttccatggagcggtctatgatgtgctccccaatttgtttggttgttaaagtatttgcatgcattcttgtcttgattcggttaatatcggtttctgcaacttcttttgttgtgtaattatctgtaaaatgtccacctttatcatgagggtttgtacaatccacgccgagcagataaatttctttaaagcccatatgaaacgccatttcggcagctagagaaagtacggttgccttaatcatgcagtatgcctgaatgtttccgcggactttgtagcgttcggttggaatggtatggacgtaagtggtatcgaccggttttttgcgcatgcggcgataggtgcgctctgttgtaaacagaggagcctttaccattttggaaagttcgatgccaagcttggatgcgtaaattgtgtcagatacacagtgaaatgacggacgccagtcggttttgtcaaaaattttgtataccatgtttgtaccgaaggtgtattcatctttcaataaatgtaaatcttcaccggtcagactgggaccgtttccaatgagaaaacaccgttctcctttgtgactgtccttcaaacgctcgaggcgtaaactattattgttatggaacattccgtgagagcggaaaaatccgagaacattataacgcagtaacagccataaaatgcgcattcggttgagcgtttttttagtatagcgtacaaaacgttcgtagagggttctcttatgaggcagtgccctaagacacatatcaatcactcgtttgccggaattcccatcttcatatggattaaatttttggttaaattccaattgcttgtctcgataaggaaattcgcattcctgacggtggatggcatcaaccagttcctgttccgtttttgtgattggtcccggtaattcttccggcgacaggtaaagaccacgcacatcttgttcgtaggaatctgcgtcgtacatatgaaaaaccatcggacgcattaaatttgcatagtcaaacatggtggaagagtagtccgtaatcattaaatcactgactaaatacaaatcattgaccgactctacgtcacttacgtcatatatgacagggttatcttttatttttgccgctccaatttggtgatgggcgcgaaataaaagaatataatcgctgccgagcatgtccatcagtacattgacatcaaaaccatccggcaaggaaaatgccccattttcatccagtgatgagtcacgccaggttggtgtatagagaagaacctttttcccttccggaatatgtaatgcttcctttttcttttggatttcttcacttgtataatgaaaaagtttgtcattgcgaggatatccacttgcgacaaattttacagaaggatctccgattgcaaaagcagaagctattttttcactataataaggagacggagatggaaaaaaagttacttttttcccttttgcccggtatcgtctgtgcatatgagaacgtgtctgacgaggatcggaatctgtttcgatatcacagccgagtctctttaatggtgtaccatgccaagtctcgatatagatttgggtttttcgtggttttagataatcagcaactgtgatattgttaatccagtaacgagcactggcataatatctgcggtaggcagaagttcccttcttcaccagtatggtatgatggttttccagtaaatcaaaatgcgctgcagggtcagtgaatgcccacacaaaataaaacgagcggaatttttcatccttttgcagctcgtcatatatggcacgcacgctgtcagtggctttttttccgccataggattcaaagacaatatagttgtcagagactgtcgagtgcagttttgtaataccgtattttatccgatttttatagtaggacaaattttgtcttagcatgtaacgagactgcttgttcatggttgtatgttcctttccccaagtgttaatagatacctcatatactataacgatttataggtaaaaagtcaaatgttttgcaaatatatgaaaactgtggtataatgcccataataatgtgataatataggaggacaggtatgtcaaagggtaaaataatttatatggttgtaccttgttataatgaagaagaggtgcttgatgagacgacaaaacagttaagtgataaattgcaaaaattgatcgatgcaggtgagattagtgaaaaaagccggattctttatgtgaatgatggttcaaaagatcagacatggccgattatctgccgtctgcatgaagaatatacacttgtcagtggattgaatctttccagaaaccgcggacatcagaatgctgtgcttgccggccttatgtatgcgaaggatcattgtgatgcagcgatttcaatggatgctgacttacaggatgatattcatgctattgatgagatggtagataaatttaatcatggaattgatgttgtttacggtgtgcgcagcagccgaaaaaaagacacgttttttaagaaatttacggcagaaggattttataaaatcatgaaatggatgggggttgacattgtctttaatcatgcagatttccgcttgatgagtaagcgtgttttaatgcagatggaaaattacaaggaagtcaatctctttttacgcggaattgtaccgttaatcggatatccggcagacaacgtatactatgaaagacaggagcgctttgcaggagagagcaaatatccgctgaagaaaatgttgtcgtttgcatttgacggcatcacttcgtttagtgtcaaaccaatccgctttatattaagccttggtcttgtcatcttcttggcaagccttggaatcctgctctattcgattgtgcgccatgcaatgggtgcaacggtacttggctggagcagtcttatggtttctatctgggcgcttggcggtttgcagcttcttgcgataggtattgtcggtgaatatattggaaagatgtatctagagacgaaaggccgtccgagatttgctatacaggatattctaaatgatgtagaccgggccgagtaagagttcagagattttgttttgacggggaaaggaatgcaaagagaaagtgatagtggaaaaaatacaaaattttttgtgtgtggcagcgaaaaagatatttctttgcttacacatttttattgtggttatgattttgcttgagttcggaagacttgcaggtgatgtgtttccgttacattatcaattgttgaatgctttgctggcattgattgggttgacagcaatttccctccttttttttatatgctgcacgagaaaaatagcaagttgtgtttgcaaaagaaacagagttgttatgttttgcatattttatgcggtaattatatttgtgatgcagatgtatctgtgtaaatgtatctatttttatacgacgtgggatgtcggtatactgcagtcggcagcagatgttgtgacacatggtggaacaattcaggattggatcagccaaagaggagattcgttttctcagaattattttaatgcttacccgaataatatttttttgacgattatttttgccggaataaaatatctgtcatctttatttggatgtgtagataattattttcctacgattgttgcaggggtgatttccacagatgctgccattgtgtttactgtgatgactgtttggaaattaacgcatagtcgaaaagtgactttcctgtctataatcatttgcacagtttttttaggattcaacccatggattataatcccttattcagatacatacgtacttccttttttgagtgcggttttgtatttttattgctccatgaaagatgagaaaaagggttatgcatcatggataggaattgtgatagcggcttcgctggggataaaaatcaagccgacggtggtgattgctttgcttgcaattgttctggcagaaatattttttttgcgaaagtgccaaattaaggaaattgccgcaaaatgtttaattgctgcaggaggaaccataattgttttgggtctgataaatagtttgagtgatgctgtgtatgaccagcggaatgcagatgcacaaatgacatggcagcattatctgatgatgggggcaaatgaggaaacacatggctcttattttggcgttgacagggagcgttcatggggaatatccgatccggagaagagaaaggaaatgcaaattgaggtgtggagacaacgtataagtgagaaaggcatttggggcacaataaagttttatatgcagaaattgataattgcaaatgatgatggctcatttgcatggggctgggaaggaaatttctttggtgaatatcgtggactgcacagtgaatttgcacaaaaattacaatctttttattatgcacaggataataagatgatttataatattttgcagagtatatgggtttctatacagattttggtttgtttctttgcaatattttttgataataggaataaaagagcacttttcattgcgatgacattgactgggattaatttgttccttatgatatttgaagtgcgtgccagatatttgtttatgtttgttccgttttatattacagcggctatgcttggccttttctatatgcaggaaaaagtcaagatgataaaagatagaaaatgtcatttgcaatagatagaagagaaggattaataaatcagtgagaaactttattcgcaaagcgaatcctttgtttcgagttgatttactaatccttctttttttatttcttgaacacccattctctttgaatttggaaactgattgcaaaaagcagggtatcaataatgcatttgcgaagtgtcgaataagtaataaatgtcagcagatgatcgactaaaacagcagacaacaaaagctgaacaattgccaatgtgtaatatcttacaaaaagaaatggcgagcttgagtcatttttaaacacctgatttttgttcacaaaaaagttaaatagcgaactggcaaaacgtgaaatcacagtccgcattaatataagcacggacaaatcgaaaaacggaagcatccacttgtcggagatgatcggacgaagcagatagccaagcagccagtacaaagcaatgtcgataataaaactggataaagagcttagcataaacttaaaaaacactttgtaaatccgaatcgaatcaatgaacggattaaaatgcgagctttcattatttgccagataaattgtctgaatcggaaattcttcaattggaatctggtattccttcgcagcaatcagcatattcatttcatattcgaaccgttctccttttacatttgcaaaatgctctcttatgagaggggttggaagtcctctgagtccggtctgcgtgtcagaaacatgtatgccgcataaaagccggatcatctgccgagtcaacttgtttccaaaacggcttctcagaggaatttccttgtcgtcaaactgacggcagccaagaatcaaagaatccggatgctcataggttagttttgcacaagtgttaatgtccggaagtacatgctgaccgtcacagtccacggttacggcacctttgatatccgggcgctgctctaaaatatagttaaacgcagactttagtgcaattccttttccgaaatttacgacgtggcggattattttgcagtggcaagtctctttgcatgttttaaaatactttcgattggcaataagacttccatcatcgaccaaaatgatattggaaaagccatcgtcgtgcaattgtccaacgagtgataccatgcgctcatccgggtccagtgccggaatgatgatggcaatactttctttataattacccaaaacatttccccctgtaattctgaaatcgaaataatactgtaagtataagcctatatcgtttcagaatcaagcattcgtgattgacattctttttttacattagctttttgctgcgtttgccgcatttcgtttggcacggtaacgctccgttccatcgagaatttttttgcggatacgaagattttccggtgtaacttcgagtaattcgtcagtgtcaatgtaatcaagtgcctgctctaaacttaattctttcggcggtgtaaggcgcagtgcttcatccgcaccggaagaacgggtattcgtcaggtttttctttttacatacattgacctcaatgtcatcgctttttgcgtgttcgccgacaatcatgccgccgtaaactttttcaccgggaccaacaaacaaagtgcctcgttcctgtgcattaaaaagaccgtaggtaattgtttcgccggattcaaaagcaatgagagagccttgtttacgataagggatttctcccttaaatggaccatagccttcaaattctgtattgataacaccgtttcctttggtgtctgtcataaattcgccgcggtatccaatcagtccacgggctggaatgataaattccaaacgtgtcgtgcctgcatttaatggggtcattgcctgtaattcccctttacgctggctgaggcggtcaatgacatttccggtaaattcatccggcacatcgacataagcacgttccatcggttctaattttttgccattttcatcttctttataaagaacctccgctttgctaaccgcaaattcatatccctcacggcgcatattttcaattaaaacggataaatgcagttccccgcggccggacactttataagcttcggttgtgtcggtatcttccacacggagggatacgtcggtatttaacatgcggtataaacgatcacgcaaatggcggcttgtcacgtattttccttcctgaccggcaagtggactgtcatttaccataaaatgcatggcaatcgttggctccgaaattttctggaacggaattgcctgcggattttcaggactacacagagtatctccaatgtgaatgtctgcaatacctgaaatggctacaattgagccaatcgttgcttcttcgacttccacacggttgagtccctcaaattcatacaatttggaaattttaactttttcatttttatccgggtcatgatggttgacaataacggcatcctgattgacgcggatggttccgttatcgacttttccgatgccgattcggccaacgtattcattgtaatcaatggtgctgattaagacctgtgtgtcggcgtccggatcgccttccggtgccggaatataatttaaaatcgcatcaaagagcggcttcatgtcggtgcctttctcattgacatcgcaggatgccacaccttcttttgccgaggcaaagataaatgggcagtctaactgggattcatccgcatctaaatcgataaacagctctaaaatttcatcgacaacttcttccggacgagcttccggacggtcgattttgttgacacagacaacaaccggcaaagatagctccagtgctttctttaacacaaattttgtctgaggcattgcaccctcaaaagcgtcaacgactaagatgacaccatttaccattttaagaacgcgttctacttcaccaccgaaatcggcatgtcccggtgtgtcgatgatattaattttcacaccttcataggtaatggctgtattttttgataaaatagtaatgcctcgttcacgctcaatatcatttgagtccatgacacgttcggcaacttcctgattggcgcggaatacaccgctttgtttcaataattcatccactaaggttgtcttgccatgatcgacgtgtgcgatgatggcgatgtttctgatatcgtctcttgttgttttcatagaaacctccattcattcatgcaaaaaccacaaaatcgtattatagcacgattttttttgtgtggcaagttcgggcgtaaaacgctaaacaaaatgctaggtttttttgttcttttatggtaaaatagaattcatataaaaaaggaggtgctcttgtggggctgaaaaggaagaagtggttactggggacaggataataacggagatacgaatcgtttgcaggaatcccttttaattacagtaaaataataaaaagaatggagaacaaagatggaaccggaaattacagatatttttgaccgtattatgaattggaagttgcttcgatttatgtggcctttttataaaaaaaataaggacaagcttttatatttgttttttggaggatgtacaacacttgttaatcttgtgattacatatggattgtggtatggtttgaaatgggaacagtggtatgtcgggaaatttgcactgggcacgttccttggaaatttaattggaattgtgtctgctattttgtttgcttatgtgacaaataaaaagtttgtatttgcgtcgaaaacaacaggaatgaaagaacttttggttgaatttgttaagtttgttggcggccgtgtatccactttaattatcgaacttggcggtgttcagcttgctgtaatattgttccctgattctaatacacttttgtttgtggcgaaacttttgactcaggttttggttattataattaattattttatcagcaaattatttgtgtttaagggaacaaaagaggcatcttttgacaatcaagactaaattttaatttgaatttgtccgatatacagattacggatgcgaatgtttattttagaatcagattttagatagatgatatagaaaggtatggttatggatatgagagaacaaattaagaaaagattcaaaaaaagaagatatgcagtgcttcttacactttttgtgggggtattattttttctcctgcgtgggcagttttctcatgcggctgaccagatttttattcagtttaatggtgctgatttagacccggcagttacttatgacatgacgacaagcagtatgcagctgatgcttcgtacggaaggaacggcttatgatgatgaacgttataaggtagaatggacgattgaagatgctacagcccgtgacattattgcatcaattagtcctggtacatccaaaacaattggtattgtaaaggctttgtcacctggtgatgtcaccgttacagtaaccgttaaggacagtatggctggggatgctgtgttaggtagtacgacgtgtaatatccgtgtcgtattctcgatcgatacatcaaccgacgattcgatttataaatttgttcatgaaaatgacacggcaaggtctcttgtgatgtattcgaacagtgcaccggttaatcttggtttgaactttggttctgccaattcttcgaatacccagtggtcgagtgcgaatgaggaggtagtaaccgtaacacagagcggtggtcttgtttctccggttggtgccggtaagacgcaggtgattgcaacgtatacaccgaccggtggtgcggaaacgtatacggcatatctggatgtttatgttatccctcgtgtttcgacaaccaatggggcaaattatggaacggcgattgacgcccagttaaattccggtgaatgtttatacacggatacgaactttgcaaacaatctggaagtaatccgaagtaagattgtgtgggttgtaaaaaaagatgatgatcagggaaattcaaaaattattgcagattcccttggaaaagattcggatttgatttcgattacgccgacggcgagtcgaagcaatgaactgcggattgaaggaaaagcgggtgagtatgacctgtatttctatacttatggcagttatgatgaaaacgtggataatggaacaacagcatatacaccgaccgttgtgcatctgacaattaagagtgatattcaggacaaaacggagattttaagtattggtgatggatatcattttgcggaaagttataatatgacgctggaagattttaatgagtgtttcagtgtggatattaagatggcgcagggagcaccggattattccgaatatgcggactttgataatacaaaggcagaattaacggcaaaaaatgtcggtaacctagtggcaacgctgaccgtgagaagcggcagggaagcctatgttcgcagaattttaggacttgccgagaatgaggcgctgccggcggctttcacaacaaagattgatattacggataacattcagttaaatcggacgtcaatgacgattgtggttgggcagaaagagcagttaagtgttaaattaaatagtatttattccggttccattacatgggagagcagtgacccgaactatgtatcggtagacagactgaccggtttgattgaaggtaagaaagtgacaacgcaggatgttgtgattacagtaactttggatgccggaaatggtttgtataagactgcaacctgtacggtaaaagtagaggctacggtatccggctttaccttgaatccgggaacggatcagcagatgttagttggcgatcatcttacagtagttgcaaacatcaaacagaccgttaccgttgcaccgcttcgctggattagcagcaatacttcggtctttacggtagaacaggcatcggacggcaagagtgcaattcttactgcagttggtggtggacgtgcgacgttgactgtttacagtactgtgaataacgagtacaaatcgtttgaggtgacggtgcgtattccaattaatgaaatttcatttagtgccgcacagatgcagttagagctttacaagagcggttataatatgaaagacgaagtgaagtggggtccaaccaatgcgaccgatacagcgcttacatgggctagttccgatacttccgttgttgagttagacaaagatggttatatgaaattcaagggagccggtacagcgcttgttagtgtgtatccgacctacaatccatacaatgtaatggcatcctgtctggtaacgattatcggtacgccggatagtatgacgataagtcagatggatgtgacgatgaatgtaggtgaggcggttccgttattagtagattttaatccgaaaaatacggcaaccggtattacgtggacgccaaatgatgatggtatcgtggcggtaacttatgatgaagaacgccgcattgctacattgaccggtaaagcaccgggaactacgaatattaatgtggtgacaaccgaaggtttgatatcgaatgtaaaagtttctgtgaaacagccgtcaacggcgttgaatctgacaccaaaagacgtaacgcttaagaccggtgacagtgtgaacttaaaggcaacctttacaccggcaaattcaacagatacgattgtatggaagagttataataccggtgtggcaacggttgatacgaatggccgtgtgaccggtgtgaaagcaggttcgacatttattcaggcgactgcttacaacggaaaagtggcaggaccgacgacagttattatggtgactgtgcaggatggtgtgaaaggagtttccttagactcatcagaaaagacggttcgagtgggcagctcgcttacgctgattccaatttttaatccggtaacagcttttaataaggcaatgacgtggaagacttccaatagtaatataaaaatagaggcggcaggtatttccaatctgaaagtaaccggtgtaaaagccggtacggcgatggtaaccggtacgacgacagatggtggattttctgtatcctgtttgattacgattctgccaaaacagaaagaaaatgatacgaaggtgacggtatcgccgaaaaccaaatatttggctaaaggcaagtcattctatgtgacagccacagttaccggctcaagtaataaaaaggtaaaatggacgagcagcaaaaaatcagttgcaaccgtgacttccggcggtaaagtaaaggcaaagaaattaggaacgacttatatcaaagcgacagcgaaggatggttccggtgcatacgccagatgtaaagtgcgtgttgttcgtaaagtgaaaaaaattaaactgaaccgttattcgggcagactgcttgttggaagtacgttgaaactgaaagcaactgttcttccgaaaaatgcgacgattaagtccgtgaagtggacgacgaataaaaaatcgattgcaacagtcagcagtaccggacgagtattgggaaccggcgagggtattgtaaagattaaggcttcggcaaaagatggttccggtaagtcagcaacttgcatacttcatgttgttgagccgattgaggcaacgggaattactgtggcaaacagccagattaccgtggcgaaaggaaagattgcccagtccggcattaccttaaatccggtcaattcgacgacgaagattaaatatcactccgataatccgagagtggcaaccgtaaataaatatggtaagattaagaccaaacgtgccggagaggctacgatttacggaacgacttcgaccggactgtatggttattgtgatgtattggttgtagatttaaaccgcaaggcagtaactcttcgtccatacgataccgaacagcttcatgtaaatgagattagtaccggtgtaacatggtattcaagagatattaacattgcaaccgtatcatcgaccggacttgttaccggacgtaagagaggtataacaacgatttatgcggttgtcaacggtgtaaaactcggatgccgcgtgaacgttacaaaattaaagtagtggaatgggaggagactattgttagtaaatttacatgtaaaaaactttgcgataatagacgagattgatgttgatttttcttccgggttaaatattcttaccggagagacgggagccggcaaatcgattttgattggctctatcggcatcgcgctcggtgcaagagtttcgcaggaaatcataggaaagcatggcgactctgcgatggtggagattgttttccagattgaagatgaagagacaaaagagaaattatcaagattaggtgtagacccggacgaaggacagattgtcatttcccgccgtattacgggaagccggagtgtaaaccgaattaatggtgaaaatgtatcggtcagtgtgattcgccaggtggctgccctctgcattgacattcatggacagcatgaaaaccagtcattattgcagaaggataaacatttagcaattgtagatgagtttgccaccaaacagtgtgtcgctctgaaacaagagattgctgctttataccgtgaatatacagcgctgaaaaaacagtggcaggatgaagatgtgtcagatgaggagcgtgcgagagaacttagttttttggaatacgaaaaacaggaaattgagcaggcatctttacaagccggtgaaatcgaagaagtggaagaagcataccgcagagcatccggcgctgagacaattgtggaatcgcttggtctggtacaccgtttgacaagtgatacggccgcgggagctgtgagccatgcgttgcagagtatgcagcggattacaggctttggtgatgaaattcggaacttgcaggaagaacttttgcagattgaaggacttttagatgattttaatcatgaaacagcggattatatgcaggacttttctttcgatgccaatgagttttcggatttagagaaaagactcgatacgattcacaatttgcaggcgaaatacggaagtacctatgaagaaatactttcgcatttgcaagaagtagaggataaactgcaaaaacttgcagattttgaacagtataaggagaaacttcttgctaaaataaaggaatatgagtcggatttgacaaagaaatgtgagcagttatcaaaagaaaggaaagaaaccgcttccattcttcaggaaaagattaaagctgctttatcagatttaaattttgcctatgtagattttgaaatttcatggagccgcaaagatacatttggtgcggatggatgggatgaagctgaatttttgattgcaacgaatccgggcgagccaaagaaaagcctcggaaaaatcgcatccggcggtgagttgtcccgtattatgctggcaattaaatcggtttttgccgaaaaagaccatattgagaccttgatttttgatgaaattgatgccggaatcagtggacgtacggcacagaaggtttcggaaaaactgaaacttttaagtaaaagccaccagattctatgcattactcatctggcacagattgcggcaatggcagatacccattttttgattgaaaagatggttgatgaaaatcattcggagacagtgattcgtccgttggataagtcgcagagtgaacaggaattggcacgtattcttggcggtgttgagattacagagtcggtacttgaaaatgcgagagagatgaaagcgttagcaaaccaaaaaagttcagatagttttcagaattagaaaaatagaagttggctatactaaacagaaggaaccaaaacaatagtaagttttgtaccttctgtttttattttgccaattatgggaggaatgagtatgagaaaaaaagttcgttttttgctggctggattattagtggctgatgtattattgattggatatttgatgtatgattatattcaaaataaaattcctgattctgttttgacttacgtcggggaaaaacaggaactggacctgccggcgttttttaagaccgagcaaagtgttccggctctgcatgtgcaaaatcaggatggcagtttttctatgaaatcaaaccggttaggaagttatgaggtatcggtccgcttatttggtgtgctgccggtaaagaggatggacgttaaagtggtgaaaaggaaaaagatttttccgagtggagagccaattggtatttatgtggagactaatgggctgctagtgctggatacgactgaggtcccggcaaaagatgggcttacttatgcgcccggtgaaaatttgttaaagccgggggattatattttggagtggaatcagaaaaaggttgctacgattcaaagtttaaaccgtgaaattcaggggacaaaagataaaaaggttacggttttaatacgccgaaacggagaaaagataaaaattgccatgcgtccggtgctttcatcagatggcacatataaaatcggaacatgggtacgggaggatacacagggaatcggcacgcttacttatgtaacgaagaccggtgaatttggtacacttggacatggaattacagatgttgataccgggacgctgttgaatttacacgggggtgaattgtttcagacgcagatagtcgatattatgaagggggagaaaggaaatccgggagaactgcagggatatatcaatatgattgcaaaaaatacgataggaaaaattaaaaagaacacggagcagggtgtgtttggtgagatgaaacaggagcgtgtgtccgcctattccggaaaggcgtatgaagttggcagaaaacaagagattgaagccggaaaggcgtatctgtatgcgaatcttgaaggcagggcgagaatgtatgaaattgaaattgaagatataaaaattaatgcaagggataataagagtatggaaatcagggtgacggataaaaagcttttaaaactgacaggcgggattgtacaggggatgagtggttcgccgattatacaaaacgataaaattgttggggctgttactcatgtttttgttgatgacccgacaagaggttatggaatttttattgaggagatgttggtgcagtaaaaagaaccgcatttgctgtcaaaaaccgaaactaggagtcgaaagatgatgaaatataaaaagaatataaataaaaaattaaaataatttagaatttactcttgtaatatggagaaaagaggtatatacttttaatcacattgagtttataaaaaatttataattatttcaagggggtactagttgtgcagaaattaaaagtattaattgcagatgataatccaagaatggcatccatgattcagaatattcttatggatgatgatgagattcaggtcgtgggaacggcagaagatggagtagaaacactgggaatgattgaggaaacggagccggatttgcttttgctggatttgattatgccgaaattagatggtcttggtgtgatggagcggctgcaggaaaagcagaagatgaaaaaggtgccggagattattgtggtgtccggtatttcgcaggaacgaattacggatacggcatttgccttgggagcttcatattacttattaaaaccattcgagtcggaaacacttctttctcatgtacagaaatttaaaccgggtgcgagggcaaaactcattgctacgggaaatgagaaccgaagaaatgaaaaaatggcgaaatataatcttgaatcggatgttaccaatatcattcatgaaatcggggtgccggcacatataaaagggtatcagtatttgcgggatgcaattatgatgtcagttgacgataaagaaatgttaaattctattacaaaaattctctatccttctatagccaaacaacatgggacaacaccaagcagagtagaacgagcaatacgacacgcaattgaagtggcgtggagccgcggaaaagtggatacgattgatgaattattcggatatacggttcataatggaaaaggaaaaccgacaaattcggagtttgtagcgctaattgcagacaagatacgattagaacagaaaatgaaagcctaaaaaaatcttttcaccgctccctttttggtgtataataataccaatatgattttgtgtcaaaaagaaaggggagaaggatattgaagaaagtattatttgttgcttctgaatgtgttccttttataaaaaccggtggattggcagacgttgtcggttcacttccaaagtattttgataagagtaaatatgatgtacgggttatgattccaaaatacactgcgataccggaagagtataaaaaccagatgcattatatcacgcatttttatctggaacttgcatggcgtaagcagtatgttggtgtgtttgaaatggaattaaacggtgttaaattctattttcttgataatgaattttattttagcggcagcaagccttatggagaaatttatcaggatattgaaaaatttgccttttttgataaagcggcgttatcaacactgcctgtgattgatttccgcccggatattattcactgccatgactggcagacggggctgattccggtatatttgcatgatgcattccagcagagcgaattttaccgtggaattcagtcaattatgacgattcataatttgaaatttcagggtgtctgggataaaaagacagttatggatacggcagggctggatgcatactattttacacctgataaattggaagcctttggggatgctaattatctaaagggtggtcttgtttacgcagatcagattacgactgtaagtaatacctatgcagaagagattaagaccccgttttatggagaaaaattagatggcctgattaatgcgaagtcggggtgtttgaccggaattgtgaatggccttgactacgatgagtataatccggcaaaggatccacttatttatgcaaattatgatgcaagaacatttcgcaaagaaaaaattaaaaataagcgcggccttcagaaagaacttggtctttcacaggatgataagaagtttatgattggtattgtgtcgagactgaccgaccaaaagggctttgatttgattgactatgtgatagaagaaatctgtgcagaagatacacagcttgtggtacttggtaccggagaggaaaagtacgaaaatctgttccgtcattttgcttggaaatatccggaccgcgtatcagcgaatatttactattccaatgagcgttcgcacaaaatttatgcagcctgcgatgcctttttgatgccatcactctttgaaccgtgcggattaagccagctgatgagtcttcgatatggcacggttccgattgtaagagagaccggcggactgaaagataccgtagagccttataatgaatatgagagcaaaggaaccggtttctcattcagcaattacaatgcacatgagatgctcaataccatccgctatgcaaaagatgtttattataatagaaagagagagtggaataagattatcgaccgcggtatggcaatggatttttcatggaagaattcagcgaagaaatatgagcagttgtatgacagaatgtaaaaaaatacaaattatttgaatttactcttgaattttattacggaattgggtagaataggttctagaagtttgtatattttttaacaaaccaaaattttaactatttttaggaggaaatatcatgtcagtaaaagtagcgattaacggatttggacgtatcggacgtcttgcattcagacagatgtttggtgcagaaggttatgaagtagtagcaattaacgatttgacaagccctaagatgcttgcacaccttttgaagtatgattcttctcagggtaaatatgagaaagcagatactgtttctgcaagtgatgattccatcacagtagatggtaaagagattaaaatctatgctttcccggatgcaaacaactgcccatggggtgagcttggtgtagacgtagttttggagtgctccggattctatacatccaaagaaaaagcacaggctcatatcaatgcaggtgctagaaaagttgttatctctgctccagcaggaaatgaccttcctactatcgtatataacacaaaccacgagacattgaaagcagatgatacaatcatctccgcagcttcttgtacaacaaactgccttgctcctatggcagatgcattgaacaaatatgctgcaatccagtctggtatcatggttacaatccatgcttacacaggtgaccagatgactcttgatggtcctcagagaaagggtgacctcagaagatctcgtgcagcagcagtaaacatcgttcctaacagcacaggtgctgcaaaagctatcggccttgtaattcctgagttgaatggtaaattgattggttctgctcagcgtgttcctacacctacaggttctacaacaattttgacagctgtagttaaaggaaaagacatcacagtagatggtatcaatgccgctatgaaagcagcaactacagagtccttcggatacaatgaagacgaaatcgtttcttctgatatcgtaggaatgagatatggttctctcttcgatgcaactcagacaatggtttgcaaagttgacgatgacacatacgaagtacaggttgtatcttggtatgataacgagaactcttatacaagccagatggttcgtacaatcaaatacttcagcgagttagcataagtcttgatttaggacaaggtttgaaattgatcccaaaaagggtccggtcggttggaccggaccttttttcatagaaataattaaaatggaggtttgttatgttaaataaaaaatcagtagatgatattaatgtaaaaggtcagcgcgtgttagtacgctgtgactttaatgtaccgcttcaggatggtaaaattacagatgaaaaccgtctggtagcagcacttcctacaattaagaagttgattgccgatggcggtaaaattattctttgctcccaccttggtaagccaaaaggagagccgaaaccggaactttctttggcaccggttgctgttcgcctttctgaacttttgggacaggaagtaaaattcgcagcagatgataacgtagttggtgaaaatgcaaaagctgctgttgctgctatgaaagatggtgatgtagttcttcttgagaatacacgttatcgtgcagaagagacaaagaacgaagataatttctccaaagaacttgcttctttggctgatgttttcgtaaacgacgcatttggtactgctcatagagcacactgttcaaacgtaggtgttaccaaatatgtagatacagctgttgttggttacctgatgcagaaagaaattgatttccttggaaatgcggtaaataatccggagagaccatttgttgcaatcctcggtggtgccaaagtttcttccaagattccggtaattgagaaccttttggataaagtagatactttgattatcggtggtggaatggcatatacatttatggctgctcatggtgagccggttggtaaatctcttttggaagaggattacaaacagtatgcactcgacatggagaaaaaagcagaagaaaaaggtgttaaacttttgattcctgtagataatgtagtggcagatgatttctcaaacgacgcaaactttaaagttgttgagcgcggtggtattccggatgacatggaaggtttggatatcggacctaagacaagtaaattgtttgcagacgcaatcaaaggcgcaaagacagttgtttggaacggaccgatgggatgttttgaaatgccaaactttgcaaaaggaacgattgcagttgctcaggcaatggcagatttgaaagacgctacaacgattatcggtggtggtgatagtgcttctgcttgcaacaaccttggatttggtgacaagatgacacatatttctaccggtggtggtgcttcccttgagttcttggaaggaaaagaacttcctggtgttgcagcagcaaacgacaaataataatataagattttgattctgtggtggtattttatatgccaccacagaaatttttggagaaaaaaacaataattacacatttagtgcaggttgagaagatattttgtataaggagtgatattttatgtcaagaagaagaattatcgcaggaaactggaaaatgaataaaacaccaagtgaggctgttgcacttgtaaacgaattgcttccgttggtgaaaaatgatgatgttgatgttgtattttgtgtaccggcaattgacattgtaccggttgttgaggcggtaaaggaaagtgatgtaaatgttggggcagaaaatctttattttgaagaaagcggtgcttataccggtgaaatttctccgaacatgcttgtagatgccggagttaaatatgtcattatcggacattcggagcgcagagagtattttgcagaaactgacgagacggtaaataaaaaggttttgaaggcatttgaacatgaccttaccccaattatctgctgtggtgagacgttgactcagagaaaacagggtatttacgtagattggattcgtatgcagattaaaattgcattccagaatgtaacggcagatcaggcaaaaaaagcagttattgcttatgagccaatctgggcaatcggaaccggtgagacggcaacagcagaccaggcagaagaagtatgtgcagcaattcgtgcttgtatcggtgagatttatgatgcggctaccgcagatgcaattcgtattcagtacggcggttctatgaatgccaagaatgccgcagaacttttggcaaaaccggatattgacggcggactgattggaggcgcttctttgaaaccggattttggtcagattgtgaatgcataacgcgaatgaactcgggaacttgttaaaaagtgaaataaactattgacaagaaccgtatcagtatgtataatatgtcttgtgtctgtcaaagagatggacacaagataaatgcgcgagtggctcagttggtagagcacaaccttgccaaggttggggccgcgggttcgagtcccgtctcgcgctctaatataaaaaagagtgattccaaaaggaatcgctcttttttacttcgagccctgccgtggctcgaagttcgaggtctcggctgccgcctcggtcgtagcaaaacggtgtccaccggacaccagctacgtctcgcgctttcatattaaaaaagagtgactccaaaaggagccactttttttacttcgagccccgccgtggctcgaagttcgaggtctcggctgtcgcctcggtcgactatactgttagaagtatttcgacaccattttcttcaattgcttttaagtattcttctaatgcatcgtcatcggtaataagaacatctaaagcgttaataggacaaatacttataatagaatctgtgccaattttactggtagggtaaagtccataaactttttttgcagacgcaagaagagtgttatacagacataaatttctggttcgctggatggataatccgaagtcagcaccacttgcttatgtgtaaaaaaacagatgtcaattctcttgaattacggaaactaaaaaatccgccatccgtttatttaacacaaacacaagcggtagcccttgcattttttttcatattttgataaactgtaaaattgagaatagaactaactatattattgtgttttagacgcagaaatgaggcagatatggaattaattagtatacgcgatttgtatcgcaaccaggaaaagtatgtagaacagacggttacggtcggaggatggttaagaagcgtcagagattccaaaacatttggattcttagtggttcatgatggaacatttttcgagccgcttcaggtggtatattcagataaacttgataatttttcagcaatttccaaattgaatgtaggtgcagccgtgattgttacgggaaaagtagtagcaacaccgggaacgaaacagccatttgagattcaggcagatgaggttgttgtagaaggtgagtctgcaccggattatccattgcagaaaaagagacactcctttgagtatcttcgcacgatttcccatcttcgtccgagaacaaatacatttcaggcagtgttccgtgtgcgttctttgattgcgtatgcgattcataaattcttccaggagagagaatttgtttatgtacacacgccattgattaccggaagtgactgtgaaggtgccggtgaaatgttccgtgtgacgacattggatatggaaaaccttccgatgacagaagaaggaaaagtagattacacaaaggatttcttccgcaaagaaactaaccttaccgtaagtggtcagttaaatggtgaaacgtatgcgatggcgtttaaaaacatttatacatttggaccgacattccgtgcggaaaattcaaatacgacacgccatgcggcagaattttggatgattgagccggaaattgcatttgcggatttgaaagatgacatgatgttagctgagagcatgttgaaatatgttatccgctatgtgcttgagaatgcaccggaagagatgaaattcttcaaccagtttgtggacaagggactgattgagcgcctgcggggagttgtggatgcggactttgcacatgttacttataccgaagctatcaaactcttagaagagcacaatgataaatttgaatacaaagtaagctggggatgcgatttgcagaccgagcatgagagatatcttacggaagaaattttcaaacgccctgttttcgtaacggattatccaaaagaaatcaaggcattttatatgaagatgaacgacgataataaaacagttgccgctatggattgtctggttccgggaatcggggagattatcggaggaagccagcgtgaagatgattatgataagctggttgagagaatgaacgaatgtggactggataaaaaagattatgaattttatctggatttgcgtaaatatggtacggcacgccatgccggatttggtctcggatttgagagatgtgttatgtacttgaccggtatgcaaaacatccgtgacgtcattccgttcccacgtactgtaaataattgtgacttataaagattacactaggaggttagtaacatgaatttaataattccacaaggctatcagtcagcgttagatatccgcgagactgaggtagcaattaaaaaagtaaaggatttctttgaaaaggctttggctgccaatttgaatctgacacgagtttcggcaccgctttttgttgacccggattccggattgaatgacaacttaaatggtgtagagcgcccggtttcttttgatattttggagcagaacggaagggtggcagaaattgtacattcattagctaagtggaaacgtcatgcgttgggccgttatggttttgctcatggagagggactttatacagatatgaatgcgattcgccgtgatgaagaaaccgataatgtacattctttgtttgtcgaccagtgggactgggagcgcattatcgacaaagaagaacgtaatgtagatactttgaaagctattgtaaataatgtatatcaggcattgatggaaacagaagattatatggcaatgcagtatgactacattaagaaatccctgcctgagcagattacctttgtgacaacacaggaacttgaggaccgatatccggacaagacgccaaaagagcgtgagtacgaggcagtaaaagaatatggtgccattttcctgatgcagattggagataagttagcttccggagagccgcatgatggacgtgcaccggattatgatgactggtcattaaatggtgatattatcgtttattatccggttcttgatatggcatttgaaatttcttccatgggaatccgtgtggatgaaaaagcattgaaagagcagcttgaaaaagcaggatgcccggagcgcgaaaatcttccgttccagaaagaaattttggaaaagaaacttccgtataccatcggtggtggaatcggacagtcaagaatttgtatgtttttcctgaaaaaagcacatattggagaagtacaagcatcgatttggccggatgatgtgtgggaagaagcatcgaagaaaggacttaatattttataatggataattttaccttttatgcgccgacttattttgattttggtaaaggcgccgaaaagcatgttgctgatttaataaaaaaatttggcggacataaagtgctgcttcactatggaggaggctccatcaaaaagagcggactttatgatactgtgatttccgtattaaaggaaagcggtttggaattttgtgaacttggtggtgtaaaaccaaatccaagaagcggactcgtatacgagggaattgaattgtgcaaaaaagaaaaggttgactttattcttgccgtcggcggtggaagtacgattgattcgtctaaggcaattgctgccggtactttgtataatggagatttcatggatttttatcagggcaaggcatccgttgagaaagcacttccaatcggaacgatattaacgattgcggcagccggcagtgagggttctccaaatacggtaatcaccgatgaaaaaacaatggtgaaaaagggaacaaaaagtgatttgcttcgtccgaagttctctattttgaacccggaacttacctgtaccctgcctccgtatcagtcggcagcgggagcaacggatatcatgattcatgtttgtgagcgttatttttccaacacagaggaagttgagattacagaccgcttgtgtgaagcaattttaaaaacaattgtatatgaggcaccgcgtgtcattgaaaatccaaatcattatgaagcgcgtgcaaacattatgtgggcaggtatgttagcacataataatgtttgcggtgtcggtcgtgtgcaggattgggcaagccaccatattgagcatgaattgtcagctctttatgacgttactcatggcgcaggacttgcagtaattgcaccgctttggatgcgttatgtctgtaagaaaaatccgggtaaacttgctttatttgcaaaccgtatctttgaggtgccgatgaatgagaaacatccggagaaaaccgcactcaaaggaattgaggcgtttgaagcatttttgaaaaaaatcggcatgccgtcttctttcgcagagattggtgcaaaagaagaggatatcgagcttatgaccgataagcttttgaaggggcgtaagaccgaaggaaattatgtgaaattgaatcgtgatgatgtgattgcgatttatcggagtgcattgtaaaaattaaggaggcagatatggaccagagagaatttctacgtcagatggaagagttggtagattttggacgaacgaaagaaaatttgctcaccaaacaagaaattgccgattattgcagtgactggaatttgacagaggaacagatgccatttgtctatgcataccttaaagaacatcggattgaggtagaaggatatcgtgcgccggtagagaaaacggaagaagaggctgtcgaaaaaagcgaaaaggattccaaatatctgcgcttatataaagaagaactgtgtcagttaaagcggtacgaagaagaggaacttgtgcgtttactcgaacagttgcgaagaggcgaggaagaagtaatttcttctgttatcgaagcgcatctgcaccgggtcatgcagttggcggataaataccgcggccgtggtgtgccggtggaagatttgattcaggaaggtaatttggaattaaccgcctgtgttgcgatgctctgtggaaatgaagaagttgtggattatcaaaaagctattgaacatgcagtgagaagccggttgattgaattggtagatgaagaactggcaggaacggacagcgtgcatgcactgcttgggcgtgtgaaccttttgctggaggcaacgaggacattagcacaggaatacggacgtattgcgacaattgaagaactttccgaatttacccatatggatatcgaggaaattaatcagtatgtcgatttgtcccacaatgaaatagaactgggaaaaggtgaaaatgaacgaaaataaagaatttaaactggaggctctcgttgagcctctttgcttatggtatgaaaaggaaaaacgcagtatgccgtggcgggatgatgctacgccgtatcatgtatggctgtcggagattatgctccagcagacaagaatagaagcggcaaaagcatattatgaccggtttacaaagtgtctgccggatattccttctctggcagcagtttcggaggaagaacttctgaaattgtgggaaggacttggatattataaccgcgcacgcaatttaaagaaggcagcttctcttttggtggagcggtatgatggcaggctgccggccgattatgatttgctgctttcactgccgggaatcggcagatatacagcgggggcgattgcatccattgcttacggcttagcagagccggcggtggatggcaatgtgcttcgtgttacgatgcggtatttaaattgcgatgaagatattatgaagatgtcggttcggactaagatggaaaaacaacttcgtgccattatgccaaaggactgtccgggcgaatttaatcaggcactgatggaactcggggaagtaatctgcattccaaatgggaaaccactctgtgaagaatgtccgctttctcatttgtgtcttgcccacaaagaagggcgtgagatggaactgccgaaaaaggcggagaagaaaaagcgccgtatcgagaaaaagacagtccttgtattccggcagggtgaccggattggaattgtaagacgaccaaatcaagggctattagccggtatgtgggaatttccatcaaaagaaggacatttgacgatgcagcaggtgaaagagtatttgtcagaaaccgtatcctgtgaggtgacggtaaaacgattaaagagcggcaagcatattttctcccatgtggagtggcacatgcgcggttatgagattattcttccggaaggaaaaccacaagatgtagtgcatgggcttttgctttgtgacttgtcagaggtccaggaaaaatatccgataccggttgcttttcatattttcttacaccagatttgagtgtggaataacgtaaaataagggctttggatgaatttccggctcttatttttatattccgtaaaaacacatgatatagtgcatactgcaaaaaaaatacaaaagaattacaatatatagtagacaatgcatacctcatttggtataatgattcctgtaggaaaaattatgaacgttagtattggtacggattgaaaggagttgtacaaaaagtgagggtaatcaaaagggatggccgaaccgtagaatatgaccgaaacaaaatattgattgcaatacggaaggcaaatgcagaagtggatacgtttgaaagggttaatgatgacatgattgatggcatcgttgccggtatcgagaatatgaaacgtgatacgatgcaggtggaagatattcaggatatcattgagcagaaattaatggcg

SEQ ID NO: 943 - DNA, 28661 bp, unidentified
  source 1..28661: mol_type = unassigned DNA
atttcaacaatgagataggcctgccactcaccattttcggaatcagggaaagccatcaggtagcggtgcttgagatgggcatatctgattttggcgagatgcacaggctttctactatgtcttgcccggatgttatggtcatcaccaacatcggctactgccatctggagtttttgggcgacagggatggtgtgcttaaagcaaagacagagtgctttgagcatatgatgccggatgcggtcgcagtgctgaatgcagatgacgacaagctggccacagtgcagacggtaaatggaaagcctgccatatactatggcaaggaatcagcatcaggcgttcataaatcagtatataccacaaatattgaaaatctaggctttgacggcatgaaggctcattttgtcactccggagggtgagtttgatgcacacatccacatcccgggtgagcacaatgtatacaatgccatggcggcagcagctgtcggattgcagcttggtctcacaatagctgagataaagtcaggaatcgagaaagcagagacaatcgcaggccgtaccaattttatcaaaacgcacggcatgacagtgatagatgactgctacaatgcaaaccctgtatctatgaaatcctctatcgaggtgctttcgcatgcaaagggcaggacaatagcagtgcttggagacatgggcgagcttggaagcgatgagaaaaagctgcaccatgaggtaggcgaagcagttggagagaatcatatccatacactttttgccgcaggagagcttgcaaaggaatatgcagccggagccgcggagaaatcatccgatgtagacatccactatttcgaggatagggagactatgacacaggagcttctttcatatgtgaaggagggcgacaccatactggtgaaggcatcacacttcatggagtttccgaaggtagtcgaggctctgagtgagtaaaatcaggtaagatcaatcgggtagaaattaatttgatatttaataattgcgaggaatggatattctccaagcctcataatattataaaagaaagagagaaaaataatggcacagaatccaatcgtaacaatcacaatggaaaacggcgatgtgatcaaggcggagctttatccggaaatcgcaccaaacacagtaaacaactttatcagcttaatcaatcacaacttctatgacggagtatgcttccaccgtgtaatcaagggcttcatgctccagggcggagatccggacggaaacggtacaggcggcccgggctatgaaatcaagggcgagttcacacacaacggcttcaaaaatgatttaaagcacacagccggtgtactttcaatggcacgtaccatgatacctgattcagcaggcagccagttcttcatcatgcatcaggatgcaccacatctcgacggcgagtatgcggcatttggcaaggtaatcgagggcatggatgtggtaaacaagatcgcagaggtacgcacagactacatggacaaaccacttgaggctcaggtcatgaagacagttacagttgagaccttcggagtggactatccggagccggagacagtttaatgataataattatcgatgaggcaagcgcaaaacttgcctctttttactatcatggcgagatattcaagctgcagtggagaagtgtggcaggcaaggcatctatgtcagaagagctgcaagaaaaactgtatggtgcactaccgggaaagttgctggatgagttgcagaagaaactgctagatgagctgcaagatgaatttcaggaaaaactgcaagaaaaactacctgatgagctgcgggaaaaactgtatgttgcgctcttagcagctgaatcaattaatgacttcacaaaaacaacgatacaagaatatgcagataacaccgcgaaagctaatacgggaaatctaataataccgaaagctcccgcagactgcatctggatagtctcaaaccggaagcagaagcaaatagctgactcactcggcatagcatcagtaggagaaccgcagtgcggcacgcgctatgcagtcgagagccttgcagagcttgatattgagtatctggagcgagtgcgcaggcggtataatcacatcccgtgggacatcggcgagacagacaggtgtctgatacgtgagctgtccctgtcagaccttcctgcgctctatgagctctatgacaagcccggtatgacagactttgtggaaccgctttacgactacgagacagagcttgaataccagaaagcatacatagagaacatgtatggcttttacgagtatggcatgtggcttgtattttccagggaaacaggtaagctgataggacgggcagggcttgagcacgatgaaatgggttatatgatagcaccggaatttcagaaccaaggctatgccacggaggtgtgccgcttcataatagactacgcgcgcgaaaacacagactttgaagagctttactgccggatagatgagagaaatgaagcatcggttcgccttgccaaaaagcttggatttacaaatagcgggcatatggatgatgatatacatgcctctatatatagaaaaaatataaaaaacataaaaaacaatgaaaaacattgaaaaatatgcaattaggcaataaaatataaacatagtttaacgatttggaggacgaaaaaatgaaacaatacgcatatggagtagatataggtggaacaactgtaaagataggcttttttgagaccacaggaaagcttgtcgatacatgggagattcctacacgcacagagaattcaggcgagctcatcctgcctgatatcgcagcatccatcaaggaaaataacgagaagcacggcatcgagatgggtgacatcgagggcgtaggcatgggagtgccgggacctataaaggatgacggaacagtattgaagtgtgtcaacctcggctggggcgtgttcaacgtggcacagtcactctcagtgctgtgcggcggcatcaaggtaaaggccggaaacgatgccaacgtagctgcactcggtgagatgtggcagggtggcggaaagggtcatcaggatgtagtcatgatcacactcggcacaggcgtaggcggaggaatcatccgcgagggcagaatcgtagccggagtaaacggagcaggcggagagataggacatatgcctatggtagatgatgagtcagagtgctgtggctgcggcaagaagggctgcttagagcagtatgcatcagcaaacggtctcgtaagagtggcagagagatacattgcagcacacagggatgtggcaacaaagcttgatttaaatgcaggcttcacagccaaggatgtatgcgatgcggcaaaggcaggagatgcagcgggcattgcggcagtagagcagtctatgaagcttctcggcaaggcaatggcagcagtagcatgcgttatggaccctgaggtatttgttgtaggcggaggcctttcaaaggcaggcagcatcatcatcgatacagcagcaaagtactataaagagtatgctttccatgcaagccgtgagacagagataaagcttgccacactcggcaactcagccggcatgtatggcggagtaaagatggttatcggctaacaacataagattgcaatttttaaagaaataaaatataatggctactaaagatacactacaatcgaggtgagactattggcagattactcaacagaagaattagaaaaaatagcggacaaatttcgctcagataccagcggtataaggggaacaaaggattttacgagcccagaggagctttacgatgagcttaaaaaggaaatcaaaaagtatcatccgtcggatgacacgagccttgtggacaaagcctacagggtagcttatgatgctcataagggtcaggcgcgtaagtcaggagagccttatatcatacatccgctttgtgttgccataatactcgccgagctcgagctggataaggaaaccattgcagcaggactgctccatgatgtgctggaagacaccatcatgaccatggatgagatgcgtgcagagtttggagacgatgtcgcacatctggtggatggtgtcacgaagttaaagcacctgcacctgacagacagcaccaaggatccgaaggacaagaatgcggacaggcttgagatgcaggctgagaatctgcgcaagatgtttctcgccatggcaaaggatatcagggtcatcctcataaagctggcagacagactgcacaatatgcgtacactcaagtaccagtcaaaggaggcacagcagcgtatcgccagagagacacaggatatctactgtcctatcgcgcagcgacttggtatcagcaagataaagatagagctcgaggacctttgtatgaagtacctctatccggatgcctactacgatctggtagagaaggtagccctcagaaaggcagagcgcgacacttacatccagggcctggtaaacgatgtcaagaagtatgttacagatgccggcatcaaggctgagatatacggcagggcaaagcatttcttcagtatatataagaagatggtcaatcaggacaagacgatagaccagatatatgacctctttgccatcagaattctggtggatactataccggactgctacgcagtgcttggtatcatacatgagaagtataagcctataccgggccgtttcaaggactatatcgccatgccgaagcagaacatgtaccagtcgcttcacacgacactcataggtccgagcggacagccgtttgagatacagatacgtacctatgagatgcatcgtacagctgagtacggtatcgcagcgcactggaagtataaggaagcaaacaacggtaatgccactaccaccactgtcacagaggaggagaagctcagctggctgcgccagatactcgagtggcagcaggatatgtcggataataaggagtttatgactttattaaagagtgatttaaatttattctccgacaatgtatttgcattcacaccgtccggcgatgtaaagaacctgccaaagggctccacacctatagactttgcctacagcatacactctgcggtcggcaacaagatggtcggtgccaaggtaaatggtaagctggtgccgatagactatgtcatcaaaaacggtgaccagatagagataatcacctcacagaactccaagggaccaagccgtgactggctcaaggtcgtaaagagcacacaggccaagaacaagatcaaccagtggttcagaagtgagctcaaggaggagaatatacagcacggcaaggatttgatagcagcctatgccaaggcaaagggtatcaactttgctgagataaacaagcctgagtatcaggaaaaaatacgtcgcaaatacggcttccacgactggaactcatgccttgcaactgtcggccacggcggactcaaggagagccagatagtcaacagaatgtacgacgagtacaagaaggatcatgtggtgccggtgacagatgcagatgtgcttggcagcatcgcagaaaagcagcaggcggcagcaggcacacagccggagcacaagtcaaagagcggcattgtggtacacggactctatgacgtggctgtgcacttctcgaagtgctgcaatcctgttccgggagatgaaatcgtgggctttgttacaagaggccgaggcatctccatccacaggacagactgcgtgaatatcatcaatctgtcaaagatagaaaaggacaggctcatagaagcagagtggcaggatacagccctcatggacaacggtgccgagtatcaggcagacctaaagatattctgtcatgacaggccgggactgctcgtagatatcacaaagatatttaccgagaaggaaatcaatatcagtggtatccagtccaagaccagtaagcagggcatcgctacaatcgaggtatttttcaatatcagaggcagggaccagataaaggttctcgtggagaagctcagacagatagaaagtgtaatagacgtagagaggaccaccggctaaatcccggtggttcttgcgtgaagcataacatataacagacaaggagtacactcatatggtaaatatgaagatagaccacttcgtagtgggaccggtgcagaccaactgctattttgtcaccaatataaagacaaaggaaatgataataatagacccgggcgcgtgtgctaaacaactcgccaaaaaagtggacgaatcaggcgcaaagccagtagcaatactactcacacacggacactttgaccatgccactgatgcaaagccgctcgcagaccgctacggcattaagatatatatccatgaggcagacaaagccacactcgatgacccgcagctcaatgtcagctacatgatgggccagtcaaagaccttttatgcagatgtatttttgaaggataagcaggaaattgatattgcgggctttcacatagtagtgcttcacacaccggggcatacaccgggcggttgctgctattatttcccgtatgaggacgtgatctttacaggcgattcactgttttgcggctcaatcggacgtacggatttcaagggcggcagcatgtcagacctcgtgcgcacagtgaaggaaaaaatcatgacactgcctgagcatacagaggtgtacccgggccacaacgacacaacaaccatagaaaacgagaggatgtataacccttacttatgatagtagtagtatttaataaaccggattttgaatatgatgtacactcactgctcaaggagttcttcccacaggaggatgtgcagatgtactatagctgctcacctgatgaggtggagggaaaaaacctggcctgcacacaccacgagatgacagacgatggcataaaagaatttgcggatgcctcacaggtatttaagatagactatgtgggtgatgagattgtggtggagtggacggcaaataaggttagcgaaagtatcagcacaaaaatatccgtgaccggcacaggacgcaaggaaaccaaaaaccgccttaagctcgccctgtattccatgatagaaaagggcacaggaaagagccttccgtggggcacactctcaggtatcagaccgaccaagatagccatgaagtgcatagaggacggcatgagcgataaggaaacctacgactatctgaaggaaacctacctcgcaagcgatgagaaaatcgacctctcaataggcatagcaaagcgcgagaaggcactgctcgatagggtggattatgacaacggctacagcctgtacataggcatacctttctgcccgagcacctgtgcgtactgctcgtttacgtcatacccgcttggtgtgtggaaaaatcgcgtggacgattaccttgacgcactcgagaaggagatagactacacggcgcagaaattctatcacaagaagctaaactccatctacataggaggtggcacaccgaccacactaagccctgcgcagcttgacaggcttatcagaaaaattaaatgcagctttgatttaaaggactgcctggaatttaccgtggaggcaggcagaccggactccatcacgagagaaaagcttatggcactaaagaaaaacggcatcagccgtatatctgtcaatccacagaccatgaagcagcagacactcgatataataggaagacaccatacggtagacgatacgatacagagcttcaagcttgcgcgtgagctgggatttgacaacataaatatggacctcattatgggacttcccgaggaaacacttgatgatgtaaggcacacgatggagctcgtaaaggagctggcgcctgacaatgtcaccatccactcgctcgcagtaaagcgcgctgcaaggcttacaatcttcaaggaccgctatcaggatatgcagatggtcaacactcaggagcatatggacctctgcgcaacctactgcaagcagatggggcttgagccatactacctctacaggcagaagggcatggcaggcaacatggaaaacgtgggctatgcggcaaagggcaaggccggcgtatacaacatactgattatggaggaaaagcagaccatcgtggcgtgcggagccggagcaagcaccaagcgcgtctggcctataccaaatccggatggcacacaccgcattgacagatgcgagaatgtcaaggatgtagggcagtatatcgcaaggattgatgagatgatagagaggaagcagaggctgtttgaggaaaaataagcagtatggcatataataatgtataataatgcgcgctacaataccatagcgattagcgaatgtgtcgaaaattgtaaagaaaacctaatattcattgacaaagaataaaaaaaaggtgaaaatatattattgaaaaaccctgattagatacagaaaaagatacaaataaccgaataaaacatacaaaaaacaaaacaggctaaaaatattcgggggggggtacaaaggtacctcccctagaacaggtataaaggaaaataaaagataccacaaggagaatttggaaagaatgtacagaaagaaaggcagaggatggacaaagcatatagattttatgcttatagacatcgcatgcattgttattgcgttttttatttcatatgtgatacgcttcggctttaataacccatatgtggacaaggactaccgtatactgggggtagcatttcttctgatagatttctttgtggagataatggcagattcattcaagaacgtcctaaaacgcggatatctggatgaatttatatcgacctgtaagcatgcaatgcttgtttttctggtgacagcactatttctgttcaccacgcagatggctgatatatactcgcgattatcattttatatcatgtttccgatctatgtgacaataacatatgtagcaagactggcgctcaagagcattcttaagaaaaagggctttggagcatcaagaaaatcactgtttgtcatagcacctgatgctatgcttcgtgatacactgcgtacggtggagaaaagctgtataggctatacaaaggtagtagcagcatcattggactcagaccaaaagggcaagactatatgcaacataccgatagttgcaaatcacgatggcatagtggactatgcgtgtgacgagtgggtggatgaggtgctcatcccaccgtgcagcgaggatgaatatcctgagaagatggcagatatattcctggagatgggaatagcggtgcatacaggaatagcaaaaaacggtacagctcagggtggctacaagcagatagaaaagataggcgactacacagtagttacatccagcgtgaactatgcaaatactagtgcgcttttggtaaagagggggatggatatagtcggaggattggtgggctgcctgttcacacttatcataatgatatttgtgggaccggcaatatacatagcatcgccgggaccgatattcttctcgcaggagagagtcggcaggaacggcagaaagttcaagatgtataaattccgcagcatgtatatggatgccgaggagcgaaagaaagagcttgcggcacagaataaagtgggcgacggaatgatgtttaagatggacttcgacccgagaatcataggcaataaggtgttgccaaacggaaagaagaaaaccggaattggacagttcatcaggaaaacaagcctggatgaattcccacaatttttcaatatactaaaaggagacatgagcctggtggggacaagaccaccgacacttgatgagtgggagaagtatgagccacaccacagagcaagaatgtcattcaggccgggactgaccggactgtggcaggtgagtggaaggagtaatatcacggacttgaggaagtggtgaagctggatactcagtatattggggagtggagtgttaagggggatattaaaattatttggcagactgctgtgggagtattaagaaatgatggagcaatgtaaggaaaagcttagtattgcaatgtttggacaaaaaaggattccttcaagagaaggtggagttgagatagttgttgaggaactttgcacaaggatggttgcccaagggcataatgtgacctgctacaacagaggtggtcatcatgtgagtggttcggagtatgattcaaaacgacttaaagaatataaaggaataaagcttaagacagttccaacaatagaaaagaaaggtcttgcggctgtttcatcttcattttttgcagcattatgctgtgcttttggcaaatatgatgtggtacatattcatgctgagggacctgcatttttctgttggttaccaaagctctttcacaagcgtgtgatagtcacagttcacggcatcgactggcaacgcgaaaaatggaaatctggcttcggctcaaaattcatacataaaggcgaaaagaatgccgtaaagtatgctgatgaaattattgtacttagtaaaggtgttcaggattattttgaaaaaatatatggcagaaaaactgtgtttattccaaatggcgtaagtaatcatatagaaagaaaaccacagattattaaaaataaatttggattagataaagatgaatatattttgttccttggacgattagttccggaaaaaggaatcaaatatttaatagaagcatttaaacaggttgatacagaaaaaaaattggttattgccggtggcagttcggatacaagtgaatttgaaaatgaaatgaaagaacttgctaaagaagataaacgaattatatttacaggatttgttcaagggcaagaattagaggagttgtatagcaatgcatatgtgtatgcactcccatctgacttagagggaatgccgttaagcctgttagaagcaatgagctacggcaactgctgtctggtttctgatattccggagtgtgcagaggttgtggaagataaagctctgattttcaaaaaggctgatgtaaaggatctacaatcgaagttgcaggacgcctgtgaccattctgaaaaggtggatgcacacaaaaagcaggcggctgattttatttgtagtaaatataattgggatgagattgtgcaagcaacattgaaattatataggagaaagaaataaatgagaattttaatgataaataaatttttatatccgaatggcggatcggagacgtacatatttaagctgggtgaggcattggagcagcacggacatgaggttcagtacttcggtatggagcacgaaggccgctgcgtgggcaaccgggtcaatgcttatacatctgatatggacttccacggcggcagcaaactgagcaagctgacttacccgatcaagaccatctacagcaaggaagcaagagaaaaattaagactagtactagacgacttcaagccggatgtctgtcacctgaacaattttaactaccagctgacaccttccatcattctggaaatcgtgaagtggcgtaaggagaccggaagggattgtaagatcatcttcacggcacatgactaccagttggtctgcccgaaccatcaattaaagaaccctatcacacatgagaactgtgagaagtgcctcggcggtcatttcatgaattgtgtaaagggaaaatgtgttcacggttctactgcaaaatctatcgttggcatgatggaggcggagttctggaagtggaagggtacctacaagtacattgacaagattatttgctgctcggaattcttgaaaaccaagatggacacgaatccgttgtttgcaactaagacaatcgcaatgcacaactttgtggagaaggtagagcctaaagaggttgaaaagaaagagtacgtcctttacttcggccgcttctctgaggagaagggaatcaacacacttgttgagacctgcaatctgttgccagatattcagtttatttttgctggttctggcccattggaagacaaggtcaatcagctgaaaaatgttaagaatgttggtttccagactggcgatgcattggacaaactgattcgagaagcaaagttctctatctgtccttcggaagtctatgaaaactgtccgttctccgttatggagagtcagcagcgcggcacgcctgtcatcggcgcaaatattggtggtattcctgagttgatcacagatggtgtggatggacggttgttcacaagccgagattccaagcagctggcctcgattatcagggaactttggaacaatccggaagagacggataactatgcaaaggcgtgtctgaaccttgaacgagacgaccttgaggcttactgcgacaaactcgtcccgatttatctgggggggggtaaccctttgtaagtatcagcgaatggactatgcgctgtactttggccgcttctccgaggagaaaggcattggcacactcatcaaggtctgcaaggagttgccggatgtgcagttcatctttgccggtactggaccgctggaagataccatcaatggtgtaagcaacatcaagaatgtagaattccagaggggtgaggcactggaaaaactcatccgtgaggcacggttctctatctatccgtctgagtggtatgagaactgtccgttctccgtgatggaatcccagatgtacggcacgccggtgctaggcgctgagataggtggtatcccggaactgattcaggtcggtaaaactggtgaactgtttgagagcggcaatgccgaagacctgaaaaggaaggtccagaagctctggggtgataagaagctgtgtgagcagtatagcaagaactgcaaagacatcagcttcgatacaatcgatgagtattacgagaaaattatgaaggtttatagaggtgaagcatgatttatgttttatatgataaacccaagaaattggaagatatgtcgtttttgactgcggcatttgaaaaagagtacaaggaaatttatcctgaatggcgctgcacttctatcaagcaaatgctctcagtgtgcagtacaaccgtaaaacgtacaaaatcaggtgacaccattgtatgctggtatgactttatgggagtgttgtgttggtggttgagtaaactgaccaacaagaaaattaaagttatagcaatcaatattttgttgaaagataaaaatacaacgaaaaacaaggtggcaaagtatctttataaaaaggcgttgtgttcaaattcttttgcggcaacagttacgactgtggagtacggccgctatattaatgagattttgaatacaaaagtgaattttacgcttttgcatgatgtctatcatcaaaattatactttgaataagcgagtagaaaccaaggtaaatacggttttttgtggtggtagaaatggccgggattggaaactgctatttgaagttgcgaaaaagcttccaaaggtgacgtttaattgtgttatgccgagtgctctgaaagaacagttcttaggcgctatgggggataatgtctgcgttaaaacggatatcccggaaagcgaatttatggagtttttgtgcgagtcacaacttattgccatgccactggatacagaagcaccggcaggattgaccgtctattttcaggcggctgcaaataataaaatgattataacatccgatacggttacgacagaaggatatttgtcagatggatgcggagccttatgtaagaataccgtagaggactgggtggacaaaattcagtattatcttctgcatacaaacgatgcagatatctgtgcagcaaagtttaaggatttccttgagaatgagtgctctgaggaaaagtataccgaaacactgtgggggatgcttgcggaatgaaagaaaggtatgaaggagtagatggcttgaaggcgtatgccattatcggcattgcgctgatgcacatcctcacaaatggagaatatgggataggaggatttgtgtttgagcagcttattccgtctttcacaaacctcgttttcctttttatgatggtcagtggctttggtatgtgctgtggctattaccagaaattcaaggatcagaaaatcagtgtgggagagttctacgccaaaagatacagtaaaatttggccgtacttcgcattgctttgtgcgttggactttgtaatgtcacccagtaaaagtgcattgtatgaggtctttgcaaacctgacactctgccagggacttttgccgaatatgagcatatcggttatcggtgtgagttggactttggcagtgatttttgtgttttatctgctgtttccattcttttgcttcctgctggaaaacaagaaacgtgcatggttggcatttagctgcgccgtaatatataacttcgtatgcagtacatatttctttgatgaaagccacattgcagatggagcagccgtaaatttcagtgcaaggacaaacattctgtactgtgcagtatattttatcgctggaggcatgacttttctctatcgaaaagaactggccgagttcgcatcgaagtacaaaatcatcgccggagcggtcctgctgattaccacggttgcgtattttgcgttaggcggttctacactcacgatgctgttcttctgtgtggcagcactggtctataccctcggatgcaagcgggggggggtactggtcaatccagttgccaagttcctcggtggtatcagcttcgagatttatctgtgccacatggtaatttatcgtgtgcttgagaagttacacctcattcatctatttgaaaatggtctgctggcatatattttcacagctgttgcagtcatctgcggctcggttgtgttctcggtatgtgccaagtggttcttaaataaagtcgaaacattcttaaaagagagagttaggagagttaatcatgtctgaagaaaagaagttaaatggtacggtcatcgttacttatcgttgtaacgctcgttgctctatgtgcaaccgttataaggcaccttccaagccggaagaggaaatcagcatcgaaaccatcaagaagctgccgaagatgtactttaccaatatcaccggcggcgagccgttcatccgtactgatctgaaggatatcgtgcgtgaactgtacaagaagtccgaccgtatcgttatttccacgaatggtttcttcaccgaccgtatcgttgacctgtgcaaggagttcccgcagatcggtattcgtatctctatcgagggtctggaacagaccaataacgagatccgtggtctgcagaacggctaccagcgtggttacggcacactgaaaaagctgcgtgagatgggcatgaaggatgtcggcttcggtatgactgttcaggacaagaacgctcctgacctggttccgctgtacaagatttccaacgagatgggtatggagttcgccacggcttctctgcataacagcttctactttgttgaggcaaaaaatatcatccatgaccgtccgatggtcgcaaagaatttcgagaatctggtcaacgaactgctccgcagcaacagcccgaaaaaatggttccgtgcctactttaaccacggtctgatcaactacatttacggtcagaagcgtctgctgccttgcgacatgagttttgataccttcttcatcgacccgtatggcgatgttatgccttgtaatggtaccaaggataaagaagtcatgggcaacctgaatacccagagctgggacgaactgtggaacagtccgcaggctgaggaagtccgcaagaaggttcgttgctgcgaccgtgactgctggatgattggctctgtcagccctgctatgcataagtacatctggaaacctgctacctgggttctggttcacaagttcaaggctctcttcaccaagcatccgtacagcatgtatgagctgaagatttgccgtgattatcgtgatggtaaagttactaaagaggatctggataagtgcagcacttgcgatatgaactgtgtgatcaacaacggtctgagtgaagcatctaaggaacagctgaagcataagaccggcgaggaaatcgtggatgctgatatcgcagcacagcagatggagacgaagtaatgagtgaaaagacagcggtaaaaacaagagaaaaatgggtcgatgatgtaaaagttattgcctgtatattggttgtattgggccacttcttccaaagtatgacgaaggcgaatattctgcctgaaaatgatttgtaccagtggtttaacacaacaatttactacttccatgtaccgctgttctttatttgtagcggatacctatatcagaagtacagcaatgtaaatagcgtgagtagttggtgcaagaatgtggcgaaaaaaggcattgcactcggcgtaccctatgccacttttacaactgctacatgggtgctgaaaaagttattctcaagcagtgttaacgaccagattggaggtctgggtgatacattatttcttcacccgacttcaccgtactggtatttgtatgcactattctttatctttctcgttacaccgacttttagcagtgtgaaaacagcttcggtagggttgattgttgcattggcagcaaaagttctgattttaactggggggggtacgccgtttacgcagtatcgacagttctctcaaacgaaatctggtttgtaatcggcatgagcatttgtgcgtttaatgtgcagctgaagggcggaaaagtacaaggaacgatatgcggattgctgttcataattctgagtattttggtgtatacggtggaaattagcgggagtgtgatttctttcacaatgggattgttggcttgtgtagctgttatcctgatggttgcagatttagagggaaagttcggtagagttatggactttcttgcaaaatacacaatgccgatttttctgatgcatacattgtttgccgcaccgctgcgatctgttctactgaaggttggcgttacgaatgctgtggcacatgtggtgctgggacttggaattagcattgcaggtccgattatagctgcatggattatgaagaaaacaaagtggatggagtttttcttgtacccgaataaattaattagaaaggtatcttaaggatgagacttaaaggtaaagccaaggaaatccttggattgatgcgagcaaaaatctttggcataaccgctgggcagagcgtttatattggtaagcattgcagcctaaaaggaaaacaccatattaccttggaagattgtgtgacggtacgtccatatgcccaaatctggtcggggggggtacagtgagaattggaaaaggctccgaaattggtgaacgatgccgaatctctattgctaattctttggaaattggagaaaaagtactcctttctccaaacgtgtacataaccgattgtgatcatgagtaccgtgacgtagatgttccagtgattgatcaaggaattgtacaaagaggacagaaagtatccattggagaaggttcttacattggaatcaatgcagtgattgtaggcaatgtgaggattggcagacattgcgtggttggagccaattcggtggttactaaagacgtaccagattattgtgtggcagttgggagtccggcaaaagtgattaagaacatgaagaattgatgtagtgaggaatatataaatgaaagcaggattagtaagcattgtcttaccaatatacaatgtggaaaagtatcttgatagatgcattgagagcgttataaatcagacatacagaaacctagaaatccttcttgtagatgatgggtcaccggatgattgccctcaaaaatgcgaagagtgggctaagaaagatggccgaataaaagttatccataaggctaatgcaggacttggatatgcccgtaatacgggaatagaaaatgcttctggagaatacatttgcttttttgatagcgacgattatattgatccaagtacaatagaaaaggcatataataccgcacagaaaaacaatagtgatatggttttgttcggccactacgatgttgatgtacaaggaaaaatcgtcagaacgtatatacctacaacagacaaagaaagctatgtgggctctgaggttcaagaggtgcttttacctgatttggtttctgataatcctgcaacagggaagagtacgaatttatggctaagcgcatgttgttgtatgtactctatgaagttgatattagaaagcaactggagatttgcttcggaacgggacattatatctgaggatgtatattcattgttgcgattgtatagaaatgtaaaaaaagtcactataattccagaggcattctattactattgtgagaatagtacgtcattgacacatacgtataaggcagatcgattcgatagaataaagagattctacaatgcctgcatagatgcgtgcgatgaactaaattatattgatgaggtaaaaaagcgcttttcggatccatttatttcgaatacaattgctgcaatgaaaatgattattcaagcggatatgagtaatgataaaaagaaattggcgttcaaagctatatgtaaggatgaacaacttcatagaataataaatagcgtggaagtcaaaaaagagaaatttacacgaagattgttgatttggtttttaaaggcccgattatatagtgtttgcgaactgttggttagattaaaagcatagaggggtttaagcgtaaatgaaaagtagattaacagttaaaaaaacacatttgctatgtgccataacgcttttacttaccctattttctggacaaagttcaaaattgtttggaatatcaggtggagcagcatatcaattgttgtattactctaaatatatatcagctttgtttctagtggcgtatgcattatcacgcccaagaaaggtttccgattatgaagtaaaaagacttctgacaattcttttgcctcttgtagtgttgatgatagtggtagaatgctttgctgtatttacaagtcctgtgccggcaatgtatggcataagatattggactagatctttagcagtgttcttggatcgattttgcatttatgcagttgttattggaatatgggaactgtgtggagatgaagcgatagagtgtattacaaatacttttatcgtggatgaaattcttatttttataagtgctatttttcatgtaggagttgctggaatcgttgagagctttttaggcgcttttgcatttagtgagggtgcatcaaattattttgaagttcatgaactgacttttgccataggactgtgcattatatattatttgttttttgccgagagaaaaaaacataacacagggaaattagtctttcttgttatttcattcattttgggatcaaaaagaataggtatggccggcattgcggcggcgggattgttttccttgtttgtacacaaaaaggggctgtctcgtcgtaaattgattacaattggaatagttggtgttttggtctgctatggatatttgtttatagtatataataatgaattctttgcaatactgaatgaacatggcatcaacaatatgggacgagatttgatttatgcatattttgtccgaagaactaaactctcaccaacacaaatgggatggggaatggcaggcgttgcaaaagttgtggaaaatatggatagaagcgaagttatgtatatggcagcggtgcgaggcgttcataatgacatccttaaaatatatatcaattttggatttgttggttctttgatttggtatgctcttaatttgatctattttccggttaaatttatgaatgaatatgggaaaaaagccgctacaatatatatggcgttgattctatatctgtttattacctatttaacagataatacagaaagttactttgtttgccaagtggctttgttattgataccgataaccgaatatttgaaagaaaaaaataggagtgtctattgtgaaaattaaggaagcaataaaaaaactaatttaccctaataagtactgttctgaggcttatgttaacttccttcgtcgagggggggcaaagataggagaaggaacaatcttctataatccaatgaatactgttgttgatgaaactagccttccatttattgaaattggaaagaattgtagaattacagcagaagttattatcttagcacatgactatagttatgcagttttacgtccggaatatcattgtatgccaagaaaggctggagttacaaaagtcggtgataatgtttttgttgggatgaagtccattattttgatgggaagtcaaattggaaataatgttattatcggggcaggtgctgttgtatcaggaaatattcctgacaatgtagttgttgcaggaaatccagctaaagttgtttgtacgttggatgattattatgaacgtcagataaaacgacttgatagttatgcgaaaatatattataagcggaccaagtcatatttgcaaagagaactaacggaaaatgatatgaattggtataaccagctatggaaatttgaaggaaaggatcaaatctatgctggaatcaaagtggatggagataacatttcagaaattatcagcgatttaaagaatgttaagcctatttatgaaagctttgatgattttaagaggagcatagatacttaaaggaacttcgatggagaataaattcaaatacttatttaaaaatattggcgttttgatgatagcaaacttttcgtcaaaaatactggtatttttacttgtacctttatatacaagcgttctttctactactgaatacggttcgtatgatttagcagtttcaacggctacacttcttttcccaatcttaactttaaatatcgttgatgcggtaatgcggttctctatggattgtgcagtcaataaaaaaacgattgcaacaataggaatgaagtttatttctattagtgcgattctttttggaatatgtatgtggctattgaagcgtataaatctattgcccgggatcagtggcctagaaatatacatattcttatattatgcctcctatgccgttaaccaactcttaattcaattttcaaaagggttggaacgtgttaaagacatgggaatagcaggggtagttgggacttttgtgacaataataaccaatattctattcttattggttttaaagtggggattaattggattctttttctcaagtattctggctcagatgatttcggctatttatttagcaattcgtattaaagtgtgggagtacattgatgtaacagaaattgataaaaaaactcaacatgagatgctaatgtactcggttcctttgattgcaactgctgttggatggtggattaatagcgcagctgataaatatgtagttgcctttatgttaggagtggcctcaaatggactgctgtccgtgtcatataaaattccacagattataaatactctacaaggaatatttacacaggcatggcagatatctgcggttaaggaatatggcgaagaggatacctcgaaattttatggaaatacattctcatctattaatttgctaatgtgtgcagcatgttcatttttgattattctgtcaaaaccattggctcatatattatacgcaaaagaattttatgttgcctggcagtacgttccttttctactgctaagttctgtgcttaattgtgcttctggtttgttaggaccgatattggcagcaaagaaagattcaaaagcgatgatgtggtccgctataatcggtgctgccacaaatattgtaatgaacatcattttggtttatttgatggggattcaaggagctacaattgcaacagtgatttgctcgtatattatatatgcggtaagaaaaagggctgtaggtaaagatatttggattaaagattattttataattatagtaacgtggctgctattatttgttcaggcgtttgtggaaagctatttgtctattgtccctattgaaattgcaataatggcaatcctgattgttattaatgtaaaagagttaaaaagaattttctttaaaataaagcatgtgtttattcactaagggggagttagttatgaggaaactaaaacagatatggcataaaataaaagcgattccatttattggcgacaactatgaaaaattggttggacaaaaaaagatagaaagaaaaatgcagcatcaacaggaagaaatacaaaataatggtgttaagtatttgaacttagttgaaaacacaatgaacacgtctggtggactgtactatgcatacgctgggacattacttggaattgtaagagataaaaaactcatcaaatgggatttagatattgattttgcagtggtcattacagaagatttctcatggagtgatttacaaaaggtaatggcaaagtcaggttttagaaaaataagagaattcgtatttgaaggtcttgttactgagcagacttatcaagtagataagctgacaatagatttctttggtcagttctatgatggaaataagatgatccagtattcgtatgataaattggatggagttaagtattcttcaaattcagagtatagtgtttatcttgtaacacttccgagggtagataaaacaaagtatattgaggccgatggagtaaaagtatctgttccttataatgctgaagaaatattagcatctatctataatgatgattggagaattcctaatccgaactggaaatccaacagtggaaaatgcagtactttactaaaggataaaattgcgtatcaagttgtagaataatcgcatttgtgctacgcatattgtagtggaatatataatgtttctggtatgaggaggagttttaaatgtcaactattgctatattaactgctggtggaacaggaactagaacgcatcaagacttgcctaaacagttcttgacggtggagaacaagccaatcattatttatacgcttgaagcgtttcaacagcatcctagtattgatgaaatctatgtgtcctgcttggaaggatggagtgcggtgcttgaagcctatgcaaagcaatttaatattacaaagctaaaaaggattgttactggcggtgcgacgggacaagagtcaatttataatggcttaaaggcaataaaagaagacaatacatcgacaaaagatattgttgttgttgtacatgacggaaacaggccgatgcttccacaagatgtaataacggataacttagtaaaacagaaacgttatggatctgctgttacggttattccgacaacagaggttgtatttgtgtctaaggatggcattgagtctaatgctgcacttaatagagatgagttatggagaacacaaacacctcattcgtataggtttgatgaattatgggaagttcataataaagcaattgtggatggagtaaccaatatggctgcatcatgctctttgatgcaaaagtatggctacacaacatatttctcaaaagggtcggaaaaaaatataaaaataactacgattgaagatattgagatttttaaagcattgctaaatgcaaaaaacgatgactggattaaaaaataaggcaaatgatgagattattagattctaagaagtatatttatgatttaaaaaaagcagtagacagaaataatttaagtatgttacatggtaaaacattttttgttacaggtggattagggctaatttgttctacagtaatagatgtccttttaacctgtggtaaaacaggtaaaatatatgttggagcaagaaacatcgagcaatttaaagatagatttggaaacttggataatgttgactatgttgcttatgatgcattacaaaaaccaaatttggaaatagccccagattatattatctgtggggctggattggctagccccgagctgtatacgcaaaaaccagttgaaactattttatctaattttgatggattgcataatttgctggaatttgcaaaacagaacagtgtagagagattactctatatatcttcgagtgaagtttatggtaaaaaggatacaagcgagtcttttatagaaggagtgtacggaaaggtagatattgataacatcaggtcttcttacccaatagcgaaaagggcatctgagttactatgtaaggcttactgtactgaatataatgtgaactccgtgattgctagacctggtcatatttacggtccttctgccaaaagaaatgataagcgaatttcttcggattttgcatataaagcagcaaatggagaaaatcttgtgatgaaaagtgatggttcacagaaaaggtcttattgctattccatagattgtgcaattcaaattttaacagttcttcaagctggaaagtgtggggaggcttataatataggacatgacgaagtaaccacaataaggaaaatggccgagattactgcaaaggctggacaggtgaaattattaatggaacttccttctgatatagaagaaaaatcctttaacccaatgaataattcggcactggataatagcaaaatcaaaaaattgggttatagagacacatttacagttgaagaaggattgacacatacagtggaaatactgaaagaattatattgcagtaagtgaatttggttttttacaagagaagaaattgaggtaattaaatgtgggtaagtattttggaacagacggcttccgtggagaagccggaattacattaacttctgatcatgcttataaagtggggcgtttcttaggttggtactataacgcattgcgtgagcgcaatggtgacagcaatcctgcccgtattgtcatcggcaaggatactcgtcgtagctcgtacatgtttgaatacagcctggttgctggcttgactgcttctggtgcagatgcctatctgctgcatgtcaccacgacgccctctgtggcctacatcgcccgcgtggatgactttgactgcggcatcatgatctcggccagccacaacccgttctacgacaacggcattaagctcatcgactgctacggcgagaagatgcccgaagagaccctgctgctggtggaggattacatcgatggcaagctcaatgtgttcgataaggactggccagaactgccttttgctcatcgtgagcatatcggctgtactgtggattacatctctggccgtaaccgttacatgggctacctgatctctctgggtatctactctttcaagggcgtcaaggttggtctggactgcgccaacggtagttcctggaacatcgccaagtctgtgttcgatgccctcggagcagatacctacgtcatcaataaccatccgaatggtctgaacatcaacaataatgctggctccactcatatcgagggcctccaaaagtttgttgtggagaagggcttggatgtcggttttgcatacgatggcgatgccgaccgctgcttgtgcgtggatgagaaaggcaatgtcatcactggcgaccatatcctttacatttacggttgctacatgaaggagcgcggcaagctgctgactaacactgtggtcacgaccgttatgtccaattttggtctgtacaaagcgttcgatgaacagggcatcggctatgccaagaccgctgtgggcgataagtatgtctacgagtacatggcaaagaacggctgccgtatcggtggtgagcagagcggccatatcatcttctccaagtatgcaagcactggcgatggcattctgaccagtctgaagatgatggaagtcatgctggcgaagaagaagccgatgagcgaactggcaacaccgttgaagatttatccgcaggtgcttgagaatgtccgtgtgaccgataagaaggctgcacagaatgaccatgccgtgcaggaagccgtgtctaaagttgctgaggcactgggcgatactggccgtattctggttcgtgaatccggcactgagccagtcgtgcgtgttatggtggaagcacctgaccacgacacctgccagaagtatgttgacgaagtggtcaacgtgatttgcgaaaagggatataaggcgtaaagtcaaggacgactctgggcagtaatagttcaaattgctgtgtgatagatggagatatttataaattgtaaatttgccagaaataccaacttgagttacgaaaataactatttgaacacgaaaagtgaagcaataatgttatgtaaaaggaatgaaatcaaaagtgaagagaaaaaaagtatacttcataacagttgttattggatttgctatatgcatggtcggagttatatttggaagccgattggtatttcagcgaacctgcgaaagaagaactactccatggtcagatttaggtactgcagacgatggtgaatatagaattctcatagatgcatataaaataaaaaatcaatcaaatgaaactgttatgatacaagcatttgataatacaaaactgataggtcattattatgaaagagaaaaaggtgcgcctttaattgtgttttttcatggattgtgggggcacagttatttggatggcgtgccaatatatagaattacacaaaaacacaattggaatcttctactatgtgacttacgcgcacagggagatagtgaaggggaattctcaacattaggagtgctagaaaaatatgattgtcttgattgggtagaatgggcacaaaatcgctttggagataaaaatcctatttttcttatgggagtttcaatgggagcatcaattgtgatgatgagcagtgatttggagttgcctgattcagtatatggaattattgatgactgtggttttacatctacattggacgtgataaagcagaataataacaagaaaatatcaaaatacatacccaaaaatctacttcctactatgcttaatgtaggaacaaagatttgggggagttttgatttatcagacgcagatgcgtgtaaggctttagcacataccgatattcctcttttaatcattcacggtgacgaagatatgaaggcacctttatctatggcttataaactatacgatagttgtaatggtgaaaagcagttatatatagttcatggggcagatcattcagaaaattatagaaaagacccgggaggatatgagaaaattgtaacaaagtttattgaagaaaggctccgacaaaaaaagtgccagacccctggtactaaactgtaaacgcaaaatgaacaaaatatgtcgttcgttctttttggtgttctctatgcttctcgttgcaacaatttccatggtaatgttgcggctcgaatgaacagcatcaatgcaaacaaagatacatttaaaatgtatacagatatgtttttgacagaatatattattttagcaatccatctgaatagccaaggtactttatcggatatggtactgaataaggttaaggaaaatgccaatttgatggtatgatagatattgctcgtagacccgcagagtgatatactttagttattataattggaaagaggtttgtatcctatgcccagaacaaaaggtagcaagaataagcccaaaactgtgactgctgatttcgcaacgcagattgcagaaaagcagtccgcaaaggaagcgctcacagcggaaatcgcatctatcaccgcaaacattgacactttgaaggctgacctgaaagtgaagaagactgctctgaagaaggccgaaaaagaagtggcaatgctggaaacgaagaaggcaaaggcagatgctaaggccgctgaagaagctaagaagaccgaagcagaggctgtgctgaagaaattgctggcaagcgggatgagtgcggacgagattctggaaaagctgaaataaacaagaaccaaaaaaataaatgccgtgtggacaaactgaactccaggagttcgcacggtattttttgaagattgacgtatagtttataacgaaaataaaagaagaacaaaatttaaagaaatggagcgtgagaaaatgaacttatcaaaaatacatcatattgcaatcatcgtatctgactacgaagcttcaaaggatttctatgtgaacaagctgggctttgctgtcatccgggaaaactaccgcccggagcataaggactggaagctggatcttcgtgtcaatgaacacacggaactggagattttcgctgaggaaaacccgccgaagcgtgtgaaccgaccggaggcctgtgggctacgtcaccttgcgttctgcgttgagagcatggagcagacagtgaatgaactggcggatgtaggcattgaatgtgagccgattcgtgttgacgattataccggaaagaagatgactttcttccatgatccggatggtctgccgctggagctgcacgaataagcatgagaaagaaaagagcgtataaatctcggaagcctggtggaggccgaaagaagctgaagccggagtacgatgccgggaaaaatctgaaagagcagatagaaagtgctgtggccctttatgattctgagatgtccttgcaggccatcgcagatgctctaaaccttaaccccatcaaagtaagaaagctgctcatcacggccgatgtgtatgaatctgaagtggcggagaaggtgcaagctacctttcaagaataccgtgaaacacaagactacaaaacctctatactctcaactgcaaacactctgaaactttccaaagcctccgtcacctcgtacttgc

SEQ ID NO: 944 - DNA, 46404 bp, unidentified
  source 1..46404: mol_type = unassigned DNA
tgatactaataggtcgagggcttaaccataaggaaggaatttgaggaaaagttattcaaggaaggaaagagattggaagattagttggtgtgcagttttgaatgtacaatggcccggtggctcagctggttagagcgccgccctgtcacggcggaggtcgtgggttcgaaccccatccgggtcgtcaataaaagaagagaaagaggaggttgaaagcaaaagccggctttctcgacctctatttttgtataaggaaacatgggatcttagctcagctgggagagcacctgccttacaagcagggggtcacaggttcgagccctgtaggtcccactaccgaaaggtaaaaagaaaataagcaggaaagcttgttaataaaacagaataagccgatgtggctcaattggcagagcagctgatttgtaatcagcaggttaacggttcgagtccgttcatcggctttaagtaagcaatgataaatgaagtcaggcttaccttaaaagaatgggcagattcccgagtggccaaaggggacagactgtaaatctgctggcaacgccttcgaaggttcgaatccttctctgcccattaaaaaaagaagaaacagcgcggggtagagcagtctggaagctcgtcgggctcataacccggaggtcgcaggttcaaatcctgtccccgcaattttttatgcccagttagctcagttggtagagcagaggactgaaaatcctcgtgtctctggttcgattccggaactgggcattaaccatgtccgaagcaaaagagagagggacaagacagaaaagacgcaggaatgacagataaatttaaaaacggcaaaaaccgtaacagaataaacatgaatgacagataaggaagcagaaatgcttctttttttattatatagggcaagtccgtgtttataaaggcgagttttatgtgaaaaagaattgtgtaaaccactgttggaaaatatattaaacataaaaataagggatattgtatatgttgattatgaagaaacaatacagatgacagcgaagtcaaaaggtataagactcgacatatatgttgaggatgacgacaacacagtttttaatctcgaaatgcagacaacaacttataaagaattaccgaaaagatcaagatattatcagggaataatagatttaaacatgattgaaaaaggcgaatcatatgatatacttaaggaaagttatgtcatatttatctgtacatttgatttttttgaaaaaggaagaagtgtttacgagtttgataaagcataataaaatatctattaataaaaaagaacttaaagcctgaaagttattaataattttcaaactttgagttctttttattaataaattaaattgtaatttattttatcggtaagtgtatccaccaccacaacctgcgcaacaagcattgcaacaaagatttgcaagacagcaggctaagagtgggttactgcaaataattgtaggcattccaccataactgctttgacgagaagtgtaccagctgccaccactttcgaatgtacggacaagttgccggtaagtagcattattaggctccattgaagatgccatgcgggcgtgctcaagagcctggacattgttgcccacgcctttatttgcaatcgcactgtaataataccatgcagctgttttgttggaaattgtatttaatacattcagagcttcggcataatgttgattgttgatgtaattggctgcggcacgcatatgcatctcgtcttctgacatatttgaagagttgccataattacctgcgccaccgtagcctgtaccaaagccaccaaaattgccaaaacctccaaaatcaaatccaccaaagtcccaatcgccgaaaccaccggaattatagccaccggaaccattagagccatagctaccggaaccaccggaatttccagatccataactgcctgaattaccatagccggagccatagccgccataagttccactgccataagaagaaccaccatagccatttgcaccatgcttgcgtgcatccataatctgactatatgcctgttgaacctgcttgaatttctcttcagcctgttccttgttagggttgttaatgtttgcatcagggtggtatttgcggcttagagccttgtatgctttttttatttcatcttcagaggcatctggtctaacccctaaaacatcataaggattcatatatctattctctttctaaatttttgctgtgattatgttataatgcgatagaatattgttaataaaaattaattctgaaaaattaaaacatcacaataaaaaattatttgttttctaaattttttgaaacacgccgttcataggaattccaaactccggaatacaaaatattacgaagaatatcagcgttgtcaacagcagggagcatttcgaaagcatcggaacactcagccatcatcattgtaagcatatctttgacatgagtttcaaaatccgggtcagtatagtacttcgaaaatacattgtaacgtccctttttgacatcgtcctcaacatcgtcaaatgcatccataatatatataaatttcccaaggtaaaagcccatacgaccaagaccgttggcgtaaatatcgtcaaaaggcacgaataggatttgcattatccggccaaataaaccggctaccacatcaacgttggtttcattcattttttcgcgggtaccgagttcgtccaacaaagatgaaatagcttcgattttatttttataggaataatcaggagaaatatgcaaatgcccggaatcgtcagtaaaataagaattctgattgttactgtcagaatttggctgagtagctgcaactgaaccatcgtcaacagcgcttgactgaatagctgcaactgaaccatcggcagttgaatcagaagtggcatgtacattatttaaatttttcccaattgaacctttttttaataattttgaataagcaagtttaagaacgcttctgtcatcgtgccagtcatccagacatttgaaataagaaaggatgacgttcatgtcagcaacataatccgtaaattctgaggaaatgatgttctgacgctttagagggtgcacaatgcaacgctttgaagttacgctgtgctccggctcataaagtgaagaaagaaggataactaaaaaggtcatgtcataggacagggttaattgccctgacagaccgtgtcgcttgctaagtgagtggcataagccacaataatacgcccgatagacatcaaattccctaaatttgagttcgggtttgtttacaactacatatccaaacatggagtcctccagacaaaataagtaaagaaccacaaatcaaatcggctctaagttaaatcacacaatcagtcgtaaatacttaatgccctcttaaaaggaaattcttacgcatgttgttaaattatataatcagttgcagactatttatgcatctgataaattaactttttttgataaatgtctgtgagcattttggacaacggatttcgatgcggcctttgccacgaggaatacgaatgcgttgtctgcaacgtggacatctgtaaaaatgataaaatcttctttgactgaaaatctctttttctctatgaaattttcttaagaaggaagcttttaaacttaaatatttgttattttcctggtagcgcttctgaatattttttgaaaacattcttatatacatcaaaataattaaaataagtgaaatataataaataatcccggacaaacgtcttgggacaaataacgaaagcacgcataaaaccagtgcgaaaataagcattgctctgccaagttgatctactccatacctcccgtacattaacttcgctaatttttcacgcaaatctaagactccttccatataaaaataagaaaagttctaaagtctatcataaaaccttaaaactttgccccttacttataagaaatattaaccctaatgaaaaataaaaacaaggtaatataaagagaattaacaaatccgttacaaatgttaacaaaatagacaaaagaagaatgcaagaaaggtcagtatgcgaaaaaaactgaaaaaaattggtgtatattataaacaaacagataaaaggtaaaaacaaaacaacgcaaatagtataaaaaagatagaaaatagcataaatattatgggaaatttttaaaatgaactaaaatacatatatagtaaatatataataaaaatatttttattgtaacttttccataagaaaagcagaaaatattgataaaactaacaaaatcaatgtacaaagaatgtcgtagatgatataataataaaagattgtgtctaaaaaaataagcaacaaatttacatattgaacgaaaaataaaacaagttgtaagaatgaaaattatatagataatttaataaaaatatgaatattattcaccaaacggtaaataaagtgattgtttattggataataaacaagaagattatacatcaaataatgatagggtaaatattcattaagtaaataagtaataaaatcattcgcctaactaatatataaagcaaactagagaaaatacaaagggggaggatagagagtgtacaacggaacaagtaataagtggacaaagcattttgatttcataatagtagatgttatatgcattaatgtagcgttctttctagctacactgatatattcagggtctgggcatatgtacaacacttccctatatagaaatgtaacaatatcattaacactgatacacttttgcgtggcatttttcaggaacggatactcaggaatccttagacgaggatatctgaaagaaatgaaggacgtagtgtatcataacgcaataataatggcagtgctatttgtatatttgtttttgatacaccaggcgaataacgtgtcgagaatagtaatattaatattctttgtgatggacacaatactaatgtacataagccatatagcatttaagaaattttatgcagtacgtaagaattatgataatgctaaggaaaatatgctgcttgttgtatcatcagacatggcagcagacactatcaacaagataagcaacggaccggacaagagatttgagatagtgggaatcgcattgacagatgtgatggacattaaagaatcagacatagatgaaatagaaggaatacctgtagttgccgatgccaattccgtatacgaatatgcgagggcaaatgtcataaatgacgtatttatcagagtaagcggagtaaacagtttcgtcgtagaaggcatggcatatggatttttgaatatgggaattaaggttcatataaatgtagaatttcttacacacgctttgccaaatgcaggatttgagacaattaacgaggtagcagttgtaacgacaagtataaatcaggtgtcaccggttggagcatttgcaaagagagcacttgatatatgcgcaggacttgtagggtgccttgttacaggaatattgtttatatttgtagcgcctgcgattaagattgcagaccctaacggaccaatatttttctgccagttaagagcagggaaaaatggaaaaccatttaagttctacaaattccgttcaatgtattcagatgcagaagaacgcaaaaaagaacttatggaacagaacaagatggacggacttatgtttaaaatggacgcagaccctagaattataggaagcggaaaagatggcacaaagaaaggacttggtcatttccttagggctacatcaatagatgaatttccgaatttttacagtatattaaaaggcgacatgagtcttgtaggaacacgtccgccaacaatggatgaatacgaacagtacgaagctcatcacaagagccgtcttgcaacaaaaccgggacttacaggaatgtggcagataagcggtcgaagcgatatgacggactttgaagaaatagtaaaacttgataatgagtacataatgaactggagctttggactggatataaagattatacttaagacttttcttgtggtaattgccagaaaagggtcagtataaaatgatttgataaggtttaagtacagacgaaaataactatgtgaaaattatttggctaaataaacttagctgataaaaatgatgagataagtgaaatgtggtgccgggcgatgcctggcactatatggaataataggtaggataccgataataaaaataagataaatgagaaacagataatatgaaaaatggacagttgcgaatagcaatgcttggtcataaaagaataccgtcaagagaaggcggagtcgaaatagtagttgaggaattagctaccagaatggtggaaagaggcaatgaggttacttgtcttaaccgtgccgggcatcatgtaagtggaaaagaattcgatgaaaaaaataaaaaagaatataagggaatcagattaaaaacagttcctacattagataagaaaggactagctgctatgactgcttctgtgacgggaggagtatgcgctgcatttggcaaatatgatgtagtacattttcatgcagagggtccttgtgccatgttatggctacctaaattatttgggaaaagatgcgtggcaacaattcacggacttgaccaccaaagagcaaaatggggaaaacttgcaagtacatacataatgatgggcgaaaaatgtgcagtaaaacatgctgatgaaataatagtgttaagtaagggcgtacaggattattttagagaaaaatatggccgtgaaacaagatttattcctaatggagtaaacagaccggttataagagaagcaaatataattaaatataaattcggacttgaaaaggacgattacatattgtatcttggccgattagtgccggaaaaaggattgcgatatcttgtggaagcatttaaaaatgtgaatacgaataagaaacttgtaatagccggtggaagttcagatacggatgaatttgcaaatgaaataaaagcaatggcaaaggacgatgacagaataatatttacaggatttgttcagggcgaggaattgtatgagttgtatagtaatgcgtatgtatacactttgccaagtgatttggaaggaatgccacttagtctgcttgaggcaatgagctatggaaattgttgtcttgtatcagatatagatgaatgcgcatctgtagttgaagataaggcacttgtatttgaaaagtcgaatgtagagcaattgcaggaaaaactacaggaggcttgtgataagcctaagatggttaagaaatataaagaagaagctgcagatttcatttgtgagaaatataattgggatgatgtggtggaaagaacaatggagttgtatagagggtaagaatatggaaaagaaacattatggtgcgatagatggcttaagagctattgcagcaattggtatcgttatgatgcatatgggagcaaataataactatgaaataggtggatatatttataataaaattattccatcatttactaattttgtatttttgtttatggtgatttcggcttttggaatgtgttgcggatattatgagaaaatattaaaaaatgaaatttctttagaaaaattttatgtaaaaagatttaaaaaaatattgccattttttgcactattagtttttgtagatttaattatgtcaccttcgattgaatctttatatgaagcctttgcagatttgacattaatgtttggttttttgccaaacgcaggtaatatttctgttattggagttggttggtttttaggactgatatttgtcttttacatatgttttcctttttattgtgttttaatacagaataaaaagagagcttggatagctttcggaattagtgtgatatataatttaataggttcaaattattttgagataaacagaacaaatatcctttatagtgcatgtttctttatagctggaggattagtttatttatatagaaatgaaatatcaaaaataaaagcatggcaaatattaagtgttatgagtattactattgttgtatattatctgctgaatggtaatgtgtttatgtgtctattagtttcagtagtgatgctattatatgcaattacttcaaatgtaaaagtattggacaataagatagctaaattcttaagtggaataagtatggagatatatttatgccatatgatggtgtttagaatattacaaaaaatgaagattactaatatatttggaaatgcatggattcaatattttattacagtaatattaactttaataggagcgattatatttgcaattatagtcagaaaagtgtttgaagttgtagaaagtaaaataaagtaaaaaatataaggaataaaatatgaagattttaatggtaaataagtttttgtatccaaatggaggttcagaaacatatatattcaaattaggtgagtatttagaaagtcaaggacatgaagttcagtactttggaatggaacatgaaggaagatgtgttggaaatcacgcagaagcctatacatccgacatggactttcatggaggttcaaaactttctaaactgacttatccaattaaaactatatattcaagtgaggcaagaaagaaaatcggacttgttcttgatgacttccagccagatgtagttcatttaaacaactttacatatcagataacaccgagtgttatattagaaataaagaaatggtcaaaacggacagggcataaatgcaagattgtgtttacagcacacgattataatctggtttgcccaaatcatatgtgcaacaatccaaatacacacgaaaattgtgaaaagtgtttaggcggacattttatgaattgctttaaaggtaagtgtattcatggtagtacagcaaaatcagcagttggaacaatggaggctatgttttggaaaataaagggaacatataagtatattgattctatgatatgctgtagtgaatttatgaaaacaaaattggacacaaatccattgtttgcaaagaaaacaattgctttacataattttatagataaagttgaatggaaagaagtagagaagaaagactatgttctttacttcggaagattttcagaggaaaagggaataggaactcttataaatgtttgtaagaaacttccgaacattcagtttatatttgcgggaacaggtcctttggaagaagagattaatggaattagcaatattaaaaatttaggctttcaaaagggagaagctcttgaaaaacttataagagaagcaagattttctatatatccatcagaatggtatgagaattgtccgttttcagtaatggaaagccagatgtatggtacaccggttcttggcgccaacattggaggaattcctgagctcatatctgtaggtagtactggagagttgtttgaaagtggcaatggagaagatttgaaaaataaaattgaagaactatggaataacaaagaaaagctagataaatacagtgaaaactgtaaaaatattagctttgatactattgagaaatattgtaataaattgattaagatatacgaataaaagggaaaaagggagagaacgtaatggcagagaaaaaattaaatggtacagttatcgtaacatatagatgtaacgcacgttgttcaatgtgtaacagatataaggcaccatcaaaaccggaagaagaaatttcaattgaaacaattaagaaattaccgaagatgtactttacaaatataacaggtggagaaccttttatacgtacagacttgaaggacattgttagagaattatataagaagagcgatagaattgttatttcaactaatggattctttacagatagaattgttgatttatgtaaggaatttcctaatatcggaattcgtatttcaattgaaggtcttgaacagacaaacaatgaaatccgtggattagatgacggatataacaaaggttatacaacacttaagaaattacgtgaaatgggaatgaaggatgttggtttcggaatgacagttcaggacaagaatgcacctgatttagtaccactttataagatttctaatgaaatgggaatggaatttgcaactgcttcattacataatagtttctattttgtagaagcaaaaaatataattaaagatcgtccaatggtagctaagaatttcgaagatttaattaatgaattacttagatcaaagagtcctaagaaatggatgagagcatattttaaccatggtcttattaattatatttatggacagaaaagattacttccttgtgatatgagttttgatacattctttattgatccatatggtgatgtaatgccatgtaacggaacaaaagacaaagaagtaatgggtaacttaaacaatcagagctgggatgaattatggaatagccctgaagcagagcatgttagagcaaaggttcgctgctgtgacagagactgttggatgataggttcagtgtctccagcaatgcacaagtacatctggaaacctggattctgggtacttaaacacaagtttaaagctttatttagcaaacatccatatagcatgtatgaaaacaaaattgtacgtgattacagagatggaaaggtaactaaagaggaattggataaatgcagtacttgtgatatgtgcgcaacaattaatgacggattaagcgacgcttcaagagaacagcttaaagataagagcggtgaagaaatagttgatgcagatattgcaaaacagatgggagaataaaggtaaaaatatgaaacgagcactaatagtagcagctacagggggattcttaaaggggtttttgatatctgacatgaaattgcttcaaaaaatgggatatgaagtgcattgtgcggcaaatggaaattcagtgtcaacatttgtaccggaagaactttttgcttctattggagttatgttccatcaaattgatttttcatcaacatctccgattagtaaagaaagcattaaagcatttaaagaatataaaagactaataaaaaagtatcactttgattttgttcatgtacatacgcctataccgggggcaattgtgagaattgcaactatgcatgagagaagaaaaggatgtgttgtggcttatactacacatggcttaacttttccaaagggatgttctttaaagaaaaagattgtatatggaagtatagaaaggatatgctcacatattacagatggtattattactattaataatgaagatttcgcacaaatgaagaaaatggcctgcaagaaagtttatcatattaatggtgttggtgtagatacagatagatatcataaatgtaaaatagatagatacagttacagaaattctataggattaacagataaagacattgctgttttggaagtgggcgagttatcagagagaaaaaatcatagagttattattgaagcattatctaagttagaagacgaaagatatgtttttcttatttgcggaaaggcaatgactaattttggaacatatgatttcttaaaaaaatatgctgaagaaaaaaatgtaagagtaaaatttcttggatttagaaaagatattccagaacttaataaatgtgcagatattgcagtattaccttctttgagggaaggattgggacttgcgggaattgaggcattagcttcaggagttcctgttattggtagcagagtgcaaggaataaaggattatgttattgatggaaaaacagggtatttgtgttctcctttaaatgcggatgagtttgcagataaaataaaattattaagtgatgtaaatttaagaagatcaatgaaaaatgcatgtattgataaggcagaagaattcagaatggatatttcacataaacaaatgagtgagatatatgaacagttacttgcaaagaagagttgataggagaaaaaagaatgataggtgtttgcattaaatattttcatgaaaattatggtggaatgttacaagcatttgcaacaataaaaatgctagaatcaagagaaatggaatatgaattaattagatacaaaaagaatctaactttaagaaaaaaaataaaatcaattccaagattgttgaatactgtgcttttaaaggataaatatgaggcttttttaaagaaaaaagggatgatgaaacacccggaatttgcggaaaataatgcaattcgtatgaaagcatttgatgagttcaaaaaaaataaattcattaaactttcaacagagtatgtagggtataaggagttatgcaagggagcaaagaaatatagtgcagttatatcaggaagtgatcaactttggtcaccggcaggactgcctacaaacttttataatttgatgtttgtacctgatgaagttagaaaaatatcttatgcatcaagttttggagtaagccagattccatggtatcaaactaagagaacagcaaattatttaaaacgtttagattatattagcatgcgcgaaaacagaggaagtcaaatcgtaaaagaactaataggaaaagaggtccctgtgattttagacccagtgtttaattttgataaagaacaatggaaagaattgattccggttaagaatgaaatatcagaagaatatatttttgcatactttttggggaatacagtcgaatatcgaaagaaagtagaagccgcagccaataaattagggtataagattgtggtactacgacatttagatcagtacattccagaagatgaaacatttggagatattgcactttacgatgttggaccggaacgatttataaatttattaagaggagcagcgtatgtatgtacagattcatttcatggttcgtgcttttcaattataaataataaaaagtttatagtatttaatcgatatgcagcgggatcaaagaattcaaaaaattcaagaatagatactctgtgcaataatcttggcttacaagaaagaagatataactctaataaaactttagaagaacagttaaatgaaaatatagactatgagttggtaacagataaaattagaaagctaaaacaggatacagataagtatttagatgaggcgtttgctgatattaaataggaatgtgttaacaataatagagagtgaaacggagaaaattcgtgattgagataaaaaataaaaaggagtgttgcggatgtaccgcatgctcaagtatttgtcctaaaaaatgtattgacatgaaagaagataatgagggatttatttatcctaatgtaaacgtaattgagtgtattgattgcaaattatgcgagcaggtatgccctatgacaaagaaaagagaaaatgaaaagggaattcctgaaagtattttggcaagagatgtaagagataaagttctcttgacgggaacatcaggaagtgtttttacttcaattatggaatatgtattacagaaagacggagttgtatacggagtaattgtagatgaagaaaaggtagtaaagcatattagagtggattctcaaaatgataatagaatatcaaaaataccatgctcaaaatatgttagaagtgaaataagagacatttttccaaagataaaggaagatttaacaagtggtaaattagtatgcttttcaggagtaccatgtcaagtagaaggattgaaaagctatttaaatagagattacaaaaatttattaacgattgatgttatatgtcgtggaaatccatctccactttttttgggaaaatatgtggagtacctagaaaagaaatataaaagcaaaatagttgatgtaaggtttagaaacaaaacattcggttatcacagtggaacaatgaaagttgtgtttggaaatggaaaagtatattttggttctgcaagaactaattattttcttaaagcatttttttcagatttgtgttcacgtccatcatgttatgaatgtaattttaagcatatacagcataaatcagaccttacactttatgacggttggcatgcgtctgaattagcaaacatagaggatgatgatagaggatataccaatattataatacaaagtaataaaggaaaagaaattttagacggcttaaagacgttgaaaaaatatcccattgatactttaaaggcggttgaacttgatgggattatggtagaaaattcggttgagtggaatgataaacgagaaaggttttttgataatattaataatgaaaacatagaagaacattgtttgaagtttatgaagatatctttaaaagacaagttcatagagaaaatgaaacgtatatattacataagaaaatttaatggttaaaaatattcatatgtatagatatgttacataaataagacaagaaagcattggattgttaggaaatggaatcagtaaaatatagtataattgtgcctgtatataatgcagaacaatttcttgaaagatgtataaaaagtttaattggtcaaacatataaaaattttgaggtgatttttattaatgatggctcaagtgacacaagtggagatattttaaagaagtattgcacatcagataagagactaaagcttatagaaagaacaaatcaaggagtttcatcagctagaaatgaaggaattgaaagagctataggagaatacgttatctttgtggatgcggatgattatgtagaaaaaaatttattagaaaaaatttctgaatgttcatcaaaagcggaaatgataatgtacaattttaaagataatggaattgtaaacaaagtagaaaaagaggtttctccattttgtgatgatgtgagtgaaagtgctatactaatatcgggattgaattctttcagaggatttgtatggaataaagcatttaaaagaaacattgttattgaaaatgatataaaatttaaagatgatattcatatgtgtgaagacttatgtttttgtattgatttcttggaaaataacataaccacagcatttattttggaaccattgtattactatgaacacagaggtgtaagtgccagtgcaaatatatttagtgctaaaagattttcagttataaaggcatatgactatttgttaagtaaaccgctgattaggggagaggaaactgtgtatagatgttataaacatcaatatataagacattgtttgtcattgtggaaaatgataagaaatgatgatgaaaatgtaggctacaaaaaggaactttcagacagaataaagaaagttgattggaagtttgctattgataaatcgtttaacataaaatatagattggtatttgtagcaatcaagatctttggttaaggagtactggatatggtaagtgtagttatacctgtttataatggagaaaagtttataaaaaaaagtattgatagtattatagaaaactggaatggaacttatgagataattattgtcgatgatggttccacagatgaaacagcatctatatgtgattcaatagcaaaaaatgacacaagaataagaattatacatcaaaaaaatgcaggcgtgagtaatgcaagaaatacaggtatttataacgcaaaaggagaatggataatttttgtagatgcagatgatttagtgcagggtgatgcaataaatgcgttagatggtattgaatcatccatagattttgttgcctttgggacaaaaaaaatacaagaatgggatagaaaacaaataaataaagatgaattactgttggaagtgcttggtgagagtaacgcaattggatttaaaatgaatgctgtttgggcaaaggcatatagaaaagagatgcttgatagtaataagattagatttaatgaaaagttgttccatggagaggatttgctttttaatgtagatgttgctttaaaatgcaaaactgcagttattcttaacaaagagatttataaatatatacctacagatacatcagcaacccataaatttcagagtaatagtttggaaaatgagaaaatatttacatatgagatagataaaagattaggtgaagattttaacatagatttaaagcaaaaaataaataatagaattaattgtatgataattaacagcatttggattgtatgtgggcaaaatatatgtcatacagaaaataagttgaagtttggcgaaagaaaaaatattttaaaaaatatgattcagatggagccttataagtcagtcataacaaaaaatattaatatggaaaatattaattcaaaacaacgtatgatggtctcgctactaaaggaaaaaaaatatggttctgttatttttatgtttatgataaggaatagaatttcaaaataaaaattattatttgagtattataagaattgaaaaggagaatagttcattaaatatatagataatgaattatataaagatatgaagaaaaaaataggaataatgacatttcatgcttctaacaatagtggttctatgctacaggcatatgctttacagcatttttttagagaaagatataaaattgatactgagattatagattattcgaatgaggtacagcaaagaatgtactctatactatgcaagccaaagacatttaaggacttgttgagggacatattatatctttcacattataaaagtatagctaggacagaaaaaggatacgatgaatttaaaaaatattacaaattaagtaagaaatacagaaaaagtgaagatttaaaaattgatgaatctgaatatttagcaatcatagctggaagtgatcaagtttggaatattaatgcgatggattttgatgaaaattatatgcttccgtttgaaaatattaaaaaaattgcatacgctgttagtttgggcgcttcaaatccaaatgaatcaagcaataaggatgtgtataaaagttatatcgaagatttttcagcaatatcagttagggagcaaaatgcaaaaaaatggattgaaaatctaataggacgtaaagttaatatttgcgttgatccgacactattgataagtgaaaaggaatggcttaaaataacggatgagtctatgatagaaggtccatatatcttttggtatgcgatgacttataaagctgaacaggcaaatatattgaagaaattgagcgaaaaatatgatatgcccgtgtatattatgaatggaaaagaatgggcaagaagagggttaagaagaaaaggaattaaattatcaccaaagggtggaccaagtgcatttttgtcacttgtttcaaatgcaacaatggttgtgacatcttcgtttcatggtagtgttttttcgtatgtgtttaagaaaaatttttggtatattggattaaataaagatggggggaacgatgacagagcttcatttttattaaaacagatgggactttcggaaagatatattaaaacacaagaagcattggaaaaggatttattaaaagtaccagaatatgatgataaaaagttacaaccgtatgtggaagagtcaattaattttattgaacaggaaattgtttttcaaaaaggaatgataaaagatgaaaattaacaagaatagtttaatatatatgatgagcttattcccaattttagtatctcaggttgtgtatactattattaacagcaaatttgctatattcttattggttttaaagatgtttgtttttatctattactttggtaaaaaagtgataagacactatatttctgtattagatatggcaataggaatgtattttgttgtttggggaatatctgtatttataaatgaagagagtatagtggagtatgcaaaagagagtattgttatttgtacattaatatttatggtggaggaagctaagcacacggatatcaaggcgttttttgatgcgttaactttgatgttattttcattgtttttgattaattttgttgtagcgattatagttccaaatggtctttggcaaacaatgtcaatctacggaacagaagcagattatatgtttttggggttgggaaatcagctaacacctatgtttttgatagcgttgatgacagctctttttcaatatgaaataaaaaacataaaatttgttattttgtatggaattgtactattgggaaatatctattttatgtcttcagcaactgcgattgttggaagttgtgtgatgttggtaatttttattataacaaaaactaccggaaaatataaaattcctagaattgcaatggctatagtagtggtagttggaatatctatagttatatttagaattcaatatattttttcttttataatagagaatatacttggaaaaacattaacattatcaagtaggacaatcatatgggataaagctctagcattgataggaaaagaaccgattataggttatggagcaggaacgttggcaactgttatacaagatagaaatgcacattgctttttcctacaaattttaattcagtcgggaattatagggctattgtgttatattaatgtctttagagtagtattaaaaaaatgcaagaaatattcaaaattgaaatcatatataattattaattcatgtatatgtggatatcttacatgttgcataacagaagtttattcacaaaattttttgattttaattttatgtatagcctttataggaagcaatttagaaacagttattcaagaatctttaaataatattagttgatgaataaaaattagaaatcagatatagttttgtatttatacataaatcgaggaaaggcagagaatggaatctattaaaaagaattttatatataatattgtataccaagtattattgatttttttaccattaattacagcaccgtatatttcaagaacattaggtgcaacggcagtaggaatttattcatatacaaactcagttgcgtactatttccttatgctggcaatgcttgggatttctaattatggaaatcgtagtgtagctgcggttagggataataaagagtctttaaatagagtgtttagcagtatatatatattacaggtatcaacttttatcatagcaattttagcatatattatatatgctattttctttgctaaaaataatgaactaatttttttaatacagttattgtatgttatatcaggaatgtttgatattacctggttgttttttggattagaaaaattcaaacttacaattgggcgaaatcttttgattaaaattggtacaataatttgtatgttcatttttgtgcatacaccagcagatttatggaaatatacattaattatgtctgctggaactttttttagtcaggtatatctgtggatatatgtaaagaaagaggttaaatttgttagagtatctattaatgaagtcctaaaaaatataaaaccagtactagttttgtttattccagtattggcatatagtatatataaggttatggataaaattatgctcggagatatgtctacatacacacaggttggcttatatcaaaatgcagagaaaattattaatgttcctatgggaattattaccgccttaggaacagtaatgcttccaagaatgtcgaatataatagcaaaaggtgagaaaggcaagacggttttatatattagaacttcaattaagcttgttactatattatgttcagcgatagcatttggattaatgggaattgcaccggtgttggcacctgtctatctgggaaatgaatttgtagattgtgctcagattataacattactgtcaattagtgttttctttattgcttgggcaaatgttgttagaacacagtatttgattccaaatagatatgacaatatatatgtaatatcgacaattgttggagctgttttgaatttccttataaattatatgttgataccacattatcaatcaaatggagctgcaattggtacagttgtagcagaatttagtgtaatgataattcaggtaatagcagttcgaagagaattacctataattagatatatagtaaaatatgttcctattatgggaatcggaataggtatgatggctatagtaagagaaattggtagtattatgggatgttatataaagacacttgttgtacaggtggctgcaggtggagtctttttttgcctgttaactgtgatttacttgtttataactaaagatgaaatgcttatgttaataaagaaaagtttattagagaaataatcgtaatgatggtaatgtctgaatatattaaaaataaaatttatataaaattgtttgaattttaagattatagtagttgttgccatggatattttataaggtattacataagaatataaattagacaaaaagtatataggaaagtttattatgagtaaagaaattgatattattgcaaatattataaaaagtgtacttacagcactttatcaatcgtttttagcagcagtgcttttggcatttgtgtctatgttcgtttttctttatgtgaaggaacatggatggaaaaaaggaaatctaattaaaaatatattcggaacatgggttagaaattttaagaaaagttctacttttcgaagagtttttcttttgatgttttattctgcaatgattctttttagaacttttttaaatagaaatatttggtttgatccgttaagtgatgtattaggagactggggattacataaatcagatggatcattatctactgaacctatagaaaatcttgtgctttttataccttttgtagtacttctgctttgggcttttaagaatgagattattggagaagatgtaagaattgtaaaagttttatggaaatctaccgtaacagttggtattttttcatttgtcattgaattttcacagctactgtttcaccttggaaccttccagatatcggatttggtttataatactttaggtggaactgtcggagggcttgcgtattatataatttataagtttagatataggaacggatagattttcgttttgattttatagtccggtcgatgcttaactctttagtggaggaggcgttgattggactttttttaatggcttatttttgtgaacaatgggaagattgatagggattgtaatatttagagctatatgttaatatactggtacagagataaccgaattgatttcggttgaaaagcacttacgttcggcgtaggtgttttttatttgcagaaatagaaactatcgttaaatttaacagtgcaaaaacgtttatacttatatcaattggaatgttatagtatcaagagcataaagataatagttatacttatttttactatacgatgttggactttagtagttagcttgaatataaaaattaaacttgaaaaataaaacaatatgttgtataataaattgaaagatgaaaatggggatatgaaaagcttatttttctttttaatttataattgaattatctaaagaaattcaagcaagattgcaaaggatattgcaatcgtaatctttattttccaaaaatattaattaaacaaatttatattacaaaaggggtggtttaatggatagtttatttaatattgttctgtcatcagctgtcgtagcagcgttagtaaaaggaatagaacaaaatcaggtaaataaattgaatatgataacaagcaaaagaggagactggagaaaggaactaaaggacatagcgttagacattaaaaaatcgaatgtagataatattaacgaatatctaacgcaattgaaaataaatcttaattattatggttctgttaattgtaaaaataaaaaagatgaagatcttgatatagtgcaggacgagcatatatggaaggttatatacgaaattgaagattattgcgcaaatgaacaggaagatatagaaaagtttgaagagtacaaaaaaagattaattgactatataggattattgcttaaatttgactgggatagaagtaaatatgagacaaacagtgcttttgattttatgtcatcaataatatttttattagcagttggagtaggaggagtactattatattattggcaaaatcctaaaatgactatatatgaaattatttcagatggaatggtgtttgttttaccaagtttaattatgcttattccgttattgattaaaaaaatggattctcaaatttgtagaacttggtataaaaatattgattattttaagatcgcaattgtatgtgcaggaataatgataatatttatagttatatatttttatgtaatatataatcaaaatggagttattattgctattgctgagagtttatatatgatgtctatagcatatccagttttaagcgtttataaagaaaaaaagttttatatgaaatatgaaaaaagcgtatcagattacatagataatgataatagaaaattgaaaaatagtgagaaacaaaaatattgttcaaataaaaattgttatgacactaaaaaaaaagataaagagggtatagttatgaaaatgaatgaaaacactagtaaaaaagaattagatagtattatagatggtgtaaatacaaagttcgctgagaatgaccttgaggaaagaatgaaacagtatataataagtctgaaaaaatcaattggggatgataggaacaaatatcttgcttataaatcagttttagaaaaagaaatggacttaaactttccaggattttggatggcaacattagctttatttatttcagcggtatcactagtaattgacaatatttctggacaagaaataattaaaaccatagtatcaagtatagcaatagtggcaattattttgggaattttatattatacagttgtaaatgaggatagaaagaaatatcagccggttttaattgcattaaacgaaattgaaagagaaagggtaaatgaagaaaacaaaaaataattgtagaaataaagtaatacaaattaacaaaagttagaggatgagagactaaaaaggatgttgtgtctgatgattcattatgtgaagtataatataattttgttttcctatgtaaacaatgacgacatttgtgaaaggagaagttgcgatgaatggaagcaagcttattagaagaattcatatggagtgtcctatatgtgacaaggttcatgagattgaggaaaggacacaactagctaagataatcattaaaggtgaagaagttaattatgtggagacatattatttatgccctaatagtgatgaagatgaaaacgaatttgtaactggaaagatgatgaatgataatcttttaaatgcaagaaatgaatatagaaaggcacattatttgcttacatagaatccaatttttacaataagagaaatatacagagtagcgctacatttatcagctgagagcgctacttttttatatttatgatagctaatacaagagtaagaacatatagttcatattcagtggaaaacatcacataaaatatatttgcataatttcacataatatgatatattaggtatatgaaacgttttacaaatattatgatactttagctagagcgatttatatggagggtttatggcggaagctaacataaaacataaagacaaagtgtttcggatgcgtttataatgccatgcagagaaggagaatatgagtggacagcaacagtttacaatgttaatgaaggcaacaataaagatttgatgaataagtgcaaaattctgcgcgaatatgctacaatggtctcaaagattagagagttccagcagaagacatatgatttggaaacggcaatagagaaagcgatagaatattgtgtttcccatgatgttttaaaggattttctgttggagcataagtcggaggtggcagatatgcttagaatggaatatgatgaaacaaagactatggatcatataaaagaagactattttgaagaggggcaggcagttggggcaattaaaacaaaggtcgcattgatttgcaagaagttaaacaaaggaatgtcacaggagaatatagcagaattgttagaggaagatatttcatatgtaaaagaaatatgtgaagcaattggtgatagtccggcggaatgcgatgtggatgaggtcgtaagaaagctatcttagtattttggagaaaccttagatggaaaaaggtttctcttttttttatttattatgcacaatcagataggcacataaaattatgttattacagagcaggaaaaagaactgttttcagaaaaattaaagtcattaatggaatatttataagaattactgatgatttggaaatcaatacactagatgatatatttcataatacaagatttggaagatatgttaaatatagtttaaaatatatgttatacttgtaacaaagatttaaagatttgtgaaagagataaattgttatggtaaatataaatttaagaacttattatacggcaatagaacttattagaaattttgttaataataagacaattgataaggatttttttaatgagaaatttatgaatatgccgaatgaagaaaattctcaggcgaaaaatgagaatactggggaagaagcttcgatggctaataaggcatataaagaaaattctcaggcaacgaataatgtaggggaaaataattcggaggctaacaatataggaagattttattatattgcaaagaaacataatcttgtttcgctcatggaacaagctatggagaagatgggatttgagtctgatagtgatatttggaaacgttggttaaaggagaagaatcagcttatttacaaaagcgttctcatggatgtagagcgtgaggcaattcaggatttttttgaggaaaataatatttggtacatgcttcttaaaggaatggttataagaaagtattatcctgctccggaacttagagaaatggctgacaatgatattttatttgataataaatattctaaagaagtctatgattttatgacagcaagaggatataaatctgacgactataacaaaggatatcatgacgagtatttgaaaccgcctgcttataattttgaaatgcacagacagttggtcagctcaaaggaaagacctaagtggtatgaatattataaagatgttaagtcaattttgataaatgatgcaaatggcaaaaatcagttttatttttctgataatgatttttatgtttattttatagtgcacacatataagcattttcttaatagtggcatgggcttaagaactgttttggatgtttatttgtatcttaataatttacaggataagcttgattttgattatattgaggagcagctaaagaaacttgatgcttatgattttgagcagacatttagaagtcttgcctttaaaatgtttggggagaatgctaaagaaggcaatgcggcagcagatgagttgcaggattcatttgatgctaaagagcaggatatgttgcgagagtcatttgacgctaaaaaacaggacaagttatgtggctcatttgatgctaaagagcaagacaagtggtggaattcatttgatgataaagaacatgatatgttgtcatatattcttgacgccggaacatacggaaatttggaaaatagtgtggcccacaagatggggtatactaagggtgagaagaagaaagcatccgataaagcaaaatacatattccgcagacttttcccttcaatggatacaatcgaggaatttttcccatttttttacaagcataaatgggcaatcccattcttgtacatttatagaatcggcaaaatgccatttacacgaagaaaaaaagtcgcgggtgagcttcgggaagtttttaagaagtagttgaggtaaggaagaatattaagttactgcaaattatcttagtaaaatgatgtcatttattagaagactaaaaagtatactataaattcaattgagtgttggtttgtcaaagttcgacgttatatatggattaatataaaaacatttaaaatatacatctaaaacttatttgttttttagtacacaaagtataaaattatacatgcttgaaaataaaacaaaaagaggtataataaatggaagagtattacttcataaaacacgaacaaataaacaaaggagaacgagctatgattattatggatattaaagttgataatttttatgcttttaaaaattttcatatgaatatgtcttatccaaagaaaatagtagattcaacaatagaagaggaatttttagaggaaagacctaattttagatataagaaagtaaatataattatgggtggaaatgccactgggaaaacatcattaggacgattgcttatgttgtttacaaattatttaaatgatggtggatttagaagatttacagatagaatttctgatgaaaaaaaagaagcaaaaatttcaattgattttgttacagataccaatattctttatagatttgaaatgaaggtattgccaaaaggaaaagatgattatagtgaggatgaagtggacattaaaatatattatactcctattttaattaaagataattatgaaatgtgcgcaaataaacttaatgagaaaaattgtagttgtacaacatatgataagataaatacaaatggttggagtttttcgtatccaatagatgtaatagaggaaaaaaaatataaaactattgaagaaaatgataaatatatatttattttagaacaaatattaaaaacgttagatccatcagtaaaagaagtagtaaaggtaaatgaagttgaaaacacatatgcaattatttgggagaattgttctgtaataatcaaagatggaagaattgaaaatagtaatgtaatgtcaagtgggactaaagctggacttgaaatatcttatataataacatcacttatatgtaatatgcatgatttatattattgtgatgagttattttcatttgttaatagtgacattgagaaggcatgtttatcgattataatagataagcttaaaggaagaaaacagttgtttttcacaacccacaattctgatattttagatatgcagttaccaaaacatgcctattcatttttgaaaaaggatatgtcagatgatgaaacaacaataaaatgtattagtgcgtctaagtatttaaaaaggaatacagattcgctgaaaaatgctgttgaaaatgatttgttttgtactgctccggaattaaatagaatatatgaaattgctgatttatagttagggtggtgcgggatgagaaaaaatggaatataccaatattatgtagagggtgaagatgataaaaaaatagtaaatgcgttgaaacaggagataggttgtattgaaagtggaaaagtggaaaaatttaatgtaatacaaaacaaattttctattgcaagaataagacctttaaaaagtggaactaccgtagtactagtatatgatacagatgttgaaacgaatatagatattttagattacaatgttaagttcttaaaaaaacagagtgcaattaaagatgttatttgcataccacaggttaacaatttagaggatgagcttgttggtgcatgcaatgtaaaaaatgttatagaaattacaaaaagtaatagtttaaaagaatacaaaagagaattaattagttgcacaaatttggggaaaagattgcaagtatgtggatttaacatattaaaattttggaataaattacctaaaaactcatatgaaaaatatggaaatgactcaagtaaaataaagaaggtaaaaaaataagaatttaatggattaataataattaaaaaaccaaagcagggctggcacaagtgccagccctgctttaatcatacaccttgaagagtgcatatctaattaaaacttaaatgtatcctttaagcctacccataactgatctttatcgctaaggttgagtgctgttccgtcttctaacttatagccttcgccgcttgcagttcctttatattcgccaacaagctgtggccatttgattccaatttcaggatcattccaagcaagtccaccttcatcaccaggatgatagaagtctgtacatttgtagcagaattcagcaaggtctgaaagtactaagaaaccatgagcaaatccttctggaatgtagaactgtttcttgttttcctcagtaagttcaacaccaaaccatttaccgtatgtttctgaatcgcttcttaagtcaacagctacatcaaatacgctaccctttacaactctaactaatttgccctgtggaaattctttctggaaatgaagaccacggagaacacccttagtagagcttgactgattatcctgtacaaataccatgtcaagtcctgcttcctgcatatctttctggttgtatgtttccataaaatagcctcttgcatcaccgtgtactgttggttcgataacgcataatcctttgattccacctgcatttttttcaactttaatctgtcccatttttgtttactccttatttataaaatattttgatttttacaaactttcaatatcaagttcttttaaatatcttctaacagcatcctgccatgttggaagtggagtgaatccattttcaactaatttgctcttgtcgagacggctgttaaatggacgttttgcttttgaaacgccgtattcagcagttgtgacaggtgtaacagtaatgtttttttcactgtatctgtcataacccatttcagtagcctgtttgaagatttcttttgtgaaatcccaccaactgatgtagccaccttcgtttgttgcatgatagtatccatatttgtcagtaacaatcatagatactaataatttagcaaggtcaaatgtgtaagttggagttcctatctggtctgaaacaacctttaactggtcatgattcttgccaactttaagcattgtcttgataaagttatttccgtttttaccaaatacccatgcgattcttacgataaaatatttgtctaatgtatttgcgacagctaattcgccatcgagttttgtctgaccgtaaacgttttgaggtgcatagtctttgcaatcaggctgccaaggttctgttccttctccgttaaacacataatcagttgaaatgtacatcatttttatatcaagttccttacaaacatcagcgatattctgtgttccgtttacgtttacaagtttaactttttcctgcttatcttcatcttcagcagcgtcaacggctgtccatgcagcacagtgaattactgcgtcaggattaacttctttgatgactttgtctacagaagccttgtctgtgatatccatttcttcgatatcaacaccaactgcttcaatatttttctcttttaattcatttactacgtcaaatcctaattgacctttaactcctgttacgagaactttcatatttactcctttttgatattgtaacaatgccagtggtaaaaggtttaagaccacataagcttgcttataagtgggtaaaagaccttttgccccgggcatcttgtgattttaaaattacatatattttagtgtataccattgaattatgaaaaatcctgtttccagggaagaaaacaggattttcatttaggcagacatattatctgttgccatacattttttcataataattctgatattctccggaaatgatagtttcccaccattctttgttgtcaagataccactgaattgtcttcttgataccatcagcaaattttgtttcaggtaaccatccaagttcgttgtgaatctttgttgggtcgatagcgtaacgcatatcgtgtccctttctatcagctacatatgtgataaggctttctggtttgcctaattctttacaaataatcttaacgatatcgatgtttgtcatttcattgtgaccaccaacattgtaaacttcaccaactctacctttgtggataattaagtcgattgcacggcagtgatcttctacatataaccagtcacgaacgttttcgcccttgccatatactggaagtggtttgtcatttaatgcattagcaatcataagtggaatcaatttctctgggaaatgatatggtccgtagttatttgaacatctgctgattgttacaggaagtccatatgttctgtgatatgctaatactaataagtcagcagcagcttttgatgaactgtatgggctacttgtgtgaattggtgtttcttcagtgaagaataagtcaggtctgtcaagtggtaaatcaccataaacttcatcagttgatacctgatgataacgcttgatgccgtattttctacaagcatccataagaactgcagttcctaaaatatttgtgtttaagaatacttcagggttttcgattgaacggtcaacatggctttctgcagcaaagttaacaacgatgtccggatgttcttcttcaaataatttatatacagcttctctatctgtgatgtcttcttttacaaaacggaaatttggattgtccataactggagcaagtgttgaaagatttcctgcgtatgtgaggcagtcaagacaaataatacggtagtccggatatgtgtttaacatatggaatacaaagttacttccgataaatccggcaccgccggttacgataatgttcataataattctccttaattgtgtaaattttctttttctaataacatgaatgttattgcttagggaaataccctgtttatcaaactaagttttcaaagaaaacaaagttttaattagtgaagtacgtccatgtatttttcatcaagtacatcttttaaatactggccatactgatttttctttaatatttcataaactttaagaacgtcttctcttgaaatccatccgttaaggtaagcgatttcttcaagacatgcaatttttctatgctgatgtgtttcaacagtcttaacaaagttagttgcttcaacaagactttcatgtgttcctgtatctaaccaagtgaatccttgtcctaaaagttcaacatttaattcgttgttttctaagtagattctgttcaaatcagtgatttctaattcacctctagcacttggcttaaggtttttagcatattcaacaaccttattatcatagaaataaagacctgtaacgcagtagttactctttggctgtgcaggcttttcttctatagaaatagccttaccttctttgtcaaattctacgataccaaatctttcaggatcgtcaacatagtaaccaaatactgttgcaccttttccactttctgcattttcaacagcagcttttaaacgcttcttaagtccgtgacctgcaaaaatgttatcaccaagaaccatggcaacacaatcatcaccaataaattcttcaccgattacaaatgcctgagcaagtccgtccgggctaggctgaaccttataagaaaggttaacaccaaactgatgtccgtcgccaagtaattcctggaaacgaggagtatcctgtggtgtagaaatgattaaaatatcacgaatgcctgcattcattaaaactgacattggataataaatcataggtttgtcataaataggaagtaactgtttagaagttaccattgtgagagggtaaagacgtgtgcctgaaccacctgctaaaataatacctttcatagtatatctcctttgtttaatcaaattttgcttaagtagaatttgatgatgataaaattatcgtagcaatatccggttgcacgatttttgcaacaatattagttgataaaatttatcaattcaacaatattagttcgcacgattttaaatatcataaaacattctactttgaaagcaataaaactgtctgactcaaatgttaagtatataataaaaggtgacgtaacgtcaccttcaagtatttttttcaatttttttgaaatttaataaaaaattcatatttaattgcactattttatgcaaatttgatacatatggtgcgatattttagattcttgaagctattatttgctaagattgttcacttataccataagtaacagttatcttttacattttattgagtcttatatcagatttcataattaaggaaaagaaattttatgcttaggggtacaaagttgtacccttgtaaaaccttaagttaactttagggtacagagttgtaccctaacttatttttgtttttgctaaatgccatcatttatttcacgcaaacaaatattccggcttctttagtgatatggaaaggtgtttttgttctctgctcgacaaaatctttgaattcctgatatttgctgagaatatattcattctggtttccgtgacaggacaaaatatattccatcaatggctcagcctggtcaacctcaaggtaatcttcataaggcttcatttgaatagagttaaaatgaagtttaagaaaatcttcaccattatcaagaccaaatttttcataaagtttatttgatgacaaatttatacggttgtcaaaagatttgacaagtttgtcaatctcacacatatgcttatttccgtaagtgctacatatgaaacgaccgcctttctttagaactctgttgacttcagagagagcagtatcaatattttcacagtagaaaagcacatgattagcaattacaaggtcaaattcttcatctttatatggaatattttcgcagtcaaatgttccaaaagaaaatcgtgtgtcagcaagtccgatggcacgtctggtatcacgaatcattccctgagaaatatcagaaagataaatgttaatgtcagcaggcactttgtccatgttttgggtccaaagggctccgcttccgcaaccaatttccaaaacctttatgcccggttgaatatcgtaattgtcataaagccagttaaaccaatgctgctcattatgagagtatagattatgcaaattaattctggcagaaatattagaagcattctgatactgtgtttttatggaattttctgcatttgtcaaatgaataagctctaacatctggctccagtcaacatgatgttcctttgttaaggcggctgttgtgtctttaatcgccttttcaaccatttgcatttgctcaattctatcctgaacaagtttaagctgcatattcaatgaattgagaagcatttgcgaattactgtcgtcgattgtgatttctctaatgtcatccaaagaaaaaccaaggtatttgagcaaaaggatttgctgtaatctaaccaaatcctcatgagaataaaatcttgctccgtaatcagttatataagttggttttaaaatattctgtttatcgtaataacgtattgttctcacggaaacatgtgccattttggcaaattcccctgatgaatataaatcatctttctgcataacaaaatcctctcgttaccatatgtgttatcaaaaatttaatcttgtgtaatcgtaacacaattagtaaaaaaacgccatattacacagcagtacaaaacaaaatccacatcaaaatataattggtataacgacatattgcatagcattataaagcaaaattcacatcaaaatttaattagtaaaaaaggccatattgtacaatggtgcaacgtaaaaattgtgcttattaatatttgatataatacctttaaaatagtataattaaagtattatttaacgtgttaattttctaagtctgtattgagagtacagataggaaaaataaaatttaaggaaaggataaaattataaaaacgaccaaatgaattatttaggtcagattacaaaatgagataaaattatagaaaaaatttagaaacggattaaaaaaataaaaaggattaaaaagaaaactaaagtaatattaaatttgaatttaagaacaaaatgaaaaactaaaatataaatttataggaaaggcaaataaaataattttatgatttgcagtatggcataaagtaacaaatttatgactgatagtatgaaaataacaaatacggcaattatgcagggaaaaattacggaaaatttgttgaaaagagggatgtagagatgttcgggtataaacaattattaaattgtatatttgcatctgatgatggaggtggaaggtacctcgtttttaatcagaacgaaaatacatggattcttccggcagataaattgaaattggcgattgaaatgtgtcagccttattctaagaaggatcagaaaagaagagatttaattttaacggtaaaggatgttggatttgcgcttcgcaaaatgggagttgagacagttaacttattgttacagccacagttaaaagaatatatagacggattagttggaacggaaaattattatgtagcagcttatatgggagatatttcatctgaattaaaccaaaaagttacgctacagatttttacgaatgagaagatattgtgctatttgagaatttctaattcttctgaagttattaatgtgatgaagcacgagatagatatgattgactttttgcatgaaaaagaagtagcaaacattcctgaaataatagatacgtctattattggggatttgcatatttttgcacaaaaaagcgagaagaaactttcagaaaaagttaaacttgaatttgatgataggcatatgaagtgtcttaaagacattatggacaaaacaaagatattatgtaaatatgaggagacagatttatatagattaattcagaaattaaaatccgaaataaagataaagttccctaaaaatgagggaatgatattacagcattcaattagaattatagaaaaccagcttaaagaaacagaggattattatgcggttagtcacggtgatttttcgccttggaacatttattataatagcaaaaaagaagtgtgcatgtatgactttgagtatgcgcattatgagatgcctgaatacgtagatgcatttcattatttaaccaaaatgtctttatacggtttgcagaatgatggcgacaagacgattgccgtgtatgacaaatataaaaaattattgtcacagtacatagataaagatactgattttgtgtatttatgttatttgattggcataatcagttcttatagtacaaatgcggcagaaaagtttagcatttatgcatacaaatatttagattggatagcaattgtttcttatttaaatagtagattagactaattgggttgaaaaattaattacaaattatgaaaaggagaaaataatgggagataagaatattttactattattagataggatggaattttgtgccctaaattccactgtattaagttatgtcaaaaatatggataggaataaattccattttgatatattagttgcagcaaatcaattaggaagtatggagaagcagtttagcaatgaaggatgcaatgtattttgtttatgtgcgagtacttccgatagaaaatttaaaactaaatttgcagaattcatccagaaaagaaataaatacgatgttgtacattcttttttgaaaaatggaatggtcgctttagctgtggcaaaagaaaatgaaataccggtaaggattattaactgtagtgaaaatgacgtcgctcataatagaaaaaataataaaaatgatgaaatcacacacatagtcacaacaggaaataacaatcaatcggataatacagctgcatccggtaaaaagaatgctgatacgaatgaaattaatttggataataatggaagtaaaagtgttaatcgggaaatatccggagtagaccatgttaacacaaatgcagcagtgacaaatgaaatcgatgaaggtaatgaaggcataatggtgccgaatgaaaataaagaggaaattgtttctgtgaataaggcagttgatgtaattgaatatgagtttaatttagatactgcaaaagagtttagaagttctcttggaatagatgacaaccagattgtttttttgcatattggaaatataagtgaccaatttaatcaggaattttctatagaaatatttcgtgaattaagagaagttaaaaatgcatgtcttttatttataggtaatgaagataataagaaggaaataaatgaaatcaaattctttaaaaagtatgcttcgagatatggatttgaagaaaggttgtattttcttggatctatggaaaaccttgataaagctttatcggcatcagatattattctggctccatggaaaaagacagcattgacaacagcacttttggcggcacaggcaagtggcgttaaaatatttgcatcagatgttttaagcgaaaagattaatgttacggatacagtgcaatttttatcattaaaaaaaccggtacgtgcatgggcgtgtgagattatgaattttatatttaatgaagataaaagaattataagcacaaataatcagatagaaagccgtaggcatctatcagagcataattgcaatataattttaagaaatggatatgatattattgataatctaaagaagataaataaaatttatgaactatgagactaaagtgggatttctgaaatgtgtgattagaataggatctctgtaattcgagactaaagcaggatttctgaaatgtaattaaaaaatacggctgaatttcaaaataaaattcagccgtattttttggagattcataataactaaatctcatattactattaaaaaatctaaagcatctaagcttttatattatcattctatagcgattagtattaaaaattagtctgaaagaggaattcctctgtgaggtacagatgttgagaaaacaatctgagtctttgtgcttccaaacttctgaagttcgccgataaaatggtcaagttcttcagtgcttttaaacattacttcaataagcattgcgtattctcctgttacgcaattacattcaataacgttatcacagctctttatgtatgggtagaagtctttcttctgtcccggttttacttccaaattaataaatgccttaatatgatatcctaattcagcaggattgattattgcattgtagcctgttataattccggctttctcaagacgttcaattcttgcagaaactgccggggatgaaagaaacacctgactggctattgccttaaggggggtacgggcattttcgtgaagcagtctgataatttgttcatcaatgtgatcaagttcatgtctcatagtagttctcctttaatttcatattatttttcagcctgttattaataaagttaagtttaaactttattttaacacagatattataacacacactttataaaaattacaaaggaaaatttactaaataaagaaaaaaggaagaaaaagttcataaaaaaagatctaataaaaaataacttaaaataaaacaaattaaaaaacttttttaagtaaaaatttatgatggaaataaaacatatttaattaagaaagaaaacgttcaaaaaaacttttgcacttttattagtgaaaattttattgtgaaaaaattaacaaaatacttgataagtttgaaataaaatgataatctattgaaatattaatggggatttgaaataaagtttattttcttaaataaaaaatgtatataagttaaataaaacaagtaaaaatacgatatagttaattttgttaaatgctggaaatgataaactttattagcctcaaaattattaaaagaaaaattgaaaacaggaggaaatttgaaatggagaatttggtttatttagctccgatagcaggtgttattgctttaatttttgcagcatacaaagcagtggttattggaaaagctaaacctggaaatgaaagaatggtagaaatttcagacgccattgcagaaggtgctaaagcatttttatattcagaatataaggttttagttatttttgcggcagtgctttttatagttattggatttggagttagctggcttacagccgtttgtttcttagttggagcagctttctcaactttagcaggttattttggaatgacagttgctactaaggcaaatgttagaactgcaaatgcagctaaggaaagtggtatgaataaggctctttcaattgcattctcaggtggtgcagttatgggtctttgcgttgtaggtcttggtattgttggacttagcgttattttcattgtgcttaatgctacaacaggaattacttctaattcagttagtatacttacaggatttagtttaggtgcttcatcaattgctctttttgcaagagttggtggtggtatctatacaaaggcagcagacgttggtgctgaccttgttggtaaagttgaagctggtattcctgaagatgatccaagaaacccggcagttatcgctgataacgtaggtgacaatgtaggtgacgttgcaggtatgggtgctgacttatttgaaagttatgttggtgctttagtttcagcagttacattaggtattgttacaacattgggagatgctacatcatttatgacagctcttttcccacttgttattgcagcaatcggtattcttgcttctgtaatcgcaactttctttgttagaggtaaagaaggttctgatcctcagaaggctttaaatgcaggcgaatatacagctacagttttagttattattgcatcagcaattttaagcaaagtatttttcggtggattcgatgcatttatcgcaattatttcaggtcttatcgttggtactattattggtaaagttacagaaatgtatacttcagaaaaatataagagtgttaaagaaatcgctgaaagctctcagacaggttcagcaacaaatattatcagcggtttatcagttggtatgaaatcaacatttattcctatcatcatcgttgcaatcggtattttagttgctttccattttgctggaatgtatggtatcgctcttgcagcagttggtatgctttcaacaacaggtatgacaatcgcagttgatgcttatggtccaattgctgataatgcaggtggtattgcagaaatgtcagaacttgatgaaagcgttagagatattacagataaattagatgcagttggtaacacaacagcagcaattggtaaaggttttgccattggttcagcagcacttacagctttatcattatttgtttcatttgctgaaacagcaggcattacaaaagaaggaattaacatccttgatgctcctgtagttgcaggtttattcattggtggtatgcttccatttatgttctcagctttaacaatgtcttcagttggtaaggcagcaaataagatgattgaagaagttcgtcgtcagttcaaagaaaaaccgggaatccttaaaggaacagaaaaacctgactataagacatgtgttggtatttcaacacaggcagctttacatgaaatgattattccgggtgttatggcagtagtagcaccattattaatcggattcttactcggcgtagaagctcttggtggtatgcttgcaggtgcacttgtaagtggtgttatgatggctatcttcatggcaaacgcaggtggtgcttgggataacgctaagaagtatatcgaaggtggtttcgcaggcggaaaaggaagcgatgctcataaggcagcagttgttggtgatacagtaggtgatccgttcaaggatacatcaggaccatcaatcaatatcttaatcaaattaatgacaattgtttcacttgtatttgcagcagtaattgctcagtacggcggaattttattctaaagacaataaaattaaaatatggttacaaactattattagttttaacaatacattatttcctatatggaaaaacaaatcttataactttagtattacgaaaaaacagaggatgcgagtttataacttcgcatcctctgttttttagggcttagacatgtgaaacaaaataaaatatccatttctcctaaaagttgatacctaatatatagaaaattaaatggcagtttgcaccttgtagaaagtgacacaggcattaaaacatattttatatattacgatgtttcatctgcgctttaatagaaagtggcacaaatatactaaacaacataaattagtataagtggaatttagaatgaggtaccatatgcagatatatgttgtggaaccactggatacagttgatagcattgcaaataaatttggaacaccggtagaagaaataatatttgcaaatcagcttatttatccgtataaattagcagttgggcaggctcttttagttgaatttcgaccaaatcagtatagaacaagaagagtaataaatggctatgcgtatccttttataagtaattatgtgttgagagtaactttgccgtatttgtcaggattatatattttttcgtatggatttactaaggaaggggaagttgtgtctccggctttagatgaccagtggatgataaatgaagcctatgaaaatgataccaagcctgtacttacgcttactccatttgatgaaaatggagtatttagcaataatttgattacagctctagttaataataagcaggcaattgaaaacctgataggcaatttgatttatttaatgaatgaaaagggctttgcagggcttgatatagattttgaatatatttataaagaagacagagatgccttcacaagttttgtcgcagaatgtacaagacgaatgaatgagtatggaatttgggtgtcagtggcacttgcaccaaagacgtcatctgaccagaaaggtttgctatatgaaggaaaagattatggtggacttggtgctgccgcaaattcagtccttttgatgacatacgaatggggttatacttatagttcaccgatggcggtggcgcctattaataaagtcagacaggtaattgaatatgcactttcacaaattcctgtggcaaaaatcgatataggaataccaaactacggctatgattggactttgccatatgaaaaaggtgtgactaaagctaagacaattggaaatgttgaggcaattcaactagcaattaataatggcgctacagtacaatatgatgatgtggcacaaactccattttttaattacacaatcggaaatgaaatacatgaggtatggtttgaagatgtaaggagcataaatgcaaaattaaatttaattgatgaatacaatcttaggggggcagcttattggcagataatgagattgtttagggcaaactggctgcttgttgaaagtaagtttgaggtaaaataagggtggtgagtataaaatgaggatgataagcaattacggatgaaataaggatattattacaattttataaagtaaaaagaaggctattatttttgttaatgctcaaaactaaaatagtagtcttttttgtttgctacagatattaatacgtagtataatcttctttattagtgaaattcattatattcttaataatgatattaagaagcggaatagttaattccttatttaatgtagacaacagaatagtttgattgttatttaatctaaggaatagtattcgtaaataattgtagcagaaaggaaatgtagtttaaaaatatgaatgtgtttattaattgtctggtattcttttttatttatgcttttcttggatggtgcgtcgaagtttcgtttgttgcaattacaaggggaaaagtagtaaacagaggatttttgaatggacctgtttgcccgatttatggagttgggatggttggaatcctatatgcactagaaccacttaaggataatgcgattgtgttatttataggtggtgtggtaatttgttcagtgctagaattatttaccggttggattttggataaaatattccgtatgagatggtgggattattcagaaaatagatttaatataggtggttatatttgcctggagtttagcataatgtggggtcttggaagtatgattatggttaacatgattcatccaatgatttatggtgttgtaagtaagattccgcttatggtaatatatgctttgttagtaatatttgcgatagcatttattattgatataattgtaactgttaaggaaattgtaggatttaagaagagtcttggacagcttgaaaaaattgctgacggccttaaagatattggagatcagcttaaagatgtggttggaaattcagcaattactgtttctgaaaaaacagaagaaggcaaggaaaaacttgcagaagcgacggcaagtagtcgtgaaaaacttgcagaagcaacagcaagtagtcgtgaaaaacttgcagaagcaacagcaagtagtcgcgaaaagattgcagaagcaacagcaagtagtcgtgaaaagattgcagaagcaacagcaagtagtcgtgaaaaaattgcagaagcaacagttaacagtcgcgaaaaaattgcgagtgcatatgagacaagcattgttgaattaaagaaacaaaaaatagaaatggaagctaaatatgcagttatgcttttgaaagcacagaagttaggaaagaggcaggttaaggcctttcctaaacttagagtcagtggctcaacaattagtgttagagaaagacttgctgactttggaaataagcttagtaaaaaataatacaaagacataacattaggaggagaacatgaacattaaaggacagtcatttttaaaattattggattttacaccaaaacagattggggaatttattgatttggcagcgcagttaaaggcaaaaaagaaaggcggagagctcgttgacgtattaaaaggaaagaatatagcaattatatttgagaaaacaagtacaagaacaagatgctcttttgaagttgcagctcatgatttaggaatgggagttacatatttagacccaacaggttcacagattggtaagaaagaaagcattaaagatactgcaagagtattaggaagaatgtttgatggtatcgaatatagaggatttgaacaggaaatagttgaacagttgtcagaatatgcaggagtacctgtatggaatggacttacaaacgaatttcatccaacacagattttagcagactttcttacattaaaggaaaagtttggaaaattagaaggccttaaatttgtatatatgggcgatgcacgttataacatgggaaattcgcttatggttggatgtgcaaaaatgggaatgcattttgtagcatgtgctccaaaaaaatattggccggtacaggaacttattgatgaatgtcaggcaattgctaaagaaacaggagcaactttggaatttattgaagatcctatggttgcaactaaggatgcaaatgcaatctatactgatgtatgggtttcaatgggcgaacctgatgaagtatgggaagaacgtatcaatgacttacttccatacagagtgacaatggatttaattaacaatgctgataaggatgttgtatttatgcattgccttccggcttttcatgatttagatacaaagattggcaaacagatttatgaaaaattcggacttacagaaatggaagttacagatgaagtatttgaatcagaacattcagtagtatttgatgaagctgaaaacagaatgcatacaataaaggctgtaatggctgctacacttggtgcagaattttagtaagaatgtgactgaaaaaatataaaaatttaacagcacaattatggcaaatgtaacaactcgagtgggataacctgctcgagttgtttataaataatagaattgcatatttgattaataaattagagatacataagttaaagtgataataattaaaaaacaagatattagaatggagaagtgaatgagatttttacatcttgcggatttgcatattgggaaaagagtaaatggattttccatgatagaggatcaaaaatttgtttttgaacaggtttataatgtaatagaaaatgaaaagatagatggaattattatggcgggggatatttacgataagccggttccgtctgcggaggcagttaagttatttgacgaaatgttgacaagactcgtgtctatcaatttgccgatttttgtaataagcggaaatcatgacagtgctgagagaataggatttggttcagatatactgtctgcggcaaaggtttatatgtcgagagtgtataatggcaatttacaaaaaatagaattagaagatgactatggcaaaataaatgtttatttattgccattcataaagccggcaacggtaaaaaatatttataaagaggctgaaattaaagactatgatgacgcattagagtacgttctaagtcaggaaaaaattgataaaacaaagagaaatgtgattgtgtcacaccagtttgttacaggtgcgttgagaagcgaatcagaagaagtttcagttggcggacttgataatgttagcgttgaaaattatgaagcatttgattatgttgcgttaggacacattcatagagctcagcaaatgggcagggaaagtgcacgttatgcaggaacattgcttaagtattcattctcagaagaaaaacataataagtcaatgacgattgttgatttaaaagaaaaaggaaatatagaaattaaagaaattcccgtaaagccgttacatgatttaaagacaattaaaggaaagttcagcaaaataacaagtgaagagttttacaaagaattaaaaaaagaagactattacagagcagtgcttacagatgaagatgatattttgaatgcaataggaaaattaaaaagcatttatccaaatctgatgagcatggaatatgacaatacgcgaacacgttcatattctgttgttgataatgttgaaacaggagagactaaatctccattggattattttgaggaattttttgaaaaacagaatggacggaaaatgtcagaaaagcaaaggaattacctgttggaaattttaggagaagcaagggaggaaagccatgagaccaattaaattagttatgtgtggttttggaccttatgcagacaaaaccgtagttgattttacattattaggtgaaagcggattgtatttgattacaggtgatacaggagccggaaagacgactatatttgatgcaatttcatatgctctttatggagaggcaagcggacaggtaagagaagtgaaatctcttagaagcaaatatgctgatgatgaaacggaaagctatgttgaattagaatttgaatatagagatgaaaaatataaaatcagaagagttcctgagtatatgcgtaaggcaaagcgtggggataaaatggttgcccagaaagaagaagcagaattatattttctaactaaggacagagaaccaattataaataaaaagaatgtaaatgatgcagttacagaaattataggactagatagaggacaattctctcagattgccatgattgcacagggagattttatgaaagttctgcttacgggaactgatgaacgtagtaaaattttaagaaagatatttaatacaaatgaatatcttgatttacaggaaaaattaaaaagaaaaaagaatgaacttaagtttaagtatcaggatattgagaagtcaatcaaaaattacattgcaagtgttcagtgtgacaatgatgaaaatgataaagaaaaattaaaacagattattgatgacaacacattttggaagacagaagatattaataattttattttagaacttattaataaagacaaagatttgttaaaaactttagaaaaaaataaaaaagaagttaataagaatcttgaaaaaattaatgagacaattggtaaaacagaaaatgttttggcaggtatgaaaaacattgaaaataatgaaaatgaacttgctaaagtattagaagttatgccgaagctcttagaaaattataatttgcaaaaagagacggaaagtgaacgcgaaaagcttgcaactgaaatcgagatagaaaaacaaaaacttgaaagctacaatgaacttactaaagaacttgaaagtttacataacagacaggtaaatttaataaaattaacaaataaagaaactgaaattaaagacgatgtagaaaatattgaaaatagtattttgatttctgaaaaaaggcttgaagaaataaaagaatgcgaagttgaatttgaaaaatgccagagcagcattaagagtgttgaggataagataaatctttattctaatttgaaaaaattgtttaaaaaatatgttgaagtcaaagatgagcataagtctttaaaggaaaaatatgtggaaagcgttaatgagtataataacgcatcacaaaattatgaaagtcttatggctaagtacatggatgcgcaggctggtatgcttggacaaaatctgaaagagggagaaccttgtcctgtttgcggttcgacaagtcatcctcatataactgaggttaaagatgaaattccgtctgagaaagatttgaaaaatgctaaaaatcttagacagaaaaaggaagagaaaagaagtgaaatttcaggtaatttgagggcgaaaattacagaaatcgattc

SEQ ID NO: 945 - DNA, 23852 bp, unidentified
  source 1..23852: mol_type = unassigned DNA
ctactgcctgttctcccgcaggaagtcgatagcctgcagataaccgtccagtccctgtccgtaaatctgcctgttacataccggtgctgtcacagaaatcttgcggaactcttctctgctcgtaatatcggaaatatgaatctccaccttgggaatatccacgcttgccagagcatcccggatggcatagctgtaatgggtgtaggcaccggggttgatcacgatcccctccgttccgtcagaataagcctcctggatcctgtcgatgatggctccttcatggttgctctggaacacctggatctcctctccggtttcttttgcttttttgtcgatcagatccagtaaatactgatagtcctgtgttccgtagatctttttctcacggattcccagaaaattcagattcggtccgttgatcaccagaattttcatcttttttctctccttttttctctgtatgtctttctgcttccgtaactgcagctgtaactcttccgccagttcatcggaatgcctgttatccacatccagtataatgtccgcacattccgcatagattttgtcccggatctccagcagttcccggatccttgtcagaggatcctcacactgtagcaggggccttgtagtgtcatttttcagccgctcgtagaccacttccggcgacactcgcagatataccactgttccacactgatgcagcaggggccggttcaccggattgaccggagtgcctcctcccacagacaggatacgttcgtatttctgttccccgcattttcgcagcagttccgtctccagttcccggaaataggattcaccgtcatccgcaaaaatctgtgtgatgctcctgccctcctgtctctcgatcagcttgtccgtgtcttctaccggcatccgtagcagataggacagtttcagtcccagtgttgtcttccccgatcccataaagccgatcaggacgatattccttcgtttgtgtttcatttttttattttccgtcctctgtcttttttgctttctgcatccgttcatagactttgtctgcaagccagggttccacctgacagcctgtccacaattcaaaagcaatgattccctgatagagaagcatcttcgcaccattataggcttcaccgccctgtgcctccaccagttccataaaccgggtcttcggtggattgaagatcagatcatatccggtgtgtactctcttataaaatgtgggatcctcgatcaccgccgcatcacagtccggatacatacccacactggtggcctgtattgccagatagcgttctccttccggcagcgtatcatacgcatctatagacagggcttttgcaaatttccgtttttttccggtgaggtgattcacctcgtccgctatgctctgtgccttttccaccgtacggttcaggataatggcctctttcgcccccttatccaatagcatcatggctaccgctctggctactcctccggctcccaggatcagcactttctgtcccttgactttgacgccgtcctcgcacatggcccggtacaatcccggcatatcggtattgtagcctttatagcccttttccgtgcggaccagcgtatttacagcaccgatatttgatgccaacggatctatgtcatccaggtacgggatcacatcgcttttatagggaaccgttacatttattcccagcagattcagtgcaaaagcacccttcacggcatcctccagtcttccggtctccacatggaacgggacataggccagatttttcccaagcaccatggacagagtattgtggatcaccggagacagggtgtgctccaccgggtttccgatcagtccgcaggttctggtatagccattgatatcattcagcattttgatttcctttccgacgcttttctctatggtagaaaaacagtacgatcttttccagatatctcttgagtacgatctgaatctcttctttcggatgaatgggtttcgtcagataggtcacgatcccgcatttcttagctccccacacatcggtgaacagctgatcccccacaaaaagtgtggtatccgccccggtatgcatctgttccatagcccgcagataaccttctcttccgggtttcccggccttatagatataggaagcacctactgcatccgcaaaactttttacgcggggctccttgttgttcgataacagcagtgtctgaaatcccagttcccgcaatctgccgaagaactctgttgcctgcggtgttgccggtgccccgtgcggtacgagtgtattgtcaatatcaaaaatgattccgcgatacccctgttcatataatgttctgtaatctatgccataggcggaatccgcctcataatccgggtaaaactgatgcagcatctgtctcgcctttcgtctgttttataatgtaatcggtattctcctctagggaaaatgcctgaaaatatgcttcttccaacggaatccacagctgcaggaagtcctgtagtatgtcctctccgttcctcgtgcggatccgctccgtctgcgtctcatggtctatgtccagaaatactttccggtccatgtattctcccagtaccggatggcagctgtaagcgccttccacgaatacaaaaccgctattttgtaccgggagccagtctcccggtgccatacgggaacagtcaaatctctgataggaaaatgcttgtcccgatgcaagcttcggtatgacttccgtcaaaaatcgttcatagtgcacatttccgccaggctcgcttctgcgctcctgcgtccgaagtgcaggcggcagaaaaaaatcatccatatggatcacatctccgcccagttcttttgcaagtctggcagccagtgttgtcttcccggcggcgcatctgccgtcaatggcaataatgcgcattccggtgggaagcacacgcaattcctctgtcagctcagaaacagttctcagcgatctcatccacagcctccgcaatgtattctcccaggcgtctgctctcgactcccacgatagtggcatggcatttactcatggggatcaggatcagttttgcatcattcgaagctaccgctgctgccatggtgggggtgatctcacctaacatggcatccgccatgacgattcccaccggtcctacgatcacgtctgctctcttactgttatataccacggcattctccccggtggcaccgcttgtcacgccgctcttcatcatattcgccgtagctgtggcgttggttcccactgcgatcagttccgcctccggaaaccgttccttcagagcctccagcaggcttctgcctacgccgccgccctggccgtccattaccataatacgcataactttactcctgccaaaaataatacatacatgttccatgatagcatggcaaatgcttttttgcaatttatcttgacaaaaaaatgcccaccctttattatgtattatgcttcaggaaggagcttaacgccagaaggcatatttatcccagaagggaaaagtgtgccgttctggcttttttgttactgttcaggtttctccgtctcggagaggctttttgcgaatggagactctgaacagttatatcttatcaggaggttttccatgaaaaaattaactgttttaaacaagagcatcctcactgctctgtgtgttgccttatgtgtggttctgcccatgactctgcacgccattcccaagggcggtgtcctgttctcccccatgcatctgcccgtgcttctgtgcggtctggtctgtggagcacctttcggtctggtctgcggcattctcggacctctggtatccagtctgcttaccggtatgcccgttttcggatatatgcctgtcatgatgatcgagctggggctctatggtctgatcagcggtctggtcatgcagtttcttcgcagcggtaaactggttgttgatctgtatgcagctctggtcattgccatgctgggcggccgtgtgatcaccggtatcctgcgcgcactgatctttgcaggcggttcctacagctggtctgcctgggctgccggatatttcgtatcctgcctccccggtatcattatccagctgattctgatccccatcatctatgttgcactggaacgcgctcatctcctgccggttcgttacgctgctgtttctgctgccgcagagaccgaagctgcataaatccatacaccctcgagccggccggctcatcgcatcacagcaaaatggctcctctgtcttacgacaggagagccattttttgtctgtagatccgtatgaaatagaggatttccgccactgcggtgatactccatgaaaagacatacagcagatacagggacggtatcgtatggaaataggcaaatacggtgtagacccagattacacggaacacgcaggagcccatgatgacaatgaacataggtataatgctcttgcccatggctctggccgccgcaatggtacagtccataaatgccgaaatacaatacgaaaatcccatgattgtcagacggtacataccggcattcataactgccgcatctctggtaaacagggacaaaaacgctcttccgaaaaataccagtgacactcccaggatcagaccgatggcgaaggaatatgccaggctgatgaggtaactgttccgcacccttttcttcttgcccgcaccgtaattctgtcccataaagctgccgcaggcggtatagaatgccgccatgacatcgtataccatggcatctgcattggtggctgcggaattgcctgccaccatggtggcatcaaaggaattcacacccatctgcacaaagctgttggcaaactggaaaattacattctgcaatccggagggcattcccagcttcaggatatccttcgtaagttccggatccaaccgcagctttcccggatgcagggcataaatgtctttgcagcgaagcagtgcctgcaggattaatgctgcagatacatactgggaaatgatactggccaatgccactcctgccacatccatatgacagacgatcacaaaaaacaggttcagaataatattcagcactccggaaaaaccaagataatacagaggcttcttcgtattccccactgcgctgtacaccgcattaccaaagttgtaaatggccagcgccggcattcccagataatagatccgcaggtacaatactgctttgtccaaaagttcctctctggtcttcagcattgtcagcatccactcggataagccgactcccagtaccagtaacagcactcccatgatcaggctgaccagtgcggcggaatgaatcgtcttcgacaggctttccctatcctttgccccgtaatacagtgccgtcagtacattgataccgccggacagaccaatgaggaatccggtaaacatggtgaccagtgtggctgtggaccctaccgctcccagcgacagggaaccggcgaactgaccgatcaccgcaatatccgccatgttgaaaagcacttgtaacagattggacagcattaacggcacgctgaagatcagtattttctttcctaagggtccttccgtcagatcctgcatattctgtttcattttcaatcctatccttttatcttcttcccatatttgtatctctgttattactcttcccatcagcgtccactctgacgaaaagaacggtcaaagagttttttgctccttgaccgttccttattctagcatatcttatctttcttttctaccggaaaatcaatttttttgacaacttatgctgcctctttttctgaatttttcccggcaccgaacagcttgcggatgcagctgtaagcaaccataactcccagtaccataagcagtatggctacgatcagctgtaagccgtctaccaggaaggttgcctgtccggatgccacatttttcaccagggcaactgtcttctggatcaatgcagtaaaggttacgaccagcatcattcccatagggaagtacagtgtccagccggtacgaccggtagtctttaagaatactgacagggcgatcaataccagtgctgccagcagctggttcgcagaaccgaacagcggccatacattgttgtatccgccaagagtcagcagataaccgaaaaacaaagtgatcacagttgcaaaatacttattggtcagaactctctgcacgggagtcatctttgcggtatctgtggtgtctcccaggaacagctcctggaaggacatacgcccgattcttgctacggaatccagagaagtcagtgccaatgcagatacacacatggtcatgaatacagttgctacggttacgggaacccccatcttctccaggaatcctgcgacaccggaggagaaaatggagaacggtgtaccatcgggcttcgtgccattgactgcaactgcaccgacaactaccagtgcaaccacacccagcaggctctctacgatcatggcaccataacctaccatgggcatatctttttcattactgatggtcttggatgaagtaccggaggataccaggctgtggaagccggataccgcaccgcaggcgatggtgacgaacagagtcgggaacaggctgctgttacctacctgaaaaccgttaaatgcattcagctccatatcgggatgagccacaaccacaccaagtacggcaccgatgatcatacccagcagcataaaggtggtcatgtaatctctgggctgcatcagaagccacatgggcattacggatgcaaggaacaggtatgccatgatgatgtatatccatgcagtcttggaagcatagatgggaagatgcatacctacagcgaacattactaccaacagaccgatggctacgactgccttgacccactcgttcatcttgccgacctttttctggatcagaccgaagatcactgctacaacgatgaacaacatggaaatggatgccgcactgccgttggcatatgccacactggcatcttccagtccggtacctacgaaggtacctgccaccatatcggtaaatgctgcaatgactaacagagtgaacagccagcagaacagcatgaacaactttctgccggtcttaccaatgtatttttcaatgatcattcccatggattttccttcgttcttcacggaggcatacagcgcaccgaaatcctgtacggcaccgaagaacagaccgccgatcagaagccacaggagcacgggaacccatccgaataccgatgcgaggatgggacccgtcacaggacctgctccggcgatagaggaaaactgatgagaaaatacagtgaatttggaggaaggcacgaagtcctctccgtcttcatgggtaaacgcaggcgtcttcgccttctcatcgattccccacttttttgcaagccatcttccgtagaagacatagcctgctaccagcactaccattgcgatcagaatgattaccaaactgttcatttttgtttccttctttcttgtgtcttgttgttttgtcgtgacagaaagaaaaattctgattgcccgtaaaacaaaaaagctttccgtctccggtgctttataagcactcaaagacgaaaagctctaagctctccgcgttaccactttgcttgccatgttttatcacatgacctcttgttcccatctccatgaaatacaaatatctcatttccaacaggcttctaaataacggtagaataccggtgacacctacttaactgcttcagtgtacttctcacagaggatagtctgtcatactcacatgccgtctcacaccagccggcggctctctgaaatgcttccgtatgcagatcttgttctgttcatcgaatttcactttctgttcgatagcaaagataccactctgattttataatgtcaatagttttcttttaattttttgttgatctattttatcattttccctttttatccgcgatcagaggtttgatagcggaataaatctcgctggtacgtttgctgtccttgaactctttgttcagggcattgttgattccctgtttggtcttgtactggcggatgaattttaccacctgagggacgatggcctggtcggaaagcaccttttccactgcctgggccagttcatccggttcttctgctgccttcttctctgaagccttcttatcaacagttttctccgtcgttttcttttctgtcatatttgcagtattcttcttccgggtatttccgctctttttccttaccgtttttttcacgggttccacaggcacaggttccagtatctcaggcaacggttcttccaggatctgcacgctcacaaatgctggctctgcaatctcctctgcatccacttccgccttcggttcctccgtcattaccgctgttgcgttctctgtctcctgttctgtgatttccactgccatcggctctgcagcttccaccgacagagcctgcacgctctcctgttccgtactttccgttacttccattgcattttcttcggtcaggagattttgttccgccattggattctttccccacaagagattacggataatgcgcacgggaactccctgtgctttccagtataccatcagactggtgaatccattgtccttggtcacgataaagtaatccgggtgtatcccttccctctgctgctcacagatcaggtaaccgagatacgttgccagctggaaatccagtgcattcttggtacccactgctaccttgtggtaaatgatctgtgctttcgtctcattcaacttccgatgcaggtcaaaagtcatgctgtccgcattgtcactgtagaaaatgcagacggtatcctcctccgccagcagttccactccctccatgcctcggctctttacattttcaaaatcaatcagataataggccattatttctcctccccatttgttgtatcaatttcttccgctttaccagtctcttccggtgttccctgctccggttccgcaggtgcatccttctgttccacagtctctacaggctctgtgttttctaccggtccggttgtctccggcgtcccggactcctctgcacctgcctgcggcttttcctccgtcacggcttccggctcttttgagatgcctgtcttcgttctgctctcctctgtggctttcttcttcgccggaagcttttcgcgaatgctttctttccagccggtgagcttctcatccctccggttcttccgttcccttcgctttgctgcccgttcctgtctggcctcttccttaagttccagtttttcctgttttctggcctgttttgccagtgccttttcttccagttccacttccttgacagcggctttctctatatcccggatatagcggtccgcctttttgtggttcttacggtccaggcggtatgggtcatacacaaagtacgataccgctcccagcaccagaatcaccacaccggcaatcgtcagtaccggtacgacgatcccatactccgtaaatcccagttcaaaacagacaaatacgatcagcatggccggaaacaacagcagatacagaattcttgtcaccatatccaacaatgcatgctgtcttttcccattggtcagaagtgtcccctcaatagcggtataaaatgccataaaaatacacaattccgaaccgaagccatgaagatatccgcagattccggtcagaatcagcgacagaaaaaacatgccgaacgccgttccctgataccaggcattgcggtactccgtcattccctgcagcttgtcctcactgatgccgtgcatccgatagacatccttgcggatcagccgttcaaattcttcgttataccgctgttcctctctggtattgcgcaggtggtcttccactgccttgctcatctgctcgatatattcctgctccttgcggatccgtttggttctgagctgctccagctcattctggcgcctgacttcctcttccagtttccgtacctttccgatccggggattctttaccataatctccggattctccggaagcacagttgtttcgttcttctcctgattctccattgggtcctctttccgtttatattatcatccaatagccttattatagattttccggcccagaaaaacaaccttttgttccctgttttcattgctttggctcttcatcctgtcactcgagaaaaatgccgcaagtaccggcagcattaccataatggggaataaataacgtacctgcactaccggccccagcaacatggtcccaaagtataaaaacggcagtaaactcatctggaagcaccagtattttcttcgatacaggcacaacaccatcaaaaagaacaggctccagctgtatagagatccatgaaaaataacggaaagcaccggccattcattaaagcagttaccactgacgatcttttccagcactttttccagtgccgggaatttcgaccgatgttcaatactgccatagccttcgatttccgaggaagtataggtaaagagcacaccataccttgtgtctgtgccatagcccagattttccgcccaggagaaatcatcccagaaccagtatcctctggtcagttccagaaaagcatccaggaactcgttcggataccgtttgcccactcgtagccagtctctcaaaaactgcctggaattctccgtatatgccgaagcatttaccgcgcccttgatggtatctgccagcggcgcataataagcatcccaatgatctctcggcacatatttttccagcaatgccgccagctccggatcctgcgcctccagttcctctccatgataatatgccactctggcaaactgctggatgggaacgctgtaagcctcgatcttcggagcctccagccgggtccctatggctgtctggatcacatttcgcattccggtctctcccagtaccagacaaatccccagaatcagaatacccagtttttcctttttcggccgcaggatcaataacagcagcataaataccgccaccgcatatactgcgttattacgaaactgcatcatcagacagccctcagccaccagaagaatgttcatgaggattttcttttttccgttgctgaaataatttctctccagaaaaagtaaaaagaacaacgtaaacaatatagtaaacaaggtatcctttgtggtacacaccactaaaaccgtgttgtatgggaaaagcgccagaaatagtgttgttaccaccaccggccattttttagcagtcatccgccagatcatggacgttgcataacccatgaccagagcatacagcaccatctggaataccgccatacaggccattcccgcctcgtaggatccaatggccgttccaatctgtaaaaacagccggatcagccatgtatgtgcaatgggctgcaagggataaaaccattccaggcccttatacgcttcgttgacctgtctgtgaaaatcgtaagacatgatgatcgggtaataagccagccctaccggaatcaggcacaggaaaataacgactgccgttactgcgaatacaatgtcggtcttccaatatctccccgacatcgttgcttctcctctcgcagagagtcggtctatcccgtcaagcaacagatttgcaaaaggaaatgctgcaacacttaagcacagcgcacggatcagaatcatccctttgccccggactccgcaatccgtcattcccagattctgcaactgatatcccatgaccatggacaaggcaaacaggaagctgatcactgccacataacagattctgcgcttcctgtcccttttctcctctattttccggagattttgctccgtctgctgcaacatagaatagattcccacagccagcagcacattcagaacactgtaatagatccggttcaccggctgtaagctgaacagatatgccaccccgtagacaccgcacagagtcagaaccgttctgcccgaagttcctttgtatttcatccatttatcctttgcaatattcaatcgtgagatgcctccatacatttatttccatatcttccactatattgaaatttacactttctgtcaatcattgtaagttcttttctatttgatatattgtatatatttaacaaatatagtaatgattcctattattatatttataatttttgcgcatttcttttttttataaaaagagatatactatatacagaaacaaggaaatgtttccacaaactcataaaccaacagaaaggatgatagattatggcaaaattatatacgatcactttaaatggcgttacagaggaaacttacaatcaggctaccgattatattcagaaaaacgcactgcgtctgaactaccggccggttgcttccaccattgatgtggaatttcccgatgacatcgatcccgacaaagctccggaacttagcgaagccgtgatccgcgaggtgcatcagactctgtaatttttttgatttttacttttgtaaaatagcaacgcaaaagtccgtcgatgctttaacgctccgacggacttttttgttgtgcccgctaacttgcggacacttttcgcatgaagacccttaaggttcaagtggttgccggtattcctcatataagatatccatgtgcagccagtcatagtggttccgcatatagtaacaatgcccccggtatctgccacttattctgaatcctgccttctcgtaacacttaatggcaggggtgttcgtttccagtacatccagatgaacactatacactcccagcaccataaagcagtaccgcaagagtatctgcacgacttcggttccaatgccttttccacgcaccgccttttctccgatgttaatggataaccaggctgacatatcctcagttcgatggtcaatatgacaatatccaatcaatgtgtctgtctctttcaggacaattcccatccgcatgacagaatggtctcttacccaaccgggcatccgggtgatgtccaccacagaatgcgcatgctctataaagacacaggtggtttcatccgacatccacttcgcgtataagccgactgcctcctcatcatccctcagtacggataaaaaaatttgatttccatctaatctgcatatatttttactcatcatgccaccttacatctgctctgtgtgttgcgaagtccttgatgttatttgaattataacatagaacttcctttttgggcactatattcttcgaacatccgccgcttacgcaaagcccaaagtctccgcagacaatcacatagtcctgttcgccttcacaatctcattcaggcgtaccggtccgtatccatataacatgcagcccacattataagcgttctccccctgattcatatattcctatgcttcatccctcttatcgtgaatatgaccgtaaaagtgcaagtgacctctgtaagagccattccattccgacatcggataatggcacagacatatctctttcccactatccgacacgtacatcatcctatcgatggagtcacaatatcccattgcaatctcattatccagcagcctggtatcatggttgccaagaaccagatgcttatgtccctttagttgactcagataccattccgcacttttttcgtttctatagcagaaatcccccaaaatatacgcattgtcatcatgatttactctttgattccataaggatatcattgcctcatccatgacttccacatttttaaaggggcgatggtcaaagtcaattactcgccctgcatcttgggcataaagggatacccgcagggtgttttcttaattttgccctgctttctgggcatagaagtatgccgcaggcaagggcggaaaaaaggaactgccgcatagacagcccgaaaaacatggattccgtgtaattacggatttctttatttatctttacttccaatccataaacacctcctttttagcacaaaaaaatcgccatctttggaaaaatgacgattcttcaagttttactccgtttacttccaactcattcttgcgttatatacattgtttacagcttcaatatagcatatgaaagagggatggtcgtggtcgttctgccgcaggtatctgtttttgatattcaaatactgcgttctgacaagctgccattttccccttttcttaatatacttagcctttttctgtattcctgcggaatgaggggctttgttccaatagtattcatcccgataagtgaaccctgtttttttgtgaataagtctgtaaaaatcttcctctgtatctctgcatacaatgcagacatccattgaaaactcggtaggatttcctctaacaaaatgaatttcccccgtagtcagagaagatgttgaatcctcacaatctcctaaatcacgctcgtttaacgccttattaaaggatttcctcgcacattcttttagatttatgcgatcctcaaaatcttcacatcttacaatctcaaggttgtaatccaaatctatcgacaacgaagcattttgtaccccgtccttaaatatatatacacgtttcatccgctttctcccttacaagcccatcatttcacgcacgacacggtctgccatcttgaccgcaccgacaaggatgagcatattgaataccagttccccgatatagctccacaccatcgtgaccgcagccgcatcgggattgaccacgggcggggaagccgcaaacaccgaaaagataatgcaggcaagcacgatgattacaccctcaaggcacacggcacaataactcttgataaagctcctgccgacattctggctcggctctcccgcaaagaagaaagagggacgggagcgattgcggtataaaggtacagcttgaaaaacctgccgtacaccgacattatcataatgaacgacagcactgtgatgaacagcccgccgatgagcgtcaccgcccataggggaatgctttcaaaaaagccgcagtcctccacggctgtcacaatctctgtcgacaacaccgtctttttgcgatttgacatagatgcgtcctcctttcgcatagttttagccactttgtcaaggtggctatgtaaacaagtacaagagaacgcaaaaaaacgcctactcttaaaatcaataagaataagcggctttgtaatttgccttagacatattcaattttcattctcttggtcggtgcatttatgaccttaaaaataagctcgtcaacaaaatccgtatcttttcctgacttaatatccttcatcatctgattaaatgaaactcttccctcccataatatgaataccgaattttaatccaagttcatgtacataagaagcaggtgtgtaaatccgcttccgtctgctgatgacggaaatctgccgggactgggctgaaaacatacccagtcaatctttccaccttcacacatcataaagaatctggtgccattatccaatacttcaatacccttttgtacatagtcagataatgcccattctccatctgcacgatccatatcataatccatagcgtcggaatctgccagatgctcatccatcagaataacccttccatcttcagccgtaaccgcttctgcatcagcctgtgtataggtaaccttgtatcctgcttccggtccgtccagtactgctcctccacggtcttcatagctattgctcggaagtgccttgacataatcttcatctgctattgctccaagatagtcagatgctgcctgaaactggggatggctcataccatcaccaataaacagaaaacatatttcggtgcttttgctgtttcttcttgcgtctgcgtttctgcagatacttctgttacgattgtttcctgctctgttgctgctgtactttctgtctgtgccggtgacggtgactcagaagaagtctggtctgctgcaggtgctccggagcatgctgccatagacattgccattacaacagcaagcatacccttcatcatactcttaattctcataatcgtttctcctctctgaaacatgttttgtttttcctctgcttcactatacaataccgttgtaaaaaccaatgtccaaagtaggaaaaatttgagtaaattccgacacttattttatgcagttctatctttatgagatttcatcaacatcataatacttaaaatcccggaagcaggcacttcctcctgtttcctctgccgcatagcagaacagaccaaaccgacaaccagtaaaatgatccagtttgaagtacagcttatgcacggttccgatgggtagccagtctcccttatttacccggtaatagcagcgtgcttcatccttcatgttacagaaatctgcttcaagacgaaaatccatctggtgtgattcaacaacagttccttccgtcatatccaatataccatcttcttttttatccagcataaggacttcatattttccatgatgttttgtaatgccaactgcagcataacagccctgcaacgcacacaaacctgcgacatcgccctctttcaatgcagaagcatcaacagtaacctcagctgcgcaggacggataactcatcctttgcgtaagcgtatttactgcctgtgtaagctctgtacaaacttcccgtgttgtaattgtataggttccctgcgatgcatccagatgataataccgtggatctggatcatgattaaactgccagcgcggaagcagcccattacagaaatcatcacttcccactaatggctgataaatatatcctggtctggtactgtgaacctctatttcttccggcacatgtccgttctgtccaaaaaccggaaaatgatccttccaggtaaccggaagcagaataggaatccgtccaactgctccggaatcctgaaacagcattgcataccactttccatccggcgtatccactattcctccctgtgccacgccctgtccacaatatccacgatcatcacaaagtacatctccacccgtgaattctccttccagagaatcactgtaaaagcatgcttccgtccgcatccagcggtctctcagggaatgaatcagaaaaatataataatagccgtttattttttgaatatgagaaccctcatagcctagctccgggttcttatgatcactgactaaaagacgatgtaatccgtccttctttggtgcagtcaaatcttcattcaattctgtaatccagatttcatcatttccatatacaatatagtttctgccatcctcatcaaataataaagagccgtcatgataaaagccttctatcagctgctttttccatggaccatctattttttccgaagtatacaaataagtcttacgggtatcatttgccacaaaacagatataaaatcggccttcatgataacgcagggaagctgcccacatgccctgtccgtaaatattatgaccgcttttcagttgctgcgcatccgtatgatccaacgtctcatagacataagtcacatgctcccagtgcaccagatcaaaagactgcagaatctcacagccaggcataaagtgcatggttgtggataccatataataggtgtcttctacgcggatcacgtccggatctggataatccaatcttgttataggatttacattcattgtttattcctttctgttttatctccatattctttctttgttctattctatttttactattttatctttgtttcttatccgtctgccttttcaactcttctctgccccatttcactattgctaatatcacaatctcacagtaaaatataataatcgaaaacgatcctgcaccatgttattcatcagaaatttccggtttgcacagatttaccgggaataaacagaaggagaccagcatgaaggaaaaccgcaaactattaaaagaattgcttaaagaaattcgcgccatgatatgaccaatgaggaggtcctgaatctgcttgccgtcaaagcctttgatccattcccttttatcctgcttaatctcgtgctgtcctgtgtagctgcgattcaggcacctcttatcatgatgagtcagaaccggcaagaagaaaaagatcgccaacgtgctgaaaatgactataaggttaatctcaaaactgagatcatgattgaagatctccatacattaacagtagtatgctttttagttgtacgtaaaatgatatgccctagcaccatgactctttaatgacacactaaggctctttggctcttccacgtgctctccgctccaaagctccgttccatttactccatcataaatctccagatcggcaagcggtatggatatgtcactgtctttatcacccagattaaataccgcgacataatatccaccctttgtatctgctgcaatccacaatgcatgctctataccatcgatttcacgtctccacacctcatgcgaatgccgtgcatttgcatgcatggcaagtatttcagaattggttaccagattcatagtgaattcgtcaaaccctgtcagctctcctcccagcatcaaaggagaacgcatgatactccagagtgtcagcatggtgatctgctcatcctgtgtgaaattcgtccagttattcacatcatatacctgccgtatcggtccgaccggaagcatatcggcatccggccagtgccctgcacctgcatgggtgcaccatttttctgctcttgaaaacatatcatataacagttcccacttatcccagaaatcatcggtgattctccacatattggaaatctgcttataaagctctgccttttctaaaagagcaggtcccggcgacagacttaaaaccatgggtcttccgcaaccatgcaatgctttgctcagcataatcagttcggattcctcatgtggcagttcccgtgcaatatcatcacatttaataaaatccacaccccaggaagcatataattcaaaaatactgttatagtattcccgtgccccgtctttctcaggatctacaccatacatatccgtattccaggcacagatactgtttgttttggcaatttcccgggcatgtctgtcactgttcatgatttttgtgttctgatgtacagcctgtcgtggaatccctctcataatatgaatgccgaacttcaatccaagagaatggacatattctgccaatggtccaaagcccgcaccgtttgctgcggaaggaaaacgatttactgcgggaagcagtcttccatactcatccattactacatccgcaaaaggatgatactcattggttgcagcataaggctcataccattggatatccaccacaatatattcccaaccgtactccttcagatgctcagccataaattcagcgttccgtcgtacgatatcttctgtaacagccgctccataacaatcccagctgttccaccccataggtgctgttttcatcttcatctgttttataccctctcgatatcctgttaattctgtccgtaatatgcatctgcaccatgcttacggaaataatgcttatcctgtaattcctgcggatgaatcagctccagcatgaccgactttccgcagcggcggataccggtcataaccttgatcagctccgttccacttcggtccgcgctgagcaaaggtccaccggacctttagcgcccttggaaagtaagacaaccgtctcgacatttgcggtccaggggaactggtccacggccacggccttgtccacgcggtaaccgttctccagaaacacttccagatcccgcacaaggctggtgggtttacaggagatataaacgatatgatccacgccgtaagcaatgatcttcggcagtgccttggggtggatgccgtctctggggggatccaggatgatcatatccggcttctcttccacttcgtccagaaccttcagtacatctccggcgatgaattcgcagttatccagtccgttggcagcggcgtttttcttcgctgcctccacggcttcctccacgatctccacaccgatgactttcccggcggccggtgccatgagctgtgcgatggtgccggtgccgctgtagaggtcgaacacagtcttgtcgctgccgcccaggtcgcccacataatctctcgccgtctggtacagtacctccgcactgtaagagttggtctggaaaaaggagaatgtggagatcttgaatttcaaccccagcagttcctcataaaaatactcctgtccgtataacagctccgtacgatcactctgcaccacatctgcaatggaatcattggtaatatgtaagattcctgcgaattttccggctagcttcctatcctgttccagggaaagcagcagatccttaaatcctgtgatcagcgcatccacatccaagcttccttccaccgccgtctctccctgccagggatcctgggaggtcgtcaccagtgccaccagaatctctccggtgcgggatgccttacgtaccagcaggtgacgtaagtacccctcatggctcattctgtggaaaaagcttaccttcgcccgggcaaagtaatctctcactgtctgtaagatcaggcggtaatccgcatccacgatctcacagtccgctacggtcactatatcgtagaagctgcctctcttatgcatgcccagcgccagcggtccgtccttgtactcgtctccgaaggaaaattccatcttattacggtattcataagccttcgggctgcccttgatgccctcaaaagcccaggcttcctcctgcttgtttaacacactgtccagcaggcgttttacctgttcctccttgactttcagctgttcttcgtaaggaagagacagataggtacatccgccgcacaacccaaaaagggaacacgtccggccggtttccagaggtgacttttccgtcacctccaaaagccttccttccgccttccctttgcgcactttattcaccgagaacttgactttctgtccgggcaggctgttcttgactacagcagtctcatctcccacacagacgatccctttgttgggaaaatcgacccttacaacagatccttcatatacctgtccttttttcatgggttagttctctccttcatcctcgaagaagtcgtcatcatcctcttccacgtcatctgcttcatcttcgaagtcatcctcgaagtcttccagataatcctgtgcaaagaagaaacggtatacagcataagccactgctgcaacagctactacggcgccgatgatggccagtacccataacaggatattgcgttccttcttctcttctacttccttgcccaacagcttgttaagcttcttcagttcgctgactttcagctcatttaatttgtcaagatctaccagattttcaattctgttcatattatttacctgcctttcctgcatctattcgtatttatggatgcaaagcattttgttttcattcctttatatgataccatattttcatcaaaaatactatagaaaaaccatatttgaggaaatacatttcttattcttatattcttataatttcttacaactgctttagttttgcaaaagacgcatacataatcttctgccctgcctggtcgaattccacggtcaccttatagtctctgggttctctcacgatatttagtaccgtgccctcgccgtatttgatatggcgcactctgtcacctacctcgtagtccagtttctccggtgccttgaactccgtgcccttctgcagtccggccaactggttcagtccgctgatgcccttggaaatataaggtttatccgcctttgccgtaacacggggttttaaggtcgccttgggtcttggatcaaagccggtattaccgaagccgccaaaaccactatccgagccggatccagaccggggagatgcaattgcctccagtcccatggcacgaagagctgcttcattggctcttctcgcctgaaaatcttccagatcatcgtcccggtatcttctgctaggcggcagggtattatccaataattccttcggaatctccctcacaaaacggctcaccggattgtactgggtctccccacgcagcattctgctctttgcacatgtcagcgtcagatcctccttggctctggtgattcccacataagccagtcttctctcttcctcgatctccaacgggtcatcggaagcaatggtcataaagctggggaataatccatcttccatgccggcgagatacaccaccgggaattccaggcctttggcactgtgcagcgtcatgagcagcacccggttgtcaccgttctccacattgtcaatgtctgccaccagcatgatttcttccagaaattccgacagagaaggctcgtcgtgagtctcctcatatgcggccgccttggtgatcaattcatctacgttccccagacgatcctcagcggattcctcatcctgatcccgcagatattctgcataatcgatccgttccagcagagatttgatcagatccggcaatgtatacgaagacaatccgctgcgaagtacctcgatcagattcacaaatccacggatcttggtctccgctcttcccaatcccttgatctgatctgcttcacacaatgcatcaaataaagtaatatccttcatctgtgcatagtctgctaccttttccaaggatgccgcaccgatgcttcttttcggcacattaataattctgcgcagagccacttcatccctgccgttatcaatagttttcagatatgccagaatatcgcggatctcctgtctggcatagaagttcactccacctaccacatgataaggaatgccctccactaccatacgttcttccagaagtcgcgactgggcattggtacggtacagcaccgcacagtccgcataggcaatgccgtcatttttcaccttgtcggcaatatcgtccgcaatgtattccgcctcttcataggcattgtcaaactgcctgaaatgtacccggctgcctgctcctttttccgtccagagggctttttccttacggcctctgttgttacggatcaccgcgttggccgcatccaggatgttctgggtggatcggtagttctgttccagcttaatcacctttgcatcgggatataccttctcgtagtccagaatattacggatattggcaccgcggaatttgtagatggactggtcatcatcacctaccacacacagattgcgataaccgtccgccaacagacggatcagttcgaactgcgctgtattggtatcctggtactcatccaccatgatatatttgaaacgttcctgataattataaagtacttccgggcagcttttgaacagttccacagtctttacaataatatcatcaaaatccagtgcattactctttttcaaggtctcctgatactctctgtagaccttggcgatcacggatttcttgtaatctcccacggattttacttcaaattcccgcacatccaccagctcgtccttggtggaggaaatttccgataacagcgtccgctctttgtacatcttcgtgtcgatgttcaggcgcttgcagacctgctttatcacagatttctggtcatccgtatcataaatggtaaaattcgaatcatagcccaaccggtcaatatgtcttctgaggatcctcatgcaagtggcatggaatgtcgctacccatacctgatccgcaccgaaacctgcgatctgatccacacgctcccgcatctcctgggctgctttgttggtaaaagtgatggccagaatgttccatggatttactcccatctcatcgatcagataagccactctgtgggtcaggacacgggtcttgccgcttcctgcgcccgccaacagaaggagcggtccttccgtatgaagcaccgcttctttttgttctttatttaaggtatcataaatactcat

SEQ ID NO: 946 - DNA, 21014 bp, unidentified
  source 1..21014: mol_type = unassigned DNA
caggtctgtgtcaatttcgttttccaaccggatgacggtacacccttcactatgcatgcgcgccatataggtagcttcattgcagagttccgccagtccgtactcctgaatgttgaacttcatcataccggcttcgagccgtgataaatcgagtacatcattaaccaggcgcatcaactcttcggagtttttctgaatgatggaagagtattctttacggagcttatcgggcatgttgggctcggaggctatcagttgcgagaaacccactacaccgttcagcgggatgcggatgtgatagcttatgttcgacaaaaagcgatttttcatttcattggcttcttccgccatgcgggttgtttcccgtgtttctttttccgatcgttccaaagccttgcgtacgtgtgaaatgcggagcatgaaagcaaccagaattatcaggataatgaccaccactattaaggtgccgagttggatgtagcttttcagccgttcctcttccaatgccactttgtcgatgttgtatttagcttttatctgttgcatctgtttgtcgagaacggtcgtttcgatagagtctttaagatggagtgtttcgatgtacaggggaatggcttctgcacttcgtccggcttctgccaggaggtcggcttttgtcaatttttggtggatgtaattgctgttgaagtcctcttgcagcagtatgatggtggagtctatcttggcaagtgcccggtcatacgctttgcaagcccggaagtatgctgcataggcatcgtaatagagcaccctgtagagaaagaaggtgttgccattgagaaatttgcccgcgttaaccagatttttatgtgcttgttccggctggcctgcatatagataataataggtgtaatatacttcgcagaacaggtaaacatcataaaatgcctctttgagcatcgggttcgtggaggtatggtgatgcagtgtttcttttagcttcgcaaggtattcggagagtaattggttgtttttctgatccttggttatggaaatcagttgacagagaatcgagattcgtactaccgcattatctgtttgtaaagagagttgataggcagcttccaatgctttcattccttcgtcccatctctctgtactgatatagacgttgcccaagcattgttttgctccgatcagtccgcgggtgcagttcactttttgggctctttcgtacatcaggttcgcttcgttgatggcaagttcatactgctcttcgtaggtgcagaggtctatctgaaagcggagcgcatcgaaatagagatcccaggtttgcgatttgcgggcataaggctccattgtgtcaagccatttttttacgctgtcccggttgttttggttatagtagtacactgtgtgcagataggcggctatggtgttgtatctgtcattcttctgcaaggtggcttcctcgcgcaacagacccgagaaggtgatacacctaggagtcagctgctctatttgtgccagtctcttgaacatttccagacgagtcgagtcatgcggaagtgactgtgccacccgatacaggctgtccgtttccgtttgtgtatttgcatgacaccatcctaaggcccggcaacatactatgatgataagtatcagtcgcttcatctttctgcctccttttcctttgcgggccagacggggtgtgtaaaccggaatcgcgcaccttcggtgtagtccgggtcaatccatattctccctccgatttgctcgatgataagttgacagatcgagagtcccagacctgttccctgtgcaccttcgttcagtttctcaaaacgattgaatatctggtcctgtttttcacggaggataccacatccggtatctgtcacagtgaacagagctatggtttctgattctttttctaatgtcagggtgatgcttccttcagtagtgaacttggtggcattgatcagcaggttgatcaatacctgttgcaggcgtgcctcgtctgtacgcaaagtcagtttatccagtgaagtgacaaaactgactccggcttgtgtctgcttcaccttctctacggtgttgattacgttacggcatatattgacggcgtcacattctttaaaattgaaagtcagcttgccgggatcgagatttgacaggtctattacatcattgatcagctttagcagcagttcggagttttgctggatgatgtcattgcattgataccgtgtgtcattgtcgatggattcgtcggtcaggatggatgagaatccggaaagtgcattcagtggtgtccgtatttcgtgactcatgttcgacaggaacagacttttggtacgtattgagttctcggcatacttacgggctatttccaattcttctttggagcggagaagccggttggactcctgccggatgcggacaatcaacagcaaaacaagcatcaatataaagatggaagctatgatgatccacaagatgatttggtttcgttgaatttggttccggatttccatccggtctatctggtacattccccgtaggtcattgatttgccgggcatagctcagagcgttcaaagagtctttttgccggttggccttttgatagatacgataggcttcttccgttcgtcccatttgagtcagcagttgggcacactcaagctgcaaaccgatgtgtttgttgggggcaggtgctttagggacctttgtcaggcgttcgtattgttgcagggccagttcatacttcccgacagcctgatagtactgggccaatatatagttgtagatactacgcaggtagagagaattcagttgttcgtggattttcccggctttgtccagttcggcttttcctttttcgggattaccggactcgatgttatagtaggcattacacgcacatatgaaaaagtggaatgtaggattagggttaccggcatacaggctttcaaacttttgcagatagaggcgtacctcgtccatgtgggaggcctgaatcagggtcaggatgaatttcggaagaatctcttgttcgaggatttcgctacccggtattttgtcaagcaattccagagcttctttataagattcgatggcgggttgctgcatgttggcattcaagtaggcatccccaatggcacggctggaaagagctataccgatgggggagttcaattctttggcttccttatacatccggcgggcatggtcgatggccatgttcatgtctcctcgtgaggcataagctgtcacaatcagttgtttcaactgaaatagagttttatattctttctgctttttcaggagaggagccaattcgttgccccattggataatactgtcgttgggagcttctttgctatagttgaggctgttgtcgatcaggttcagcagcgctgacacgtgccttgttgctttgttatcggcagcatatgtagtgacagagtataaggttactgctattactataagcgctatattgaaagaccttcccacagtaaatgttgttttcccgatgtttgttttatgcttgtttatgatgcatgtagtgcaaagctaaataaaaagagtgagaatcaaacagaatctcactctttttactatattttgttcacaaaagaaactctttagctgttcatgctcatcaggaactcgtcgttgtctttggttttttccaatctgtcttttacgaaatccattgcttcgataggattcatatccgacagatacttgcgtagaatccacatgcggtccagtgtctgtttgtcgagcagcaagtcgtcgcggcgggtgctcgatgccacaatgttgacagcagggaagatacgtttgttacttaggttgcggtcgagctgcaactccatgttacctgtacccttgaactcttcaaagattacttcgtccatcttcgaaccggtgtcgatcagggcagtagcgataatggtgagcgaacctccgttctctatgttacgggctgctccgaagaaacgtttcggtttgtgtagtgcattggcatccacaccacccgagagtacctttcctgatgccggagatacagtattgtatgcgcgcgccagacgggtgatagagtcgaggaagatcactacatcgtgtccgcactctaccaatcttttagctttttcgagtacgatgccggcaattttcacatggcgttcggcaggttcgtcgaatgtagaagcaatcacttccgcattgacactgcgggccatgtcggttacttcttccggacgttcgtcaatcaacaacatgatcatatatacttccggatggttggcagcgatggcattggcgatttctttcatcaggatggttttaccggtcttgggctgagccacgatcaaggcacgctgtcctttaccgattggtgaaaagaggtcgactacacgtgccgacatcgagtcggagtagcctcccttgcaaagcttgaacttttcgtccgggaacagcggagtgagatggtcgaacggtacacggtcacgtacgaaagcggcatcacgtccgttgattttagaaacctttaccagcgggaagtatttttcgccttctttgggcggacggattacaccttctactacgtcaccggtcttcagaccgaatagtttgatctgggattgcgaaacgtagatatcgtccggtgaagagaggtagttataatctgacgaacggaggaatccgtaaccatcctgcatgatttccaatacaccggttccggtgaggatatcgtcaaattcataaggtttctcacgttcaatcacgcggcgttcctgaacgggtgcggcttcggcggcattttgttgcggcatgggacgctgttgtacaggctgacgctggttattgttgcgttggttattattattgttgttgtaattgttgttgttattgttgtctcgtgggcgaatcacacgcgggcgttggggttgtgccacaggttcgggggctgttgctgcttcggctttggtcgattcaaatttgccgaacagttcggttggcaattctactttttccgaaggcaggtcttcgatggggataaaatcatcgtctgcatctatatccgagaggatcgagctttcttcgtctacaacggccggtttgggtttgagaatcggtttgctgatgggacgtttttctgtttccggttgggcagcgggcttttcttcttgtgccgatggtactgtttccggtttttcggtagtttcttctgcgggtttagcttctgtttctacctgatttttacggggacgtcccggtttctttttcggagtggcataaggtgtcactttgacagattcggccggagtggcgtttgtttcggcgtttgcctctttagctgtttctggggtcggttctgttgttttaggttgtggctgtgttttggctgcaggtgttttggcatctgttttagttagttctccattcttggtagaagagaaaaccttgtcggcgttttccttctttactgtcacccgagagcgttttttcttatcttctttgcgttcctctttcagtttgtcggcagctacctttttagtagctccggctatggcttgttcgtcgaggattttgtagacaagttcttctttcttaagtgagtctgtttttttgatacccaattcctgggcaatagcttgtagttccgacaaattcttgtcgttcaattgaatgatgttatacatacagtatagtgagttatttaaatattttaattttattcgttgaaatacgtacggctgaagctgcgacgcaggggtcggaaacttaacaaacgcaataatctttaaatgatgaattagggatgtttggctgaatcggaaatccgaatttgtctcccgttggaggggttcggaatgtttcaacgccgcaaagataataaataattttggtttttgtcttcgtttactctttttttcttcataaaagtgtacctttgttgcataaaaagtaactattatgacagcaaacgaagtccatttgatttatttctcgcctacccacacctctaaacaagttggagaggcaattgttcgtggaactggaataacaaatgtgataaacacgaatttaacacaacaggcaactcaggatttagtgattgccgaatctgcattagctattattgtcgtgccggtatatggaggccgtgtagcccctttggccatggatcgtctggcaagtgtgcgcggaagtaatactccggcggttatcgtggtggtatacggtaaccgtgcttacgaaaaatcgttgatggaacttgattattgggctattcaacaggggtttaaagtgatcgccggtgctactttcataggagaacactcttatagtacagaaaaatatcccgtagctgccggacgtcctaacgaacgtgaccttgctgtggcagccgattttggaaagcagatttcagataaaatagcatctgctaccgaaccggaaaaattatatgcggtcgatgtccgtaaaatccggcgtccgcgtcagccttttttcccattgtttcgctttttgcggaaagtgattgccttgcgtaaaagtggagttccccttccccgtactccttgggtagaagatgaatctttgtgtactcactgcggtgcgtgtgcgaaaatgtgtcctgtaagcgccatagctaaaggtgacgagttgaatacggatgccgaacgctgcattaaatgttgtgcctgtgttaagggatgcccacagaaagccagagtatatgataccccgtttgccgtactactgtcgcaatgttttgttaagcagaaagatccctgtacgttggtttaatgaaaaaaggttagtggcatagcattgtgcaagattttacttgttattggagtttgtttcaattaacattgttaagtcatttccttataatttgattcttgtgtgcaaataacaagtcttttgtattttaataacttgttatttgtatcccaggaattatttttttatgaagagatttttctacttacataaatttaattagccagttgtgaaaagtataactaaaaatgattttagtgtacagcaaattggtcaggattgggggatctgtcagtgtcatttgataaatggagattctgtttcctgaactattatactcaattattgttttaaataaacgtttaagatacagttaccttaatgtaattatgctgacatttaccgataactttgagaatgataaagagttgattcttcgtgatcatctggcacttgaaagaaccaagctggctaatgaaagaactttgtttgcatatatccgtatggcactttaccttttgactgtggggatagggatatttcaaattgaaagcatttcacgtttggatgggctggcgtggggatgtattatagccggaatctttttgtttttcttgggctttgtccgtttcgaacaaatgagaaagcatttgaaacagtatacgaaaacatgtcgtgatactgagaatgaatcgtcacggaagaagtaatttttattctagattattcgataggcttgtcttcgtgtatttcaatggttttggtggctactgcatattcgtcggggaaaattttacttcccatttcgtttgcccatgctttggtaaactctgcaccggtatatatgatgatggaagaataataaatccaggtgacgaaaaccaccatgaacgcagcagccccatagacggtccccacattggctattcctatataaaaggaaattccccattgacctatcagtagcagtatggtggttacaacagctccgatgcaaacgtctttgctcttgattttggcatcgggtaatattttaaatatgagtgtaaagatgatggtagtgacactcatgtttatgatgattcctaccacttttaccaacgaatcggctacttccggatacttaaagatgaatttttgactgagttctccgattatattggtaatggtgaatgtaatcaggagaatgaaggcaaatacaagtattattgagaaagaaagtatccggtttttaataaatttaagccagctctttttagggacggcttttattccccaaattgaatttaatgaactttgtatttctgcaaaaatagtggtggcaccaaaaatagagatacctaaactgacaaaggcagccgacctggaggagtctgtattttctgcattttctataatagaacgaagggcctcggtaacttcggggcccacaatcggttgtagttggacataaagttgattggccaaatccatatggaaaaagacaccgacagtgactagaaaggaaagaaaaggaataattgaaaacaaagtcgcataggctaatgaagcgctcaacctcataacgctgtcgtctatgaatccccaaactgtatcttttattattttgaagagcagggataaactaagtcttttctttctttcggaatggatttccattttaattcttttttatccaaacagcaatattacgggtattaacagaaaattctccacttcctttttcgtctaatgtgatttcttgctgaatatttccggttatttcatgccatatttcacctttatgttcttcgcccaaatccatctttttactgccggcttcatcattagacattaaaaagactaaaccggaaccgacatgttcttcatctcccgtacgaataaagccgatggcggaaggatgatcgaaatactcaatctgatcgccataagcatattttcttctggcatccagaagaatattaatgatttgggtatgaggtgagttttctcctttgacaccataataatctccgtagaacaaacaaggataaccgtctttcattaataatatcagaccataggccaatggtttgaaccagtcttctatttgtgattccaaggaactgcccgattgcgaatcgtgattgtcgacaaaagtgactgccagatcacagtagtgctcgactaatgtgttttttaggatattctgcagatcataattcttgccttcttgtgatgcttggaataaattataatgtaatggaacatcaaataggttgactttgtgacccacggattttatgtatgcatcgagtgtgttcaaatcaccattccaatattcgccaacagcgtagaatttgtctcctctttcgcttcttaccgcatccaggaattgtgcaatgaacttgtctttcatgtgtttgatggcatccagacgcattccgtcgaggttcagctctttggaaacccattttccccaacgattcaattcggtgactacttcaggatgatccaggtctatatcattgcataataagaaatcgtagttgccattttcattgtcaaccccttcgctccacgctttgtcttcaccctgtatctggaagatgccactccgctttttggcatcgtcaaaaccggttcctgaaaaatgataccaatgccatttgaagtctgaatatttatccttacgtccatggaagctgtatccggtccagccctgtatttcgaacggttttcctaatgcttgggttctatcattgggatcgacttctacaactatgaacttttcagtgaaatcacctcctgccttatgattcagtactacgtccagataaacggaaatatgatttttatgtaattcatcgatcatttctttcagttcttctttcgtaccatatttcgttcttatggttcctttttgatcgaactcgccgagatcatacaaatcgtaggttgcataaccttcgtcttgttgttcgtcggctttgtaagcggggggaatccatactgctgtcacaccaatctcatgtaaatgtgacgcatcttcttttaattgtttccataaatttccgtcatttggcagattccattcaaaatactgcatcattacaccattttccattatccaatgcatttagttatcggaaaataacaaagaagtgtatgataaggtttcttgtgtttatccaaaagcactgaaagaaaagatatcggcgtttgtgattagactaacatgcgttatttgtcttgccatcatatccccatttaacgtaaacagctccccaggcaaatccggctccgaaagcggtgaaaatcaaattatcaccttttttgagtttattttcgaaatcccaaatgcataatggaagcgtacctgcactggtattgccgtagtgttcgatattgatcataaccttttctaatggtacatccagacgctgggcaacagcactgatgatacgttgattggcctggtggggaacgacccagtctatttcatcttttgtcagttggtttctttcgatgatcgactcacatgcatctgacatattggctacagcatatttaaatactgtacgtccttcttggtgaaggtaatgcatgtggttgtcaactgtaaaataagaaggggaacaaactgaaccaccggctttcatgtgtaaaaaaggaagtcctttgccgtctgttcttaaaacggaatcgataactcctaaatgatctgttgtgggttccaacaagaaagctgctgcaccatcagcgaaaataggacaggtggcacgatcggtgtagtctatcacagacgacattttatcggcaccaacaataatgacttttttgtattttcccgaacggataaagttagccccggtttctaatgcatataagaaaccgctgcagaccgcttgcatgtcgaaggcaaatgcatttttcaaccccactctttcgcataaaatggaagccgttgaaggaagccgataatcgggagtggtggtagctacaattaccaggtcaatatcatccggattactttgagtacgttgcatcagttgtttgacagcttttcgtgccatgtatgaggtgccgagtccttcttcattcaggatgcgtctttctttgattccgatacgtcccatgatccattcatcggtggtatctacaattctggatatctcatcattagtcaggatataatcgggcacatatcctccaactcctgtaattactgcattgatttgtttcattaactttgtctaaataagtaagttcttaagcgggggaagtataaaatgactccgaaaacttacaacttctcggattgcatctaaaataccgggcgcaaatatacagaaaagaaagatttattcaatatcttgtaatctaaatgcgttgaatttcttagtgagattaggataagttataatacagaaatagaattagggaaatgattaaatgaaggaagataggttgctttgcaagaaaagaaagaaataatcaggtctgattttcttagtaagagtgaggtcttaatctgatttgtgtatctgttggttcaagcgtttttgctacttctttacttctttgggtaaccatactttagtctgtttctgtatttctcgttaatgcttagtaaatggcctatgttattccgaaagtatttaattttcacgtttttgtttataaaaagaaactcctgtaattgtcaaaattacaggagtttatatcatttgatcaagaaacggtggttactttgccaatgcctgagctacatcaactgcacaagccacagtacagcctaccattgggttgttaccaattcccaggaatcccatcatttctacgtgagcaggaactgatgaagaaccagcgaactgagcgtctgagtgcatacgacccattgtatcagtcataccgtatgaagcaggaccggcagccatgttatccgggtgaagagtacgacctgtaccaccacctgaagctactgagaagtatggcttacctgccagtacacgttctttcttgtaagtacctgcaaccgggtgttggaaacgcgtcgggttagtagagttacctgtgatagatacatctacaccttctttccacatgatagctacaccttcacgtacatcatctgcaccatagcattttacttttgcacgaggaccgtcagagtaagcaatttcacgtactactttcagttcacctgtgaaatagtcaaactgtgtttgaacataagtaaagccgttgatacgagagatgatctgagcagcatcttttccaagaccgttcaagatacaacgcagaggttctttacgtactttgtctgcttttgcagcgattttgatagcaccttcggcagcagcgaaagattcgtgacctgccaagaaagcgaaacatttggtttcttcacgtaacaacatagcagccagatttccatgaccgataccaaccttacggtcgtcagctacagaacctgggatacagaatgcctgcagacctataccgatagcttcggcagcatcagcagcgtttttgcaacctttcttgatagcgatagcagcacctactacgtaagcccacttagcattttcaaaacagatcggttgagtttcttcacacgttttataaggatcaactccagcagcttcgcagatagcgttagcttcttcgatgtctttgataccgttagcgttcaaggcttcgatgatacctttgatacggcggtcctgactttcaaattttacttctctaatcataatttcttttcctccttatattattcgtgacgtggatcaatgtgtttaacagctccctgttctgcagtgaagcgtccgtaagtaccggtaactttcttcaatgcttcattcgcatcagtacctttcttgatttcatccatgaatttgcccatgtgaacgaattcgtatccgcagatttcatcgtttttgtcaagagcaattgtcttgatgtaaccttctgccatttcaaggtaacgaggacctttagccaaagtaccgtacaatgtacctacctggctacgcagacctttacctaagtcttcaagacctgcaccgatgatcagaccaccttctgagaaagctgactgagtacgtccgtaaacgatctgtaagaagagttcgcgcatagcagtgttgatggcgtcacaaactaagtctgtgttcaatgcttcgaggatagtttttcccgggaggatttcagcagccatagcagctgagtgagtcatacctgaacagccgatagtttcaaccagagcttcctggatgataccttcttttacgttcagagtcagcttacatgcaccctgctgaggagcacaccaacccacaccgtgtgtcagacctgaaatatcaacaatttcttttgattttacccattttccttcttcgggtatgggagccggtccgtggttaggacccttctttacaacacacatgtgttccacttcgtgtgaataagtcataattagctcttttttaagtgatataattaaaaatacgtagtcacgattctcaaatcgctcacaaaggtagtcgttttatttgtttttgcaaatcgggttttattacttttttatgaaaagagaaaaatagaatttgtggttttgttagattgtaatgtggagatgacattttagataatctttgttttgttgaactattactctgattctttgtttcttctgagaaaaattgatcggttatgaatttgaatgaggtagatatacattatttaattgcagccattagtgtgataacttcggcattggtgttttacacaataggagtgtggggagagcgattgcagaagaggttgaaattttggcatctggtattttttttgttgggactgctggctgattctgtgggaacggctttaatggagaatattgcgcgactcacacacttgcatgatgaaatacatactgtgaccggcattatcgctatcctgttgatgtttattcacgctatgtgggctatctggacgtatgtgaaagggagtgaaagagccaaggaacatttcaaccgtttcagtattgtggtgtggtgcatttggttgataccttactgcataggcgtatatcttggtatgtcattgcatcattgatcatcaattataaggattgagaattgaatcccgtctgtttctttgtattgtgtagattgctttgaataagatgctatacttgtcaaatctttaattatctacctttagaaggtattagtgaaattctcggagaacaaatagatgaacctgttattcttttgtaaattagaaggttactatgacttgctgtttgtcggtaaaaggcttgttttaacacactgttaaaacaaatgttttgatgatagagaagaaggcttttaaatgtaaaacacttgttctttgtattcaagcacagaatgcatagaagatggcattaacaacgttaattgataacgcttgttgcaataccgaactacaatgaactgacatgcgatccggcagagaaggtgatcaaattattcgttataggattattattgaagaaaattaaacgggtttctaaaaaacttatcaaaaagcctttctgaaccatatatttccgtatttttgtttcctgatatttataaatatagaattcaccttattatatatagtggaaatgatagaagttacggatgcctctttgcaaaaagctgcgggtgagggaatggatgaatttatccaggtgtttacagacaagtataaagaagtgattggcggggaacttactgccgaaacaatgccactgttgacaggggagcagcactctttgctggcctatcagatttttcgggatgaagtcatgttcggtggcttttgtcaattgattcagaatgggtatggaggttatatctttgataatccttttgcaaaggtaatgcgcctgtggggagccgaggatttctcgaagttggtttataaagctaagaagatatacgatgctcatcgccacgatctggagaaagagcgtacagaggacgaatttatggctatgtacgagcaatacgaggcctttgatgatcttgaagaagaatatctggatattgaggaggaggttacagcactggtagcaagctatgtagacgatcatttagagttgtttgcaaaaatagttaagtaatagatgcagtattttttaagtctctgcatttacttattgtgaattagaatttatatctttgcaaactctaaaaaatagatttatgaaacaattgaaattaatggtgttgaccttaaccctgttgatgggtactatgtttacttcatgtatggattccggagaaagcggtcctcagcagtgggccggtgtggtgaaagtgaatgatagaatgggttatgttacattcacagatgctgccggtacggaactgatccctactaacacgattcctgtaactttgaatgcaagaatggcttacatttattgccaggttgatgaaggtcaggacctctcgacaaatcctaagtcaattaaaattacacttttagcagatcctacaggaattgatgctacagcaataaccactccgaaagtaggtgaatcaggtgatgtgactactaatgcacctgttggttcgttgagttttgcatcaggatattcaactgtggccccatttcagtttagtgaaaatacgattgtattaccggtactttatcgtgtgaaaaatgtgactactacagaagatattaaaaatgagctcgctaaacatacttttactcttgtctgctatacagatgatattaaatctggtgataccattttgaaactttatttacgctataaagttgaggatgaacctgctgctattgctgagcgtgcaacacgtacttccagctttaaggcttatgaaatcagccaaatcttaagagagtatactctgaagagtggacaagctaaacctgctaaaataactatagtagcgaagcaaaatgagtacaacaataagttggaagatacttctactatagagaaggtatatgaaatagaatataaaactgcggaataatttgaattacaaagcattatttcaaatagcaatgtcattgatttcctctccggccaaggcctgggaggaaattcgtttagaggatagacgggcagttcttactgtttttgtctatcctatgattggtttatgtggtttatccgtattcattggtgctttgtggactaatggttggggaggaccacaaagtttccagttggccatgacgcagtgttgtgcggtggcggtagctttgttcggaggttattttctggcggcttatgctatcaatcagatggggataaaaatgtttggtatgaccaatgatatccctttggcgcagcagtttgcaggttatgcgttagttgtcacttttttgttacatatagtaaccggattgcttcctgatttcagtattatcggttggctgctccaattttatatcgtttatgtggtatgggaaggagcaagggttgtgatgctggtagaagaaaagaatcggttgcggtacaccattttctcatcgattttgttaatactatgtccggcggtgatacaaattgtgttcaataagctaacagctatattaaattaaagaaaaaatgaaattggctcctataaatataaagaataaacgtgctactttcgactatgagttgattgatacttatacagcaggtattgtgttgaccgggacggagattaagtccatccgtctgggtaaggcaagcttggtagatacgttttgctattttgcgaaaggcgagttgtgggtgaagaatatgcacattgccgaatatttttatggctcgtataataatcatgcggcccgacgtgaccgtaagttgctattgagcaaaaaggagctgaataaattggaaagagggacgaaagacgccggattcaccattgtccctgtgcgtttgtttattaatgaaagaggtttggccaaagtggttgtagctttggctaaaggtaaaaagcaatatgataaacgggaggctttgaaagaaaaagacgaccgtcgtgatatggacaggatgtttaaacgatgataggtttgtacctttagcaatgaaaaaaactattcaacagctggtactcgaacgtatccttatattggatggcgctatgggtacaatgattcagcaatataatcttagagaagaagattttcgtaatgaacgctttgcgcatattcccggtcaactgaaggggaataatgatttactttgtctcacacgccctgatgtgattcgggatatacaccgtaagtatctagaagccggtgcagatatcattgagacgaatacttttagttctaccactatttctatggccgattatcatgtacaagagtatgtgcgtgaaatgaatcaagcggctgtaaagctggcacgtgaagtggccgatgaatatacggcactaaatcccgataaaccccgtttcgtagccggttcggtaggtcctaccaataaaacatgttctatgtcgccggatgtgaataatccggcttatcgtgctgtgacttatgatgaaatggctgatgcttatcagcaacagatggaagctatgcttgaaagtggggtagatgctttattgatagaaactatctttgatacgctgaatgccaaagctgctattttggcggcagaacgtgcaatgaaggctacaggagtaaaagtgcctgttatgttatctgtgacggtttccgacaccggaggacgtactctttccggacaggcattggaagctttcctggcttcagtgcaacacgctgatatcttctcagtcgggttaaactgttcgtttggtgccaggcaactgaaacctttcttagagcaattggccgctcgggctccttattatattagtgcttatccgaatgctggtctacctaatagtttaggaaaatatgaccagactccggcagatatggcccatgaagtaaaagagtatgttcatgaaggattgatcaatatcataggtgggtgctgtggtactaccgatgcctatattgcagaatatcctgcattgattgccggagcaaaaccgcatattccggtttgtaaaccggattgtctgtggctttcgggattagaactgttggaagtgaaacctgaaataaatttcgttaacgtgggggaacgttgcaatgtagccggttcgcgcaaatttcttcgtttgattaatgaaaagaaatatgacgaggcattatccattgcccgtaaacaggtagaagacggagcactgattatcgatgtaaatatggatgacggtcttctggatgcaaaggaggagatgacaactttccttaatctggtggcttcggaaccggaaattgctcgtgttcctgtaatgattgattcttcgaaatgggaagttatcgaggccggattgaaatgtcttcaaggaaaatcaattgtgaattccatctcgttgaaagagggagaggagaaattccttgaacatgctcgtacggttcgccaatatggtgcggctgtggtagtgatggcttttgatgagaaagggcaagctgatacagccacccgtaaaatagaagtttgcgaacgggcctatcatttgcttgtagataagataggattcaatccgcatgatatcattttcgacccgaatgtattggctgtggcaacagggatcgaggaacataataactatgcggtagattttatagaggcgacggcttggattaaaaagaatcttccgggcgcccatatcagtgggggagtaagtaatctttcgttctcattccgtggaaacaactatattcgtgaagcgatgcatgccgtatttctttaccatgccattcagaaagggatggatatggggattgtgaatccgggtacttctgtattgtatacagatattccggcggatgtactcgagaggattgaagatgtagtattaaaccggagaagtgatgccgcagaacgattgatagaattggctgaccggttgaaggaggcttctgcgggtaatacttcggccgggcaaccggtaaaacatgatgcctggagggacggtacggtagaagaacgcttgcaatatgctttggtaaaaggaatcggggattttctggaagaagatcttgctgaggctttgcctaaatatgataaagcggtggatgtgattgaaggaccgttgatgaatggaatgaatcatgtgggcgaattgtttggcgcaggtaagatgtttcttccacaagtggtgaaaacagcccgtacgatgaagaaagccgttgcaatcttacaacctattatagaatcggaaaaggtggaaggtactgcttcggcaggaaaagttttgctggccactgtgaaaggggatgtgcatgacattggcaaaaatatagtctcggttgtgatggcatgtaatggttatgatattattgatttgggagtgatggtaccggctgaatcgattgtacaaaaagccattgaggagaaagtggatatgatcggacttagtgggttgattactccttcactggaagagatggtacatgtggctatggaattagaaaaagccggattggatattccattgttgataggaggagcgactacctctaaactacatacagcattgaagattgctccggtttatcacgctccggttgttcacttgaaggatgcttcgcagaatgcgggcgttgctgctcggctgatgagtccgaaatcgaaagaagagttggcaaaagaattatccggtgaatatgaagcccttcgtgataagagtggcatgatgaagcgtgaaaccgtttcattgaaagaagctcaggaaaacagattgaaacttttctgatataaaaagaaattatggtaataaagaaagcggtttatgtatgggtgatcgggatactgggaatgatttcattcgcagcttgttcatctgcttctcaaggagaagtcccttcgacatccaatgctgcgttggataatatttttgcacgtaaaagtgtgcgggcttatttagacaaggaagtagaaaaagaaaaaatagattggatgctacgtgccggtatggctgcaccatccggaaaagatattcgtccgtgggagtttgtattggtcaccgaccgggttgttcttgattcgatggccgctgctttaccttatgcaaagatgctgactcaagctcgctatgccattgttgtatgtggagatgtagctcaatcttcctattggtatctggattgttcggctgctgcacagaatatattattggctgccgaagcacaggggctgggtgcggtatggacagctgcttatccttatgaagaccgtatcagggttgttcgtaaatatacggagcttccggggaatatagtgcccctgtgtgtgattccgtttggttatccggcaactgcccaagagcctaaacagaaatttgatgagaaaaaaattcattacgataagttttaaaccgtttattggcttttctgaaagctgcttctgataaaacgaggcagcttttttatttttattcctttccttctgataatttctgcattttgtttctctatttcaataaattccttacatttgcaccaatattaatcgaaatctgatacaagaatgtttggaattagcgactcacttatcattttgccatacttgctttcggtagtatgtgtgctctttgctgcttggtttggcttcaaatactggaataaagacgacgaaaaagataaaacacgatgaatacatttacacttggactgattgtgatagcctatctgctgtcactggcctatcttggttttttaggttataagaaaacatcctccgccagtgattacctggtaggaggtcgacagatgaatccgtttgtcatggcactctcttatggtgccacttttatatcagcctctgctattgtcggctttggtggggtagcagcagcttttggtatgggtattcagtggctttgctttttgaatatgttcataggtgtagtgattgcctttatttttttcggactccggacgcggcgaatgggtgctaaattgaatgtaagtacatttcctcaattgttaggcaggcattatcgttcacggggaatacaagtctttgttgccgcagtgattttcctcggaatgcctttgtatgccgcagtggttatgaaaggtggtgctgtctttatcgaacagattttccagattgattttaatatttcacttttaatatttacattg

SEQ ID NO: 947 - DNA, 35458 bp, unidentified
  source 1..35458: mol_type = unassigned DNA
cgaagctaagcaagctgaagaataaaagacttcacttcgtctgtttttataatttgttaaagccgttactccctcagaacgaggggtaatggcttttttattaacactgattaagaacatgcgtaaatgtgaacgggaatgattaattttttattaaatttgcaaaccaaacacacgctgatttgttataatgctcgtaatgcaacttaaaaaactcttttcggttaatttacgagaacttgcggttaaatcaggttaataggttaggagtgttaattagggagtgttaattttgtgactatgaagaagtcaacaatatggatattaggcatcgttatggggttatctttcctcagcctcttgtatctgcaaatcagctacatagagaagatggtaaagatgcgtaacgagcaatttgatgaatctgtgaagcgtggactgatggctgcttctaaagaagtggagtccgctgaggttgcccgttggttgcgggaagacatctctgaggcagaaaagagagcgtgggaattgactgagcaaggacaggcattggtgcagacacaacggtttacggtgacgtcgccggatggttccaagtattcggccatggaacttcagacgatcacaaataagccgtcagaactgccgagagcgatgatttcgcgtaagcatggcgctaagacgattcctaaaacagctcgtacacaaattgatttaatgaaagaacgttatgtgtaccagcgtggcttgttggatgaagttgccttgcagatgttatatacggcaagtagcaagccgattgaggaacgcatcaactttaagaacctggatcagtacttaaagtcgggcttggtagataacggcattgatctgggatatcactttaaggtgattgaccgggatggacgggaagtataccgttgttcggactatgtcgatgaaggtagcgagtattcttactcccagcctttgttcctgaatgatccacctgcccgtatgagtatcgtaaagatacattttccgggcaaaagagattatattttcgactcgatcaactttatgataccgtcgatgatattcacctttgtgttgctgattacgtttatcttcacgatttatatcgtgttccgccaaaagaaactgacggagatgaagaatgactttatcaacaatatgacgcatgagtttaaaacgccgatatcgaccatttcgctggcggcgcagatgttgaaagaccctgcagtgggtaagtcgcctgccatgttccagcatatatcgacggtcatcaatgatgagacgaaacggttgaggttccaggtggagaaggtactccagatgtcgatgttcgacaaacagaaagctaccttaaaaatgaaggaactggatgccaatgagttgattaccggtgttatcaatacattcaccctgaaggtagaacgttataacggtaatatagagtcggaactgaacgcaacagacccgaatatctttgcagatgaaatgcatcttacgaatgtgattttcaatctgatggataatgcggtgaagtataagagaccggatgccgatttggaattgaaagtgaagacctggaatgaaccgggcaagctgatgatttctattcaggataacggaataggtattaagaaagaaaatttgaaaaagatatttgaaaagttctaccgcgtgcatacaggtaatctgcacgatgtgaaaggctttggattgggattgtcttatgtgaagaagattattacggaccataagggaactatccgggcagagagtgaactaaacgttggaactaaatttattattgcattacctttacttaaaaattaatgatatggacgagaaactgcgtattttattgtgcgaagatgatgaaaatcttggcatgcttttaagagaatatttacaggcaaaaggttacgctgccgagttatatcccgatggagaagcaggatacaaggctttcctgaagaataaatatgacttgtgtgtgtttgatgtgatgatgccaaagaaagacggattcacactggcacaagaagtgcgtgcggccaatgccgaaatacctattatcttcttgacggcaaaaacattgaaggaagatattctggaaggtttcaagattggtgccgatgactacatcaccaagcccttcagtatggaagagctgactttcagaattgaagctatcctgagacgtgttcgcggaaagaagaacaaggagagcaacatctataagattggtaagtttacattcgacacgcagaaacagattctggcgactgccgagaagcagactaaactgaccaccaaagaatccgaactgctgggcttgctttgtgcacatgccaacgaaattctgcagcgtgactttgcgttgaagactatttggattgatgacaactatttcaatgcacgtagtatggatgtatatatcacaaagctgcgtaagcacctgaaagaagatgattcgattgaaatcatcaacattcacggaaaaggatataaactgattactccggaagctgagtcttgatgagactcggctcctctgggggagagaaaataaaaaaggcggtttgcatgtatatgcaaccgccttctttatttcttttcttttgatattagtcgacaattctcttgttgatgacaatgtaggaaatcaatcccactacaaccaaaacggcagaactgcccaagatggcattgttgttaacattgccggtaaaagaacatgcaaccaggattacagctcctattacgactaatatcaatcccagattttttaataagcctttcatgtgtgtgtattttaattagattattatattctttacgtattcttgtcacaaagaaaagcataattctttaacaagcgaaattatttttgcaaaaaaaccatattttaataaagaatgaagaatgacgaatgaaaaacgaagattattaatcactaaaccctaatcgctgatcactgaatttcagtctttcgtattgaaaaatatttttctcaatacttcctggcttatgctcagttcttctacggtaatgccgcgtaatgcttcttttaaagtttggttagcgattacccgtgcgcgttcttccagttcttttccatctttggtgaggtggataagattggtgcggcggtcttttttatccgagatacggactaccagatgttgacgttccatattatcaatcaggcgtgtcatactgggcttgtctttaaaagttgcattgcacaactcttgttgcgtcactccgtctttttcccacaaaaagatgaggacagtccattgttccggagtaatctccaaaccgttctggcggaagttacgggacagttttcggttgattgcggcggaaactttaccattcaggatggcaaaaatcagccggatgtcaaagttaaattgctcgatcatgaaattattgtttaaacaactttgcaaaggtaagtcacttctatgataaatcctaccttcaggcacaaaaaaacattaaatgtttgtagatcaaaataaaatccctacctttgcaccgcaaatttttaaacgaattattaattcattaattaaacaagtatgaatcaatacgaaaccgttttcattttaactcccgttttgtctgatgttcagatgaaggaagcggtagaaaaattcaaaggcatccttactgctgaaggtgctgagattgtaaatgaagaaaactggggactgaagaagctggcatatcctatccagaagaagtcaaccggtttctatcagctgattgagttcaatgcagaacctactgtcattgagaaattggaaataaacttccgtcgtgatgagcgcgttatccgtttcttgactttcaagcaagacaagtacgctgctgaatatgctgcgaagagaagaagtgttaaatcaactaaaaaggaggattaatcatggcacaacaagttcaatcagaaatcagatatttaactccgccctcagtagacgttaagaagaaaaaatactgccgtttcaaaaagagcggtattaagtacatcgactacaaagatcctgaattcttgaagaaattcttgaatgagcaaggtaaaatccttccgcgtcgcatcaccggtacttctttgaagttccaacgtcgtgtagctcaagctgtaaagagagcccgtcacttggctttgttgccttatgtaactgacatgatgaaataataggaggaggaaagtatggaaattatattgaaagaagacattgtaaacttgggttataagaacgacatcgtaactgttaagtccggttatggtcgtaactacctcatcccgacaggtaaagctgtgattgcttctcctgctgcaaagaaaatgttggctgaagatttgaagcaacgtgctcacaaattggaaaaaatcaagaaggatgctgaagcattggcagctaaattggaaggcgtatctttgaagatcgctactaaagttagctcaaccggtactatcttcggttctgttggtaacatccagattgcagaagaattggctaagttaggtcatgaaattgaccgtaagatcatcgttgtaaaagacgctgtgaaagaagttggccagtacaaagctatcgttaagctgcacaaggaagtttctgtagagattcctttcgaagttgttgctgaagaagcataattaaacttcatatataaaagaagcccggtttccgaaaggaagccgggcttttttattactggttagttctaattgtattctttatcaataaaagtaattgttttatcaattagttccatgtagtgtctgtatgtgagatgcgggtcatcatgtataaaagaaatttgccgtatggcagcaagcccttccgggaggtgaagggtgaactcccaggtttctcttagtgacttattttcattagaaatttttctaaattcttgctgactgacgcatttctctacccctgtttcttttgctttggagaatccttcataaaaaagatgtgcattttttattacagcataggcctggatgatttcgacagcaagctctttatttttaatattttgcatgacagaagaagctctgagcatttccatagcatcggtgaccggaagaaaatcttgtgattggaatgggaaatagccgtagtaattcagagagtcggaggacgcttcattcattttatctttgtattgaagcaggtagcatgcaccttctttgttgaatatttccattttcatcatctcttctattgtttcccggttgataagtaattcacttttgaccaactgtagggcctgtgccacctcttttttcttgttgtgctcctgaatcatatcacttcccacgaatgtgattgcaatacccagtacgactgcaatgaaattgcagatgaaatcacctaatcttcccttgatagctgatcgcttaattttttctatcagttttgtattcataatattagcataatatgtagattagcaaagataaggattttcagaactaatcaaataggaaaagtgatgaatcactgaagtatctttgggatggtacaaatgggtataaaaaaagtctgttcgtgcttttttcgcacgtcagactttcaattctctcagtgtgttgttctgaattattcagctacaactgctgcgctatctactgctacagtatcagctgctgcggctgcctcagctgctgctgcggctgcttcttctactgctgcgattgaatcagcaatacggatagaatctgctgctgctttttcagcgtcagcttgtttgttaccacaagatgcgaaagatactgctacgatagctacggccatcaaaactaattttttcattttctttgctttttaaaaacgtaatacaatcaattgctttattaaaacgctgcaaaggtatgtactttttcaatatgttgttctccaaatcccaactttttttatgttttttttggaggttagccccttttgattactttttgtatgtttaataacatactaatcttctgcaatactgttatataagtagcgtttgatgctccttttaggagttttctcaaactcggtaggatagagctgaatctggctgactttctcgtaactggccacactgctattcaggttcttcaagttctcgttcatgatggttttgaggttttcctcttggttcagtccaagggaatccaaagcttcgtaatctgcatagactaaagctaccagttttttattgcgttcgataacgagactttccagtacgaaaggcaggttgttgagacgtgcttcgatttcttcggggaagatgttttgtccgctggaactcaggatcatggtcttactgcggccacgaatatagaggtttcctttttcatccagtttacctaagtcaccggtacgtagccagccgtcttcggtgaagacttctttagtggcttccggatttttataataacctgtcattacattttcgccgcgtacctggatttcgccgatttctgcctccggattttctttgtagatacgggcttccatgatgtcgagcactcgcccggaagaagtcgggatgaattcgttccagggagcgtaactgattaacggcgcacactccgtcatgccataaccgatggtgaacgggaacttgatgcgatggaagaattcttccacttccgggttcatggcagcaccgccgataatgacttctttgaaacggccgcccaaagcatctatcagtttcttccggatttgcccatagatttgtccgtcgagcaaaggaatgctgagtgcccatttcatagtctttttatttatgataggttgaatgacattcttatagattttctcgataacgagtggcacggtaataatcaagctgggttttacctcttcgaaggccttcatcagaatctttggagaggggactttgcccaaaagtgtgacgtgagtacccacggcagtagctgtaagaaagtcgaaagcgcaaccgtaggcatgagccaagggtaagaaggagagtactttatctccctttttcaacaactcggtgcggataccgaaagtgacatttcctgcgagattgtttcctgtcagcatcacgcccttactgaaaccggtggtgcccgaggtatagttcagcagcattaccttatcattggaaagagtggtgtactgcacgtcttcccggtggaaacctttcggataagttatgtgcatttcttcatccaggtgtttgaggaaacgattgattgtttcaccgtcgcgctgatgcaggcaacggaaatcggaaagggagaatacggcacgcaatccggccaggcgttcttcttccagatgttcccagatggaatcgctcgtaaagaggaaaacagactcggagtggttgacgatatgatgtacatcattcggattaaaatcttgaagaatgggaacaacgatagctccgtaagtgatggtggccatataagcgatgcaccaacgggcattgttcttaccgataatagcaattttgtcgccccggcgcaagctgcaatgtttgaatagcaagtgcaatttggctatctcttgcgccacttgtccataggaataactctcgtcttcaccgtaatcggtatagcaaggaaggtcccagttttcacggaaactctgctcgtagagtttgataaagttttcttgtatcattgcacgaaaattgatgatttgtgcaaaagtagaaaaaatctaataattatatgtaactttgtagcagaaatgtgtttagaatagatatgattgataccaatatatttcaagataagacagcggtttactatacattaggttgtaagttgaacttctcggaaacctctactatcggtaagattttgcgggatgcaggtgtgcgtacggcacgtaaaggcgagaaagcggacatctgtgtggtgaacacttgctcggtgacggaagtggcggataagaaatgccgccaggctatccatcgtctggtgaagcaacatccgggggctttcgtggttgtgaccggatgttatgcccagttgaaacccgaaaccgttgcaaagattgagggtgtggatgtggtgcttggtgccgaacagaaaaaagatttgcttcaatatctcggcaacctgcaaaagaatgagtcgggagaagcttatgcttcggcgctgaaagatatccattcgtttgcaccgtcgtgctcacgtggcgaccgtacccgttattttctgaaagtacaggatggttgcgattatttctgctcttactgtaccattcctttcgcccgcgggcggagtcgcaatggaacaattgcatccatggtggaacaagcccgccaggctgcggccgagggaggaaaagaaattgtgctgacgggtgtcaatatcggggatttcggtaaaactaccggagaaactttcttcgatctggtgaaggcgctggatgaagtggaaggcattgagcgctaccgaatttcctccatagagcccaatctgctgactgacgagatcatagaattcgtttctcattcccgcagtttcatgcctcatttccatattccgttgcagtccggtagtgacgaagtgctgaaactgatgcgccggcgatatgatacggaacttttcgcttccaaagtgcggaaagtgaaagaagtgatgcccgacgcttttatcggcgtggatgtgattgtgggcacacgtggtgaaacggatgaatactttgagcaggcctacgaatttatcaaaagcctggatgtgacccagcttcatgtgtttagctactccgaacgtccggggacgcaggcattaaagatagaccatgtggtaactcccgaggaaaaacaccgtcggagtcagcgtctgttggaactttcggacgaaaagacgcatgcattctatgcccgtcatatcggacaaaccctgcctgtgttgttggaacgttccaagccgggaactcctatgcatggcttcactgctaactatatccgtgtggaggttccccacaatgatacattggataatcaggtggtgcctgttcgtttgggcgattttaatgaagacggaacggcgttgcagggaatggtgctattataataaggtataagaaaagtatgaaatcgaaacttgtctactggctgacttacgctggcatgtggcttctggctctgcttccttttcgggcactttatatattgtccgatggagtttgttttctgatgcgtcatgtggtgcattatcgtcgtaaggtagttcgtaagaatctgaagaattcttttcctgaaaaatccgaggctgaactgcgcgagattgagcgtgagttttatcgctatatctgcgactatatgctggaagaaataaagatgatgcgtatgtcgttcgaagacctttcccgtcgtatggagtatggtaatactgaagaatatcttgccatgctcgaaaaacatggaggtatcgttgtactcattccccattatgccaattttgagtggctgacggcgatgggagccttcatgaagccggaagacgtaccgttgcaagtgtataaacctttgcgaaacaagtatatggatgaaatgtttaagatcatccgtgcccgtcatggtggctataatgtaccgaaacattccactgcccgcgaagtaatccggttgcgccgtgaagggaagcatgtagtgatcggactgattaccgatcagtctcccaatcgcaatgaagcccatcactggacaactttcctgaatcaggataccgtatttatggatggtggtgaacgtattgccagaatgatgaattatcctgttttttattgtgaattggaaaaacggggtagaggatattgcaaagcatactttgatctgttgactgaaaccccgaagcaaactgctgagggagaaataaccgaactatttgtgcgtcgcttggagcagaccattcgccgtgctcctgcttattggttctggtcgcataaacggtggaaactcacacgggaagatttgaagaaacagcatgaataagatagcagttgtcatattaaactggaacgggtgcgatatgctccgctcgtttcttccttccgtagtacgcttttctgaagcggacggtgcggtagtgtatgttgccgataatggttctacggatgcatctgttgatatgctttgtcgtgaattccttaccgtccgattgattctgttggaagaaaatcaaggtttcgctgatggttataatatggcattgcaagaggtcgatgccgagtatgtagtacttctcaattcagatgtggaggtgacggaacattggcttcagccactggttgactatatggatgctcatcctgaagcggcggcttgccagccgaagatacgcagttggaggcagaaggaaatgttcgagtatgccggtgcggcgggtggttttcttgatcgttacggttatccgttctgtcgtggtcggattatgggtgtggtagaagaggataggggacaatatgacactatcattcccgtcttttgggctacaggtgcagctttgtttatccgcctgaaagattatcgtgaagccggtggattggatggacgtttctttgcccacatggaagagattgatctttgctggcggcttcgtgcacgtggccgccagattgcctgtgtgccgcaaagtgtggtttaccatgtaggcggtgctacgttgaagaaagagaatccccgaaagactttcctcaattttcgtaataatcttgtcatgctttacaagaacctgccatccaaggattttgcttccgtgatgcgtacccgtgcagttcttgactatatagctgcattgagttttatacttaaactacagttccccaatgcattggcagttcttcgcgcacggcgtgaatatcgtttgttacgttcttcttttactcctgcacgtgaagagaacctgaaaaaaacttccctttccgtgataccggaatggacaaaaagcagtatcttggcacagtattatttacgtggaaagaaatttttctcgcaattatagctttttctttttaccgattgtttattatttaaacgtattgccttatgacaaaattagttagaaagattggactggtggcgcacgacgccatgaagaaagacctcatagagtgggttctctggaactcagaattgctcatggggcacaagttttactgtacaggtactacgggaactcttattcttgaggctcttaaggaaaagcatcccgatgttgagtgggattttaccattttgaaatccggtcctttgggtggtgatcagcaaatgggatctcgcattgtggatggcgagattgattatcttttcttcttcactgatcctatgacgttgcagccgcacgatacggatgtgaaagcgctgactcgtcttgccggtgttgagaatatcgttttttgctgtaaccgtagtacggcagaccatattatttcaagcccgctattcgttgatccgacgtatgaacgcactattccggattacaccggctataccaaacgatttgaaaataaaccggtggttgccgaggcagtggagtctgcaaaaaaacggaagaaaaagagaggataaaggagacagttggttctccgataaggctaaaaagaggggaagaacttcacatcggaaagtccttcccctttttctatatgaagcttccggatgcttataacaaaaatacagacgatttatccgctttattctctacagagtttattttgaaaacagaagtgatagtatttcccatcggcagggcgatacaggctaagacactttttttaagaggataaggtttaaggatagaataggataatcttaacggtgcagctattgaagtgtcatttataagctgttttagctatctacatgccacaacagaacgcttggaaacaatcagaaagatgggaagaaagccgtatgaaaaacatgctttgctttattgttttttttcttttgcctgtagctaaacttcgtcccgcagttgtgggctctacgttttccagttgagggctgtgcagcctgcaattgcgggatggacagcccacaactgcgggacgaagtttagctgcgggcataatgacattaacctgaatgctttttgggaaaaagtaaggagcatatcaagttttatatctatcatttgactttctacataatgagagtatggggcttatcatcccttaattcctaacgaaatgctaactttattcacttgtgcgacgaataaaagagatatttgcatcaattcggataaaggttgcataacgtatattaagcgcttgtgaattagtgaattacaagattaaaagcacgctttttgagccgttttacggtgtagaataaaactttcctacaccttcctacaccacttcctacactgcctatttatctgataatcagataaacataatagccggtgtaggatgtagacaatattgatgaaaactcaactgtgtgagatttccttttattgcttactgagttcactttaataaaaaaacagtgggagtgggttaagctctttcacattgcacttccactcctgccgcatctaagtctgcacccatgggtggattacgtttagcgagttttagttcaatagctttaacggtggggaaagtacggaacaggcgttttatgatacgtccgcaaacatgctccagcaatttagaaggtatctccatctcagccttcacattttcgtatacatcggcataactgacggtatgtgtcacgtcgtcagtctcggctgcacgtgcaatatcgactttcaatttcagattaatgacaaactcattacctacttctcgctcttgctgacctacaccgtggtaggcaaagaaacggacgttatcaaggaatatataactgttcatatcaaatagaatattcggtgaatgacaaaaataagaattacctcccagtaaacaaagaaaacaggtgtattcttccataaacaagcgtttgatttggaaaatgagttacgtagtcagccccatacccttcaggggattggggataaggcgatggtatttaaaaaaaaggcacctactatgggtgcctttttctattataaagattgagagtattatccttttcgtccggtctgttctatcagtcctttgatcttctcgttcagactttccgctttcatcagttgttccagcgtcaggtgcatacggtagcgccagtaatgtctggggttagcaggcacgttgatgcgctcttcctgtacattggggttgcgccattttccgtccatagccatccagtcctgcaaggagaggatgcacaggatggagttgctgtaaagatggttgcgtaccacttgctcgcaaagttccggagtggcaacggcaggtgcagcgccgtaatgtcccagcatggtgttgtagtaccgttgcgtttgctggaaatcttcttcccaccagccgcgcagcgtagacatatcatgcgtagagatggtgcaaaccgagcggtacggataccagtccggatgtccgaattcctgtgaaggatctttcggcatgcgttgtatttccaggctaaggatgcgcaggtcgttcatcacccaagctacacaatcggggatcatgccgaggtcttcaccacataccagcatacgggtggattgcgtcagttgcggcaacttcttcatggcttgttcgcgccagaactcgttgtggcgatgatagtaatactgatcgtacaaacgattgaatgctgccttctcccaatcattcagagcacggtaaatgtaatcgtgttgtacgccgatgcgcggatggaatttgtgcgggtcttcacggtcgggcacaaacagtacgtcactgattaatgcgtacagtccgtcgcgtatccagatgctgtcttcgtccgtctttccggcaaagtaagcctctactttgcgctgtgtgtcgaactcgggacgcatgcgatatatttcccatgtttccgtaggctctatgaaggtctgctttacataatcagtatgcgggccgaacatttgtccgaggaagtattcatggatatagggtttcgtgaagaaatcttcgcggaatgccattccgtagccttctatttcttcgcgcgtcatcggcagggcgggaacaaattgacccagcagtccgtgtacggcatgcatcgggatttcccaaatgcggaagaagccgaggatgtggtcgatacggtaggcatcgaagtattccgacatcttgcggaaacgcttcatccaccaggaataaccgtctttctccattacgtcccagttgtaagtagggaagccccagttctgaccgttcacggagaagtcatcgggtggtgcgcccgcttgtccgttcaggttgaagtagtagggttctgtccatgcttctacgctgttgcgactgatgccgataggaatgtcacctttcagtactacaccattggctcgtgcgtgttccgttgcagccagcagttgcaggtgcaggtggaactggatgaagaagtagatggcgatatgcggatagtcggcagattccggctggcataacttttctatttcttctgctttgtattctgtgaatttcggccattcgcggaagttgggtgtcttgtaggcatcgcgcagatagctgaatacagcgtatggctgtaaccattctttgttgttctcgaagaacttccggaaggcatcggatgccagaacttgttcgccttcctgtttgtatatcaggcggaagaactcccattttgtctgatttactgcttcatagtctacggtaggcaaagcattcagctctttctgccgtttattgaattctgccattgcctttttgtccttcaacgtacccatctgtttcagatcggcatacatggggtggaatgcataaatggatatgctgttgtacggataagaatccgtccatgtatgtgtcatggtggtgtcgttgataggcaatatttgtacggctttctggcgggtaagcaccgcccagtctatcatctgtttcaggtcgccaaagtcacctacgccgaagctcttttcggagcgcagcgagaagatgggcacggctactccggcacctttccagtcgggtagggcgaagtaaacgtaacggtcaccgatcaccagtgtttcgttagcgcctatctgcggatcggccatgtagcggttggggttgttttcccatgccacggcacgacgctctttcttattataaaggatgaatttatactccagcgggaagctgattttcgaggcgtctacttcaacctgccattccgggaagttggcgtcgctcatcagaacggctttatccgcatcccaatctcccagaactttctggttgccgcaaatgcccagacagtgatcattgtcgatacatggagcatacgccttgatcaataatcctttcttgtggctctttggagcggcgttacgttcgggatgtgcaagcagggactccgtgaaagcagacgtgtagaagtattgctgttcgggcagattcttccagcagtcttgcaggcggtagactttcttcttgtcagccgatacatagagcgtgcggggaaggctgttccactccgtacgtgtatctttgccgtcgcgataaatgtgataactgtattgtacgatgccgttttcaggcgcttgaatgtccgcatctaaagtccagtgaatgccatccactgtttgtaaaggtatggctttaccgggctgattgttgcccagttcaagaatagatcctaagactctaacctcttcaccccaacttgtgcggtactcgatatgaaaagatagtatcatataatattagatttagtaatagctgcattgactatgcaagtatagacattattccgcataatcaagcagctaccgctatctaagttttttaaattcctatgcaaacgtttgtgcttgcatttcgcagagctgtttttatccgcaacgtgaagctccgcaagtggtacaaatgaggcaaccttcctgatatacaagtgtttcgttgccgcagttcggacatttcttgcctttggcttctgtgccgtccgttatgtatttcttcaatgcgcgttccacaccgttcttccaggtattgatgctttcgctgtccagttgcagagagccgaccagcttgataacctgttcgataggcatacgataacgcaatactccggagatcagtttggcgtagttccagtattccttgttgaacttttcggacagaccttcaatggtgactttatatccgcgtttgttctggaactggaagtcgtaacgcttgctgccgtccttgtccaccttcttaataatgtgtccggaagtaacgttcttcggcagaataatgccttcatcgtcatcctgaagaccggtgaagatttcgtaaggatgtccgtccagcaaaccgacgaatgccacccacttttctttattattctggaaacgtacgatgtcggcatccagaactgtcgggcgggtttctactatcgtaggcggtttgcaaggaggcatttcttctttcttatcgctcttggcagaaatgagtacgcccgaacgtgagccgtcacgataaaccgtacaacctttacaaccggatttccatgcctctacatacaggcggtttaccaggtcttcatccacatcgttcggcaggttgatggtcacgctgatggagtggtctacccatttctggatacgtccctgcatcttgactttcatcagccagtctacgtcgtttgaggttgctttataataaggtgattgctcaaccaatacgtcgatctcttcttgtgtgtaacgtttggaaggattgtgtccttgcgcttccatccatgtaacaaatttggggtggaagacaatatattcttcaaaagcatctccggtttcatccacgaagtctacgtgtacgttagtgtcgttcggatttactttacggcgacgcttgtatacgggcaagaatacaggttcgatacctgaggtagtctgagtcatcagactggtggttcccgtcggtgcaatggtaagacaggcaatattgcggcggccgtatttcttcatatcctcatacaactggggatctgcttcgcgcaaacgattgatgaacggattattcttttcacgttcggtatcgtaaatttcgaatgcaccacgttcttttgccatttccactgatgaacggtaagcactcagggcaacggtcttgtgcactttttcagagaattcggtagcttcttccgtaccgtaacgcaatcccagtgcagcaagcatatcaccttcggcagtaatacctacaccggtacggcgtccttgtccactcttcttataaatcttgtcccacaatatacgttctgtatgtttcacatcttcgctttcggggtcagcatcaatcttttccatgatgcgttctatcttctccaattccagatcgatgatatcgtccataatgcgttgagccaacgctacatgtttctggaacaattcaaagtcaaagtatgcatccggtttgaaggggtttaccacataagaataaagattgatagccagcaaacggcaggagtcatacgggcacaagggaatttcaccacatggattggtggaaacagtgcgatatcccaggtctgcataacaatcgggtacggattcttttaatatggtatcccagaacaatacacccggttctgccgatttccatgcattgtgaacgatcttcttccacaaattggttgcattgatttccttctgcacagttggttcagcggcattgacaggatattgttgaatatatggagtacctgtgatagcagcggtcataaatgcatcgtccagtttcacagatacattggcacctgtaactttgccttccgtcattttagcatcgatgaacgcttctgaatcgggatgtttgatagatacacttagcatcagtgcgccacgccgtccgtcctgagcgacttcacgtgtagaattggagtaacgctccataaatggcaccaggccggtggaggttaaagccgaatttttcaccggagaacctttcgggcggatgtgcgacaaatcgtgtcctacaccaccacggcgcttcatgagttgtacttgttcttcgtctattttgaagatggcaccataagaatccgcctctccatctactccgatcacgaagcagttagacaaagaagctacctgatagttgttaccaattccggtcatcggacttccctgcggaacgatgtacttgaagtggtcgagcagatcgaatagttcctctgcacttaatggattagagtatttagcctcgatacgggctacttcattggctattctccaatgcatgtctttcggagacttctcgtaaatatttccgaaagagtcttttactgcgtacttgtttacccaaacacgcgcagctaactcgtcgccctgaaaatatcgtaaagattcttcataagcttcctcgtaagaataagtttgtttttccacgattcttttttccttagatttattttttaataagtaagagtgtagaagtgatacctatcattaacaaatgcgattgcaaagctaagaatgttttttattatagcaaaataaaaacagaataaattatgaacaggctatgagatttccatttttgaataatagattgctgatttataaaatattagcattgttgtgtgaacaaaaagtttccaaaaaagaaaattgtttctagactttgattaaacaggctaattgattttagaaaacgtagataaactttaaactcgttatttgacaacaaattgctattctttttctatatttgcaaaaaaataaaagaatggaaatcctaaaacagagaagaacaatccgcaaatatcaacagaaagatatttcttcagatttgttaaatgatttgcttgattctgcatttcgagcctctacagtcggaaatatgcaggtgtacagtgtaattgtaacgcgtgatgcagaacggaaggctaggttggcaccggctcacttcaatcagccgatggtgaaaactgcacctgtggttttgacgttttgtatagacctgcgccgttttactaaatggtgcgaacagcgaaaagcaactcccgggtataataatttagagtggttcgtaaccggctctgtagatgccctgctggcagcacagactttttgtgtggctgcggaagaaaaaggattaggtatatgttatctgggtacgacgacttacaatccgcaaatgataatcgaagccctggagttaccggaattggtgtttcctattacaacagtgacggtaggttggcctgccgaggagcctgcacaggtagatcgattgccgctggaagctattgtgcatgaggagacgtatcatgattatactcctgaagatatagatcgcctgtatgcctataaggaatctttgcccgaaaataagcaatttatttttgaaaacaacaaagaaaccttggctcaagtctttacggacgtacgttataagaaagaagataacgaagtaatgtcggagaatctttggaaagtaataaaaaagcagggtttttaaccctgcttttttaatgatgcttggatatcatctatttctgcgcggaaagttttgtctacttcccgtaattctttaatggttttgcaggcgtgtaatacggttgcgtgatctttgtggcctattaatgcgcctatcttagccgtcgaaaaatctgtataggatttagcgagaaacatggctatctggcgtgcctgtaccacttcgcgttttcgtgatttagtatggatggtagcagtatccagtgagaaatgcttgcataccacgttgatgatgtcatcaacggtaatagatttactttcactttttactaccttccgtacaatgcgttgcgtcagttccagatcaatttccttattatatatagtagaatgtgccatgatggagatgacgataccttccaggtcacgcacactgtcacccacattttctgcaatataatcgattacttccggagggaactgtaaaccgtcacgatgtatcttattgcgcaggatgttcttgcgtaattctacggttggtctttccagttcagctaccataccccatttgaaacgggtgatgagtcgttcttccatgccttgcaataatacgggagcacggtctgaagtcaggataagctgtttaccgttttggtgtaagtgattaaagatatgaaagaatgtattctgtgttttggtaacaccggcaaattcttgaatatcatcgataatcaatatgtcaattgattggtagaagttgataaaatcgtttgtagtattgttacgtacagagtcggtatattgtacctggaacagatgtgccgatacatatagcactctcttgtccggatagagttctttgatttttgtgcctatagcatttgcaaggtgcgtctttcccacgcctgatgctccatagaaaaacagcggattgaaaattgttttcgccgggttttgagcgacagcttctgctacgctgcgtgaaagtttgttgctatagccttctataaatgtttcgaagttgtattcaggattcagatgaggatctaaatctgcaataggagcttgcggtatttctctgccgattacctttttctgtggaataatagtgcggggagtagattcgagattgacggtagtacgtgaactcttatccaccataacattatacaataacttggtgccatcaccaataactttatatagagttttacgcaacaagtcaacaaacttgtcctccaaaaactcatagaagaactggctgggtacctgtacgaccagcgtcttgtcctcatattttaaaggtatgatggggagaaaccatgttttgtatgtctgctccggaacattgtctctgatgatttcaagacagcggttccatagcccgacatgatttaattcactcataacggctttaaatacatttattaattaagcaaaacttctacgcatgcaaaattcgcaatcttatttgagaaaaacaaatgtgttttttcttgctttttatctaaaaacaataatctctttactttcaactacttatcttgtttcatgtaaatagccccacagggaggctattgcatttttataagtatctgtcttctagtatgatatataagaaaggaataagttttttaacttttcaaataatctgacagatgggaatactttagtttctacatggacttactgaggctttttcttccaattctgtttgctcctattatttagacttattctatttaaagagatttttcctacttatcttttttgccgaacagggagaaatgaacataccttttcggatgtgatttcaggtcttcaagaaggctggcagcattggctgttgtagcattcaaattattgtaaagcgatggatcgtttaacaacaagccgattgtattgtctttcctgcctaattggtctgtaatcatttttgcatttgctaaagtcgaatctattctggcaaatgcggcagcgtaatctatttctttcagattatcactgacagtgacgaaattatctcctatggtgttcagctttttagtaagctggggaatatctttactcataatggcctgtaactgtctgctggtgacttccatgcttgccattgtgttttgcacgctgtgcagtgtaccgggaattgccgggtctccaaggattgtattcagtgaagcaaggatagagtctagcttgggaagcatcttttctacctgaggcatgatggtggctacctggtccattacaccattgttgacattgccttgtagggtatcacctgtcagatacttctcgcgtggattattggcaagtagtaagttcatttttacaccacccatcagttcggaggctaattcggcggtactgcctttaggaatacgcagttccgggtctacatctatttccgctaccacttttcccggttcattgtagtcataataaaggtcgcgtacaatacctacacgaaagccatcggcaaagaccggactcgatttggtcaatccattaatgttatggaacttgacgtagaaatagttggtaggcttaaacatatgaatgcctttcaggtagttaataccatataccaatatgcagagagcaataatgcccgcaattcctattctaacttctttagtaagatacttcatcatgatgttatagtcttattatttatttcttttctttttaaattcttcgatagcagcgctgacgcttgtcttctttccgtttttgaaagcaatgataaatgcgtctttgaattttggtgctatctcccgtttagttcgtaataccttattataatcggtcgatgcaccgtatgtgtatttacaaagtccgccttcctgataatactctacacctttcagcccttttagtcgtttgtcattggcggcaagcggacgggaagaagtaagtatctgtattttaaacactggagcagcactatcggtttgcctgtcagctactttttctgtattttgtttggtttcggtgttattggaaacgggggatgcaggtatctcttcttctaccctaccggcatccgtatcctccggtagtagggtgcggctgcttcctgtcatccgtatttcatgttcacgtttataagacaggaaagcacggaatattccgttggcaagtgtggtggttcccgcttccgaattgagataacgttcttcttccggattggatatgaaaccgagttctaccaggatgctgggcatggcacttgctttcaatacaaggaacccagcctggtgtacaccacggtctgcacgtttacaggtatggcggaattctttctgtaccaatgaggcaaggtgtacgctctgagacatgtatttatcttgcatgaattcaaagatgatataagattcggctgagtttggattgaatcctgcgtaccgcgtcttgtaatcactttcgtataaaattacggagttctcccgtttagcgacttctaaattggcatccgacttggctaaaccgagcgtccatgtagaggctcctttaactgttttaccgcccgctacggaattggtatgaatggaaatgaataaatcagctttagcattattggctatttccgcacgtctgtcaagtgggataaatacatctctttcacgggtatataccacttttacatcagggcaattcctttttatctgtttgcctaatttgagggcaacattcaggttgatagtcttttctttggagattcggcctaaagcaccagggtcatgaccaccatgtccggcgtcaataacgacaacgaagtcttttgcttcgatgctggtagtgcaaaaaggagagatgaacagcccgaagcaaatacagatatataatatgtgtcgtttatatagtttcatacccaaaagtcgttgcaaatgtagtggaaatttatagaaaactcacgttttacatgaagttttgttacttttccccaggatttgtgagagatttctttaaaacagactaactttgcacccgcaaattaaatagaaaaaaggtatgttagttcgttttcttaagaactggacattgccactggcgatgctttcaggtactttgggatactttattctcgcaaatgtccctttcttggcgcctaccaaaccatatattaatgatttgattgcgtatattactccactgttgatctttgcccaactgttgcttactttttgtaaagtagaaaaactgaatgaactgaaacctaaagcatggcatggctggttgctgctgtttcagacaatttcatgtctggcaattgccgctttgctggtatgctgtccgatggatgaaatatatcgggaagtatttgagggggcgatggtttgtgtgatttgtccaactgcgactgcagcggctgtcatcactggcaagttgggaggcagtgcatctacgttgactacttataccttattatctaatttgctggcggcagtagcggttcctttggttttcccgttagtggagcctcatgctgacatgactttctttgctgctttcctgaaaatcctgagtaaagtgttcccgttgttgttgttccctttcttcttggcgtggtttctgagagtgtttatgccccgtgtgcaccattttttattgggtttccatgatcttgctttttatttgtggggcgtagcgcttgctattgtatccgggcaaactgttcgttccctggcaatcagtgatgcaccggttttggtggaaatattgatagcctttgccggattagtggcttgttgcctgcaattctttctgggtaagaatataggtggacgttataatgaccgtatcagtggcgggcaggcactgggacagaaaaatacggttcttgctatctggatggcatatacttatctgaatccactttcctccgtgggaccgggatcttatgtcttgtggcagaatctgatcaatagctggcagctatggaaaaagagaaagagggaagaggaagaagcgcaacattaacgcaacagcaattcttcctcgttatatcttggcctgttctttacttcaatgtagattttaccgatatattcgcctacaattccaagggataccaatattgtaccacctaccagccaaagggaaatcatcagagatgaccatccgggtacagtgtcgtggaagtagtaagcgcgtagcgtccagatggtgacgcatacggctatcagtataaaaatacagcccagccagaaaaccatgcgcacaggtttgacagaaaaagatgtgattccgtcgatggcaaagtttaacatcttcttgaatggatatttcgactctccggcaaaacgcttgtcgcgattatagtaaacacaggcggtttggtaaccgatgagaggcaccagcccgcgcaaatagagattgcgctcgcggaaacggcaaagttgttggatagcacggcaactcatcaagcgataatccgcatggttataaaccgactttactcccattattttcatcaacttgtagaaagcgagggcagtgctacgtttgaagaaagtgtcggttttacgttcccggcgtacaccataaacgatgtcacatccctctcggtagcgttcgagcatttcggtaatggcgttgacgtcatcttgcaagtcggcatctatggaaatggcgacatcacatcgttctttgacggcattcagtccggccatgagtgcattttggtgtcctacatttccggctaggttcagcccacaggcatagggggtattttggtgtaaatccttgatgataggccaagtctgatctgtactgccatcatttacatataagatataactatcctgagagatgtgtcgttctgctatcagtttatccaataggagactgagtcttttatgtgtttcgtgtaatacagcttcttctttgtagcaaggtactacgatagcgagtactggagatttttccataatcaattattctttttgcaatattcgtaagaaatcgggagaaaaacaaattatctttctttgtatttgaaaacaaatctcactagcaggaagtttaccgggatagcgatggtaaataccggtatgggggcgaagggtttggaaaagcctaaccaaaggaacagattcagtaaacttatatgtaggatatagttgatcagatgggctcccccgaagccaaaagctttcttccaggatggcttctttccgaaggtaaaaagggctgtcagataaaaattagcaataaagctgagtatgtagcctatgctgtaggctatatttacattgatgaatcgctggaatataaaatataaaccatagtgcagagcggttgcaaagacgcctaccataatgaaacgaataaattccggcagttttttcagtctcttcatattcatagaattgagaaggcaaagttagggattgttgcagaataattcgtacttttgcgcacagaaatcattaaaaacagaaatatatgtcagatgataggaagaaagcgttctggtttatagcgctactcagtatgcttgtgatactcccttttctgggagaaaccattttttattctaaaggggaaccacgtgaggccattgttgccttttctatgttagagagtggtaactggatacttccggtgaattatggtaccgacatagcttataagcctcctttcctctactgggccatcgctgccatctcttccctttttggaggagtgtcagagtattcatcccgtctgccgtctgctattgcattcctggctatgcagttggtgttcttctcttttatagcaaaacgtaaaggggtaaaaacggcttttctgacttctattcttcttctgtcttcttttgaagtacaccgggcagcggtggcgtgccgtgtagatatgttgcaagtgtcgcttattgttatttcattgtgtttgctgtttcgttgggatgagaaggagtgccgcggtattccctggctggctgttttactgatgggctgtgccacattgaccaaaggaccggtaggttctatattcccatgtgtctgtatcggtctttaccagttgttgcgtggacgttctttctggaagacattcttcttgttattgcttgtaggaatcctttctctgattccttatgcagcctgggcgggcgcggcttatgcacaaggcggacagtcttttgtcgatttaatgttggaagagaataccggtcgcttcatgggaaagatgtcctacggatcacatgagaatccgatatggtataatttcctgactgttatctggggctggataccctggactttggtattgctgatctctctctttggactgaagtggaaaaacatgcgtgtgttacctgaggggacatctttcggcgaacgtatcgggaaagcctggaaaaaattccgttcacagtcgcccttgcaattgttcacatgggtggtaattctctttattttcatattttattgcatccccaagagtaaacgtagcgtttatctgcttcccatctatccatttatggcagtgctgatagctgaatatttattggctttggtgcagcgtggggcaaaagtgtttaaaatctctgcacatatatttgcgtctctgtgtttgatacttacggtaactttcatagcggtacgtttaggactgataccggatagcctttttggaaccggccgtcatgctgctgaaaatgtatcttttatgcatgctttggaagcggtttctctgtctattcctaaatggtgtctggtggcgcttcctttgatagcagctgcctgcacatggatgggagtagcgaagcggaccggcgcttactccttattatacagtatcgccggatgcatgctttgtcttttcgtttctctggatggggtctatcaacctacagtgttggcagttaaatcggacaagcacctggttaaccaaatcagggaatatgtgccgcagggaacagtctactcatatgatggcatgagcttctattgtgcaaacttttatatgaatgatcagatgcgtcattttgagaaggatttgccgtccggtgagggatatgttgttttgccggagagaggaaaagaactgttgtttgaagaatttggaaatacatacgactttgaagagattttccttacgaagaagcgcagttgcgatttgcgtgatgagatttatatgtataagtttaaaaagaaataaatgtcacccgttacaatcatcgataaatattatccggaggataatgaacgtaaacacatcttgttggtgcatagtcgtttggtggccgagaaggctctttcaattgctgatcaccatccggagcttcagttggataaagactttttatatgaagccggcatgctgcatgatataggcatctttctgactaatgctccgggtatcttctgttttggagatcagccctatgtctgtcatggctatttaggggcggatctgatgcgtcaggaaggatatccccgtcatgcattggtatgtgaaaggcatacgggtgcagggctatctttggacgatattatttcgcaaaagctgccagtacctcatcgggatatgctcccggttagcctggaagagcaagtcgtttgctttgccgataagttttattccaagactcatctggagcgggaaaaaacagtggagaaagcccgaaaaagtctttctaatttcggcaatgaaggtttgaaacgttttgatcgctggtgcgaacagttcttgtagcaatctaaatttctttaaaaagggagattatccgtataatttacgtacttttgccccttcaagcggaaactataagttgattacgccattgaaagcaaatacattcatatcattcatactactacttgtcttactcctgctctccggcgaggctttttcgcaacgtcggcgtggaagaactgttcccacaggaagcgagcggacagatacctttaatatagaaggtgtacaaagaggagacactttgttgaagggggatactctgcaaaacgatacgatacaattgcagcctgccggtaagaaaaagcagcctttggatgctccggtgatttatgaagctactgactctattgtgttcactcagaatggcattgccaatttatatggagatgggaaggtgaactatcagaagatagagctggctgccgaggtgattactatgaatatggacagtagtacggtttttgcccatggtgtggaagactcattaaaagtcataaaaggaagaccggtcttcaaagatggcgatacaccttatgagacgaatacgattcggtataattttaagagtaaaaaggggctgatcagtaatgtagtcagtcagcaaggcgaagggtatgtgactggtaataatgctaagaagggtatgaacgatgagctgtacatgaagagtggccgttatactacctgtgataatcacgatcatcctcacttctacatgcagatgacctatgccaaagtacgccccaagaaaaatgtagtgacgggccctgcttatctggttattgaggatgtcccgctacctcttgccgtaccgtttttcttctttcctttctccagtagttattcatcgggtttcatcatgccaagttatatggatgactctacccgtggatttggtttgacggatggcggttactatttcgctatcagcgataagatggatttgaagctgcgcggtgatatctttacaaaaggttcctgggctttgaatgcggaaaccaattataatgttcgttataaattctccggtctgtttcaagctagttatcaggtgactaaaaccggtgataagggcttggatgactatgcagtagcaaaagacttcaaggttgtttggtcacatcgccaggatcccaaagccagcccaaattcgtcattctcggccagtgtgaacttctcgtccagtagctatgagcgtactaatatcggtaatatgtacaattcgcaggctatgacgcagaataccaaaacatccagtgtcagctattcacgtaacttccccgatcagaaactttctattgcagctaccggtaatattgcacaaaacatgaaggactcttcgattgccgtaactttaccggatttgaacattaccttgagtactatttttcctttcaaacggaaaaatgctgtaggtaatgagaaatggtatgagaagatttctcttcgctatagtggccgcctttctaacagcattactacgaaagatgatcttctgttcaaatccaatctggtgaaggactggaagaacggaatgaaacatgaaatacctatcagcgctacgtttacattgttcaagtacttcaatgtaactccatcggtgagttatacggagcgttggtatacacgtaaggtgatgaaagactgggatccaaatataggtaccagtgggcgggaagtagaaactgatactatttatggtttccatcgagtatataactatagtgccagtctgggtgttaatacaaaaatttatggtatgtataaacctttgtttatgaagaaaaaggaaatacagattcgacatgtcataactccttctgtcagtatcagtgcagctcctgactttggttcttcccgctatggttactatgatacttatattaaacccaatgctgatggaacacaagatacgatcacttattctccatatgccggacaaatgttcggagtgcctggacaaggaaaatctggaaatatttcattccagatatccaataacttggaaatgaaatataaggataagaatgactcaatacgcaaggtcagcctgattgatgagttgggtgcgagtatttcttataatacggctgctaaggtgcgtccatggagtaacctgacattaaatttgcgtttgaaattgagtaagaactatacctttagtatgagttcagtctttgctacttatgcttatacctttgataaaaacggtagggttgtaacgagtgaccgcacggagtggtcttacggacgttttggacgtttccaaggctatgggaactctttcagttacacgcttaataacgatacatggaagaagtggaaagcattctttaccggagagaagagtgaggatgatggaaaaggaaacgaacagactgatgcggacagtgaaagtaacgaaactgatgatgcgggaacaggtaatacgcctaccaagcggaagaaggaaaaagctgctgtagatgatgacggttatcaggttttcaaaatgccttggtctataaatctgagtacaggctttaatataacagaagatacctccagaccaatcaacagagagagcatgcgttatccttataagtttagtctgaatgcgcttaatattaatggtaatgttaagatttccaataagtgggcagtcagcttcaactccggttatgactttaatgctaaaaagatagtgcagacttctttcaatataacgcgtgacttgcactgttttagtatgtctgccagtctttctccatttggtacatggaagtactatagcttcgttatccgtgccaatgccagtattctgcaagacttgaaatatgataagaagagtcagacacagactaatattaaatggtattaagaatccatttgatattccttttactgcatttgctttttcataaaaaatatccccttctatactgttgaaacgatttatttatcggaatgcttcagtgtagaaggggatatctttatttctgattaggaattgctttttaccatgctatttcttgttctccatgttctttcaaataggcattcgctctgctaaaatgcttatttccaaagaaaccattgtaggcagataggggagagggatgcgcagaagtcagaacaagatgcttgctccggtcgatgaatgcacccttacgctgtgcataagatccccagaggatgaatacgaggtgttcacgctgttcggcaaggacacgtatggcggcgtccgtaaaagtctcccagccgcggttctgatgagaacctgcctgatgggcacggacagttagggttgcattcaggagcaggacaccttgctcggcccaacgggtcagatttccagtggtgggagcatctgtaccaatatcatcttttatttctttgaatatattaatcaatgaaggagggaaacgaactccatcgttcacagaaaagcataaaccatgagcttgtccgggaccatggtaaggatcctgaccgatgataactactttcaccttatcgaatgggcaaagattaaaagcgttgaatatgagctttcccggagggtatatcggataatgactgtattcttcccgtacaaaatccgttagtgtatgaaaataatctttttcaaattccggttccaaacgtgctttccaactttcttctatttgaacgttcataattttgtgtgttaaaagtttcggatgctaagatacaattttaatctgatttctgtaatagagcattctttttatttcttcgaacagagataaacagaaaaggcagaaatcataaaatctctgccttttctatttgtacctggatatcaaatcaagtaaatattgtgttccttacattcttcacgcatatcttccggccagatactggcttgaatttcgccgatatgagcttttcttaaatagaacatacaaagacgtgattgaccgataccaccacctatagaaaggggcaatgtgtcattcatcaggcgtttatggaaatagagttccagtcgtttttcttctccctcttgtttcagctggcgttgcagggcttccttatctacacggatacccatggatgatagctcaatgctgcgctgcaatacattatcccataataaaaggtcaccattcaagcccggaagaccattcaacccttctgtggtatagtcatcatagtccggggcacgtccgtcgtgtttctctccatcgcttagtttacagccaataccgataatgaatacagcaccatattttttcgtaatggcatgttcgcggcatttgggttccagattcggataaagttgacgtaactcttccgcatgaatgaaatgtaacttctgaggcaggcaaggcttaatctgagggtacatttcatacaccatatattctgtacgtatcatggctgcataaatacgggttacaatttctttcaggaagttcacgttccggtcttcggtagtgatgacacgttcccagtcccattggtctacatagagagaatggagatttcccagctcttcgtctgagcgtatggcattcatatccgtataaataccatatccggattcaatattatagtctgccaatgtcaatcgcttccatttggcaagagaatgtactacttcggcttgcgcatctcccaaatctttgataggaaatgatacggcacgttctacgccattcaaatcatcattaatacccatacctttcaatacgaaaagcggggctgtgacgcggcgcaaacgtaattccgatgaaaggttcaattggaagaactctttgatctgtttgattcctaattctgtttgttttaagtccaataagggtttataaccctctggttttatcagataactcataagtgtgtactatgtttttgtccggcaaatataggtataatatttatatttgcatcgtatttggctaattttatgagcaatttgtttcttattaaccagttgtggctctcaaaataatattcttatttataggcttttactgtaaaaaaagacaaatcattaggaatatgcccgatttttttatacttttgtccccgcatttaaggctccgtagcttagtgaatagagcgtcagattccggttctgaaggtcgtgcgtttgaatcgcaccggggtcactagaatatccttgataatcagctgattattgaggatttttttattgagtacattactcttcagacgaggaattatgccttaatatcgctaatataccacccttgtttcctaatagtttcctaatttaagtaagagttaagatgctgactattagagaagaaatcaagaaaggtgaggttaagagtgacggaacttataacataaagattagatttactcttgatcgtaagttaaggagattgtctacaagtctctttgcaacatctaaggatttaactaagtccttgaaactgaaggagggtactcctattaagcgggaagttgataaacttattcgtacttatcaagatatatgcgctaaacttcagttggaagtgaatgcttatactctggatgatgtgtttgattacttggaagctgagcgggagcgtacgcgatctatagactttattcaattctgtaaagaatggctggaggctacggatattaagggtaagaagaactacaagtgtgctgtaaatgcgttaattgcatatataggtaatgaacatttggatgttactaagctaacagctacattcttaagaggatttactgaatatttaagcgaacgcagaatggagcggattaaagtaatatctgaagctggtggacggattacatctaatcgtgctgtatcattatatcttggtagcatcagacatttatttaatgaagcgaagagacgatataatgactatgataggaatattattctcattactaactctccttttgaaaattttgtggttcctaagcaagaggctacaaggaagagggctattcctgcaaatctgattaagataattagtgaacttccctaccgttatacagtgaaaggtgaagagagcaattgtcgttacaaccttgccaaagattgtttcatgctatccttctgtttgataggcatgaactcagcagatttatataacgcagcgattaaggtcggtaatactatcatttataaccgaactaaaactagagctcgtcgaagtgatgaagctcagatgcagattgaaatcccttcactgatactacccctcattgagaaatatcgagactgtacaggacaacgtgttttcaacttctatcgttcttatactactgcaagtagctttaaccgtgctgttaattatggtttgaaggaaattgggaagttgattggcattgcggacttggaatactacgcagcccgccattcatgggctaccattgcattaaataaagtaggcattgacaagtacactgtacatgctgcactcaatcatatagatgaatctatgaaagttaccgatatctacattgaacgagacttcgtgaatgagaataaggctaatgctaaggttatgaagtatgtgtttggtaaataaatttaagaattccccgtttgcagcaatacagatgggaattcttttttagctttgcattgagttagaactagaagcatcatgaaagataacctgtttattgaatatgtaaacactccttatgaagagccacaagatatgctccccaagattaatgaagctatgctggctgatatggaggagagtttagaagttgatttcaaaaaggaatatcagcaagaagatttagcgtctattttggagagcataaaatatatcagaatctattgtaggaactttccatgtttcaatggtttcgattatcaacctcttcaagcaccattcgcctactatcgtagcaggaaaacttatctcaaagaactaccctttacagaagatgagttttataagttcacatacatacaggatgcaataaagaagttggggctaaaagctcaacctacatttgagttcataacattcttatactataatattaaggtgtggagtgaaaatcagataaccacaagtggggcaaaggtcgataatattctctctctattgaaggagcaactcaatacccaattaactatgaatattaaggtaggcagtaaatcctttgagtttaacaattcattgttcattcaatctttattggagttctattcttcccataaccttatctcttgcaaccttgtagaacgagagaataagagag

SEQ ID NO: 948 - DNA, 29552 bp, unidentified
  source 1..29552: mol_type = unassigned DNA
  misc_difference 16105: note = a, c, g, or t
  misc_difference 16106: note = a, c, g, or t
  misc_difference 16107: note = a, c, g, or t
  misc_difference 16108: note = a, c, g, or t
  misc_difference 16109: note = a, c, g, or t
  misc_difference 16110: note = a, c, g, or t
  misc_difference 16111: note = a, c, g, or t
  misc_difference 16112: note = a, c, g, or t
  misc_difference 16113: note = a, c, g, or t
  misc_difference 16114: note = a, c, g, or t
  misc_difference 16115: note = a, c, g, or t
  misc_difference 16116: note = a, c, g, or t
  misc_difference 16117: note = a, c, g, or t
  misc_difference 16118: note = a, c, g, or t
  misc_difference 16119: note = a, c, g, or t
  misc_difference 16120: note = a, c, g, or t
  misc_difference 16121: note = a, c, g, or t
  misc_difference 16122: note = a, c, g, or t
  misc_difference 16123: note = a, c, g, or t
  misc_difference 16124: note = a, c, g, or t
  misc_difference 16125: note = a, c, g, or t
  misc_difference 16126: note = a, c, g, or t
  misc_difference 16127: note = a, c, g, or t
  misc_difference 16128: note = a, c, g, or t
  misc_difference 16129: note = a, c, g, or t
  misc_difference 16130: note = a, c, g, or t
  misc_difference 16131: note = a, c, g, or t
  misc_difference 16132: note = a, c, g, or t
  misc_difference 16133: note = a, c, g, or t
  misc_difference 16134: note = a, c, g, or t
  misc_difference 16135: note = a, c, g, or t
  misc_difference 16136: note = a, c, g, or t
  misc_difference 16137: note = a, c, g, or t
  misc_difference 16138: note = a, c, g, or t
  misc_difference 16139: note = a, c, g, or t
  misc_difference 16140: note = a, c, g, or t
  misc_difference 16141: note = a, c, g, or t
  misc_difference 16142: note = a, c, g, or t
  misc_difference 16143: note = a, c, g, or t
  misc_difference 16144: note = a, c, g, or t
  misc_difference 16145: note = a, c, g, or t
  misc_difference 16146: note = a, c, g, or t
  misc_difference 16147: note = a, c, g, or t
  misc_difference 16148: note = a, c, g, or t
  misc_difference 16149: note = a, c, g, or t
  misc_difference 16150: note = a, c, g, or t
  misc_difference 16151: note = a, c, g, or t
  misc_difference 16152: note = a, c, g, or t
  misc_difference 16153: note = a, c, g, or t
  misc_difference 16154: note = a, c, g, or t
  misc_difference 16155: note = a, c, g, or t
  misc_difference 16156: note = a, c, g, or t
  misc_difference 16157: note = a, c, g, or t
  misc_difference 16158: note = a, c, g, or t
  misc_difference 16159: note = a, c, g, or t
  misc_difference 16160: note = a, c, g, or t
  misc_difference 16161: note = a, c, g, or t
  misc_difference 16162: note = a, c, g, or t
  misc_difference 16163: note = a, c, g, or t
  misc_difference 16164: note = a, c, g, or t
  misc_difference 16165: note = a, c, g, or t
  misc_difference 16166: note = a, c, g, or t
  misc_difference 16167: note = a, c, g, or t
  misc_difference 16168: note = a, c, g, or t
  misc_difference 16169: note = a, c, g, or t
  misc_difference 16170: note = a, c, g, or t
  misc_difference 16171: note = a, c, g, or t
  misc_difference 16172: note = a, c, g, or t
  misc_difference 16173: note = a, c, g, or t
  misc_difference 16174: note = a, c, g, or t
  misc_difference 16175: note = a, c, g, or t
  misc_difference 16176: note = a, c, g, or t
  misc_difference 16177: note = a, c, g, or t
  misc_difference 16178: note = a, c, g, or t
  misc_difference 16179: note = a, c, g, or t
  misc_difference 16180: note = a, c, g, or t
  misc_difference 16181: note = a, c, g, or t
  misc_difference 16182: note = a, c, g, or t
  misc_difference 16183: note = a, c, g, or t
  misc_difference 16184: note = a, c, g, or t
  misc_difference 16185: note = a, c, g, or t
  misc_difference 16186: note = a, c, g, or t
  misc_difference 16187: note = a, c, g, or t
  misc_difference 16188: note = a, c, g, or t
  misc_difference 16189: note = a, c, g, or t
  misc_difference 16190: note = a, c, g, or t
  misc_difference 16191: note = a, c, g, or t
  misc_difference 16192: note = a, c, g, or t
  misc_difference 16193: note = a, c, g, or t
  misc_difference 16194: note = a, c, g, or t
  misc_difference 16195: note = a, c, g, or t
  misc_difference 16196: note = a, c, g, or t
  misc_difference 16197: note = a, c, g, or t
  misc_difference 16198: note = a, c, g, or t
  misc_difference 16199: note = a, c, g, or t
  misc_difference 16200: note = a, c, g, or t
  misc_difference 16201: note = a, c, g, or t
  misc_difference 16202: note = a, c, g, or t
  misc_difference 16203: note = a, c, g, or t
  misc_difference 16204: note = a, c, g, or t
gcctcattttcaggcagcagtgccttgggctctaccagtaccggtgcatatacggtgttgaatttgtgtacgatctctctggtctgttcgatcatgggcagctggtcaccacctacgggaacggtggtcgccttgaaagcggtaatatcggaagcctggctgatgggataggtaaaaaatcccacagggatgctggcttcgaagttacgcatctgaatctcactctttacggtcgggtttctctgtaatctggctacggttaccaaatccatgtaatagaaggtcagctcgcacaattcggagatctgagactgaatgaagatcgttgccttgctgggatccagtccgcaggacatgtagtccagcgccacttcaataatattctggcgcaccttctcgggattctcgatattatccgtcagcgcctgtgcgtctgcgatcatgataaaagtcttcttatattcgccggaattctgcagttctacacgtcttctcagggagcctacataatgtcccacatgtaatcttccggtgggtctgtcacctgtcaaaataattttgtccatttcgtcctctcaatccgccgtctacacggccatacatcattgtttctatcataccatctttttgcatagaagcaaatgatttttctacagaattaacgctttgtgtgcaagccccctcgcattcattctgctgttctatggctgaactattgcaagcagcttatccagaattttatgtgccacctgttccttgctcatcagttccagactctcctcggaattctttgtgatcagtgtcacaatattggtgtccgtgccaaagcccgctcctgcgctcttcaaactgttggcacagatcatgtcacagtgcttgctctccagcttcttccgggaattctccagcacattttccgtctccatggaaaatccacacaaaatctgtcccggtctcttgttttccccaagggccttcaaaatatccttcgtccgcaccagagggatcgacatgtctccgtcttttttcttaatcttattgtctgctgtcactgccggggtgtagtctgccacggctgctgccttgatgacaaaatcatagtcctgcgctctggacacgattgcatcgtacatctctgctgccgtctgtaccggcaccacatttacaaacaaaggcggctccacatccgtatgggctgccaccaccgtcacttctgcgccgcggtgcattgcagctctcgccagggcataacccatttttccactggagtgattcgtgataaaacgcaccgggtcaatgggttctctggtggcacctgcggagatcagcacctttttgcccgccagatccttctcgcaggcgatctccttcaccacggcttcgaacagtacggactcctccggcattctgccgtcaccgatatcgccgttggccagcattcccgtggccggagtgatgatctcatagccgaaatgctttaatttttcgatattatcctgcacgatggggttgtgatacatattatgattcatggcaggggacacaatcttcttgcagggacatgccatgaccgtagtggtcaacatatcatctgcgatgccgtttgcaatcttgccgatcacattggcagaagccggtgccaccagaaccacatccgcccgctttgccagtgccacatgttccacactgtactggaaattgcggtcaaaggtgtccaccagacatttatgtcccgtcagactttcaaaagtaatggggttgatgaactgcgtggcattctgtgtcatcagcacttccacatcacagtgctgttttaacagcatccgcgctacattggccattttatatgcagcaatacttcccgagattgccagaactacggtctttcccttcagcatagtcgtctccttttgcctgatttatcaaaaatacttcaaaactgtactcctaaaataccataagtgcatattttatgcaaatatcacttttctttttgtccgggatatgatataaacagtaggagtgtcccgaatcaccgggacaacttgtattgtatctcccagagggagaatggtaacaaggaggaaaatttcatatgaacaaacaaagtaagacaatgcgactcacgttgatgggattgtttgctgcggtacttttgctgatggcttataccccgctcgggtacctgaacatcggccccctggcaatcaccttcaatgtcatccccgttgcactggctgcaatcactcttggccctgtaggcggagccgccatgggagcagtattcggattgaccagctttttgcaatgcatcggcgtgggaggcaccagcgccatgggagcaatgctttttggcatcaaccctgtgttggccttcatccagcgtttcatccccagacttctggacggatttctgctgggatatgtcttccgttacagccgcaaagccgtaggagacagaatcgcctgcatgatcaccggattttgcagcgcatttttcaacaccgcatttttcatgtcccttttagtactgctgttcggcaatacttcctatgtgcagggactgatgggtggtaaaaacgcgattttattcatctgctcttttgtaggtgtgaatgcggtcttcgagatgtgtgcatccacgttcctgaccggagcggtagggctggcactgatcaaggcaaaagtcattcctgtatatcagaaagcaaggtctgcagcataacaggagtatacccgtggtactgacaatcgacatcggaaatactacgatcggcatcgggggatttcagggaaataagctgctctttattgagaagatatcgtcccgtcgtcccctgtctgatgccggatatattgaaaaactgaatatgatcttgaacaaacacggcctgtccgccgaggcctttgagggatctatgatttcctcggttgtgccttcggtgacagccgttttttcctctgctctggaaacttttctgggacggaaacctctgattctttcccataagctggatctgggctacgagatctgtacggaattcccggaaaaggtgggttgtgaccgactggcagatattgcaggagccatttcccgctattccctgcctttcgtcaccatcgacctgggcaccgccacgacttttaacgtgttggatgagaaccgtcgctttttaggtggcctgatccttcccggcgttggaaccgcccacagggcacttttaggcaagaccgcccagctcccgaaaggggacattcatatgcccgcccacaccatcggtgcgaatacgcaggaatgcatcaccgggggaatgctcttgggcaacgcctgtgccatcgacggactgatccgccgtatccagacagagttagggcaaaaagcaacggtcgttgccaccggagggtacgcaacgaccgtcattccacattgtgaaacgaagatccatatcgatcagaatcttcttatgaaaggtctgagatccatctacgagaataatacctctactggatcaccagattagagtagcccatcaggctctcatccacagcatgtgcggcttctctgccttcacggatcgcccacaccaccagggactgtcctctgtgcatatcaccggtgacgaatacattttccacactggtctggtattggccgggggcagtttttacgttggtgcgttcatttaattccaccccgaaagcatcggtaatatatttctgacttcccaaaaatcctgctgcgatcagtacgatctccgcatccaggatctgctcacttccggcgatctcctgcatcttcatgcgtccggtagccggatccttttcccaggacagcttcacgatcttcacggctttcaggctgccgttcttatccttgataaattccttaaccgtagattcatagattctcggatcatgtccgtagactgcaatggcttcttcctgaccgtaatcggtcttgcagaccttcggccattcgggccagggattgttctctgctctcttgtccggagccttgggcatcatctcgatctgggtcacagacttggcaccgtgacggatggaagttcccacgcagtcattaccggtatcaccgccgccgatgatgaccacattcttccccttggtctccacatattttttgtcttcaaaatttgaatccagaagactcctggtattggctttcagaaaatccaccgcaaaatagattcccttggcatctctgccgggagcattgatgtctctgggattagaggcaccgcatgccaggacgacacggtcaaaatcatgcaaaagcttggaggctttgatgtccttgccgatgtcggttccagtgacaaaggtgacaccctcttccttcataatattgatcttgcggtcaatgatctgcttttccagtttcatgttggggatgccgtacatcaacagtcctcccacacgatcggaacgctcgaatactgttacctgatgtcctctctggttcagcagatccgctgctgccagtccagaaggaccactgccgatgactgctacctttttgccggtgcgtaccacagggggcttggctgccgcataaccctcgctgtaggcgttttcaataattgcatattcgttctccttggtggagaccggatccccgttcaacccgcaggtacatgccgcttcacacaaggcagggcatactctggaagtgaactcggggaaattgttggtcttcttcaggcggttgtaagcctgctgccagttgccggtatataccaggtcgttccactccggcaccagattgtgcagggggcatccgctggccataccgcagatcatcatgcccgactggcagaacggcacgccgcattccatacatctggcaccctgtaagcgctgcttttccttcggcagatgctcatggaattcgttaaaatgctgtattctcttcttaggatcctcagccacgctgacttcccttttatattccataaatcccgttggttttcccatgactctctccattctgcagacgcttcggcgtcggaagaatcgcgaactaaatttcatatttagttctgcgataaactaatttgtggcgcccgcggcacaaattagtcgtgtgaaaagcaatctatcaagattacttttcacactggcctcctactttctggtgttggcatagaatgcttcgatctgtgcctgctctgcgctcagtcctttttcctccatctggacgatggtctttaagactctctcataatcatgagggatgatcttcttgaacttgggcagatactctccaaagttgtccagcacttccttacccttggcggaattggtcagtgccacatgctcctggatcatggatttcaactccagcacatcatatttggatgtgatctcgctggaggataccatttccttattcagacgcttgtacagatcgttgccttcatccagtacataagcgataccgccgctcataccggctgcaaagtttttaccggtgggtcctaagactaccacacgtccgccggtcatgtattcacaaccatgatcacctacaccttcgacaactgcgatggcacctgagttacgtacgcagaaacgttcgcctgccacaccgttaatgaatgctttaccggaggttgcaccgtacagtgccacattaccaatgatgatattttcctcagccttgaacttgctgccctgaggaggatataccaccagcttaccgccggataagcccttaccgaagtagtcattgctgtcgcctaccagttccagagtcaggcccttggggataaaggctccgaaggactgtccgccggcacccttgcacagtacatggtaggtatcctcttccacatcatcgcccaattttctggtgatctcacttccgaggatcgtaccgaaagcacgatcggtgttgctgacgtctacttcgatgctgcgcttctgtcctgcgtcgatggcttttcctaactgctttaacagcaccttctcatccagtgtcttctctaactggaagtcatagacctgcctgggatcaaaggtcaccttctgcttgctgccctcgtaaggattgcttaagatctgggtcagatccacttcctcctgacgatcggtcagatgctcttttctcttcagcagatcagttctgcccaccagttcatctacggtacgcacgcccagtgctgccatgtattcccgcagctcctgtgcgataaatttcataaagttttccacatattccggcttaccgcggaagtttttccgcagctccgggttctgggtagccacgcctaccgggcaggtatccagattacatactctcatcatgacacagcccatggtcacaaggggtgcggtggcaaaaccgaactcctcggcacctaaaatggctgcgatggctacgtctctgccgctcatcagcttaccgtcggtctcgatgcggactttattacgtaggccgttcatgatcagggtctgatgggtctctgccagtcccagttcccagggaagtccggcattgtggatggagtttctcggtgccgcaccggtaccgccgtcatagccggataccaggatgacctgggctcccgccttggctacaccggctgcgaccgttcccacaccggcttcggataccagttttacagagattcttgcctgggtgttggcatttttcagatcatagatcagctgcgccagatcctcaatggaataaatgtcgtgatgagggggcggagagatcagggacacaccgggcgtggagtgtctggtcttggcgatccagggatatacctttcctccgggcagatgtccgccctcaccgggttttgctccctgtgccatcttgatctgaatctcctgtgcgcttaccaggtaacggctggtaacaccaaaacgtccactggctacctgcttgattgcggaacaacggttcagtccgtccggtccgacggtcagacgatccaggtcctcaccgccttcaccggaattgctcttgccgtgcagatggttcatggcgatggccatggtctcatgggcttctttggaaatggaaccgtaggacatggcaccggtcttgaatctggtcacaatggactctaccagctctacttcctcaataggcacaccctttttcggataattgaagtccatcagtcctctgagattcttgatggaatcttcgttgtttaccatggcagtgtactgcttgaacatctggtaatcaccgcgtctggtggattcctgtaacatatggatggtagcgggattgtacagatgctcgtcaccgccgctgcgcatcttgtgatgtccggggctgtttaaggtcagatcgtttttcagtcccagaggatcaaatgcctgagagtgcaggtcgtctacctgctgctcaatatcttttaaggtaatacctcccacacgacatacggtgttggagaaatacttactgatcacttccggtgcaataccgatagcctcgaagatctgggaaccctgataggactggatggtgctgatacccatcttggatgcgatcttgacgatgccgtggaggacagcattgttgtaatcatccactgctgcatagtaatccttatccagcatattgctctcgatcagttccttgatggtatcctgtgccagataagggttgatggcgcaggcaccgtaacctaacagcgtagcaaaatggtgtacctctctgggttcgccggattccaggatcagtgcgactctggttctcttcttggtgcgtaccagatactggttcagggcggatacggccagcagggaaggaatgggcacatggttctcatccacgcctctgtcggacaggatcaggatgttcacgccgtctctgtaagctctgtccacttccacgaacagtctgtcaatggcacgctctaagctggtgttcttgtaatatacgataggtacgacttctactttgaatccgtctaccttcatgttcttgatcttcaacagatccgtgttggtcaaaatcgggttgttgaccttcagaacattacagttcttcggggtctcctccagaatgttgccctcggtaccgatgtatacggtggtggaagtcacgatctcctcacggatcgcatcgatgggcgggttggttacctgtgcaaacagctgcttgaaataatgaaacagcgggtggttcgtcttgcttaagacgggaagtggcgtatccacacccatggcggcaatcgcttcactgccgttctttgccataggcagaatgctctgtttcatctcatcgtaggtataaccgaaagctttctgcatccgctgacgctcttcgtaggtgtactcagggacacgctggttcgggatgtgaatactcttcaattctgtcaggttgttgtccagccattcaccgtagggctgtctggaagcatatttttccttgatctcctcatcgtcaatgactctgccctgtacggtatcgaccaagagcatcttgccgggacgaagtctttcctttaacttgatcttcgtgggatcaacaggaaggacacctacctcggaagacaggatcagggtatcatcgtcagtgatcagataacgggaaggacgcaggccgtttctgtccagtaccgcacccatgatatctccgtcggagaacaggatggatgcggggccgtcccagggctccatcatggtagcgtaatactggtagaaatctctcttggtctgggacatggccttgttgttcgcccagggctcggggatagcgatcatgaccgcaagaggcagttccatgccgctcattaccaggaattccagcgtgttgtccagcatagcggagtcggaaccggtcttgctgatggcaggcagtactttgtgcagctggcctttcagatgctcggattccatgttctcctccctggccagcatcttgtcggcattgccgcggatagtgttaatctcaccgttgtgtaccatcagacggttcggatgggcacgttcccagctgggattggtattggtggagaaacgggagtgtaccatggcaatggcggattcgtaatcttcactctgcaaatctgcgaagaaggtacgcagctggcctaccaggaacattcctttatatacgatcgttctgctggaaagagaaactacataggtatcatcggaagactgctcgaagacacgtcttgcaatataaagtctgcggtcaaagggaagtcctttttccacatcggcaggctttttcacgaatccctgcatgatatagggcatgcactctacggccttatgtcccagcacattggggaaggtaggcacttcacgccagccgaggaattccattccttctttttccacaatgatctcgaacatcttcttggcttgattgcggcgcagctcttcctgcgggaagaagaacatgccgacaccgtattctctctctccgccgatatccatgcccagagccctggtcactctggcaaaaaatttgtggggaatctgggtcagaataccgacaccgtcaccggtcttgccttccgcatccttaccggctctgtgctccagattctctacgatcttcagcgcattctctacggtcgcgcggctcttctctccgtgaatattgacacaggctccgataccgcagttatcatgctcaaattcttcccgatataacggtgccttgggcagctcctgttttacatcaaacatatagttctcctttccggttttctatttctctcttcttaatctgtctgttcctattcagaacctcattcgcaagactgtgctttcagcacttttctgcaactaaaaaaggtcgcaatgagactctttcgagcgcctcattgcgaccttttctgtactatacacctatttttctcatttgtaaatatagatttttccttgaattgtcagataatttgtcaattcagttgttcacacggctgttgtctgtgaattgtgttaatttccttttttaatccatgcttttagcacaactctttggggattttccctatttttcctgtctccgaccatatactttgcttgtcagtccctgatagattgcagagaaatgtctgctttctgccattgcggtccggagaggtgccagggtcagtgccatcacagcgcggtaacggaacagttctacgggtttcatgtattttgccgtgatctccttatgctctgcggcactgcgtttcaggttctcctttgtctcggagtagccgccgccttcgtaggaagatacggtaagccccagatactgcatgggagccttcgcccggtaatagcaccacagaaaatgttcataatctgcgcggatcttgtattttggttcgtagggcttctgtcggcacaggtctgcggcatagaagcaggactgatggcagggaatgttgcggtagcagacaaagccggtgattcggggcggggatgatatcttcgtgtccgttttcgcgctgtaggtatttccgtaatagatgccttgcagtttcatagggtgctgttccatgaattgtgcggtgtgtgccagaacttccttgtcatagaagaggtcaccgcagtttaagaacagaatgtaatctccggtcacatgagagaccgcctggttcatagcctcgtagatgctgtgatccggttcctggtagagatggatccgcccgtcagtgcgcatggactctatggatccgtcacggctgccaccgtccttgacgatgacttcgaagtctgggcaggtctgggccaggatactgtcaagggtctgattcagtttggtgccagggttcaggcatactacgataatgctgaatttcatatgttgctccttttaagatgtaatatctccgcagtcgagaacagggcaaggaacgcggcacgttcgcactctgtcgcagagcgtagcggcacataagtgaccaaagtacggtcactaagtgccgacgtctgcttacggcctgcttatccttaccctgttttcggctgctgggttatgaagtccagttcaatacagtttatgaatgcggtcagaactggtaactaatgtgttttgttatctcattaaaatatatttttctgtttgtgcaaagtgatcaaggatacaactgccactgccaggaaaatcacgcatacaggccagctgacgaagccggtgacggcgatggcggtataggagaggcagtaggcgaggacattggatgccacatggacaaagactgccattttgaactctccaaagtattcgtaagcatatgccatcaggcagccgatgaggaagccgtatacgccctggacgtaattcatgtgataaacgccgaaaatcagggcagacagggctatggcgagtttgatatccatgaatctgcggagatatccgtagataactccgcggaatagaagctcctctgctatgggggagatgacgccgaatacaaggattcctacgataaagtgtgcggaatattgctgggctgcaacttcggtataggcttcggatttgttggtcactcccaggagttcaaacaggaggttgcatccgataacggcaccaatagtggttgccaccagcagggcatattttgccttaccttctttttttagatggcttaaatgcatatcctctttgttcttcgtgatcagaagctttgccgtggaccataccgccagtgctccgccgatgaagcccagtgccgctatgatactggacacatctccggaatagccgttataggcgccggtctcatccctcaggatcagaagatctaccagtccaccggtggctccggactgtgccagctgatacaacagtgccagcagcgcatactgcaccgcattgcgcaccaggatgaacatcaggaacgaatacaccatggtccagattctctggtacattggatttttctttttattgtctggattgctgttcaccagttcctcgctgccgcgaagcagaaatttttccagttcttccacggattgtacgatgtagtccgcttttgcttcctttaactcttccttgcttccgtagccataagtcacaccgacgctctccacgccgagtgccttcgcaccttccacgtcaaatttccggtcgccgatcatatagacttcctcaggtgctacgggattctctccaaacagctgattcagtgtctcctgcaccacctgatccttcgtctcccgtctgccgtccagttcgcttccgacgaccacagcaaaatattttttcaggtcaaaatgttccagaattctctccacatacacctggggcttgctggatgccactgccagaaaatagccattagactgtagatttttcagcatctccgatatgccggcatacacttcattttcaaagatgccggtatcctgaaaccgctctctgtattttgctacggctttttctgcctgttcgggcgtaaaaccgtaaaattccataaaactgtcccgaagcggcggtccgatgaatggctccagcttgtccagatccggttcttcaatgccaaaagagtgcagtgcatactgcacacaggtcgtaattccgattttaggatctgtcagggttccgtccagatcaaacagcagatattttttcattcttataattcctttttttgtatctgttccaagccctgtaactatcgcaaaatattcattgaataccgagatccgcaagaatattctgtaattgttatgaggctctgaatagttaccctttctttctatagcttgtggggtccgcaaagcattagaagctgcggatcttgtccccgtcatcctcagtgtttttcagtgccttgatctctacgtcatagcccacattggcattgacctgcacatggaccatatcgcctacttttttaccaagcagtgccttgcccagaggagattcgttgctgatcaggccttccagggaattaccgcgaacggtggtcacgatcttgtaatcctcctgggtgccgtcgtcgatgaattccacggtaacagtgttgttgatgcccacctcatccacggcggagttctcggagatcacctttgcggtcttgatcattctctccagataacggatccggctctcgttctgattcttgtattttttcgctgcataatattcaaaattctcactgagatctccgtgggctctggcttccttcacgtcctccagtgccttgggacgcaccaccagcttacgatactcgatctcatcttccattttcctgatatcactgggtgttaattcatcgtacataatttctccattcctatctgttcaattacttatatcatttattgacagtttttctcccggctcggcacatgctgattttctaccaacagccgtccttctttttcttcggcgaccgaccttcttttccttcagcagacgcctttcttttcttctgacggccgacctttttccttccggcagccaaccttcttttcttgcagaggatgaccggtcgcagtctctatgctgtcccggtgtgtccagcattctacaactgcattgcgtagattaccgccagagacagaatgatctgaataatggcaaaacggaatacggtctgtgtattggaccagtcccacaccttacgcacatgatcatgcaagggagtacgcacatttttcaaaatatgaatcttcaggaagcggagcagggaaaccttaagcagtcccaaacctccgtccagaatcagcaccagagccaacggaataaacaaaaacggacagccgctctttaaaatagcgatgctgatgaacagtcccatggcccgggaacccgcatctcccatcatcagcttactgggtgttgcattgtaccacagataacccagaatgcatacggcaaacagcaggatcaggaaagaataggtctcattgacgtccttcatacggtccacgatatagatggacatgatcgtaatgatcgacagggttccggagagtccgtccacaccatcggagcaattggtcacgttcacggaggtccataccaggatcaccgtgaggattgcgaatactacgggaggcagcgtgaactttacatggaacagtgccagttccaccacgttggagttgtatttcaggaaggtgatggctaccagtgccgccacgcacagatccagaaacccttttttgtattcaccccagggagtcttggaggcgtcatccagaaaaccggtcatcatgcataccacgatcagcagcagatagatcaccagctctgcacttaagggtgcaaacagtaaaacagatgccacaaatgccagcacaaaaatgattccggcgcctcttggctttcccgcggacaattttccatcatgggcaaattctcttccggcgtccttcggcagatacgggcttaattttgccgtcgccagtactgtcgctccgaaagcaaaaaggattccaaaaaaagcaaggagagaactgcttccctccggcaagatcatctgtaacatactatccctcgtttccacatgagatactcacttttgtactctcatgctgtattttctgataaattccgtgactgttcacaggggcattcgagaaatgaacacctcagaacagtcacaaaatattttaacacaaatatcccggaatctcaaataatttccacaacagttcagttctgaacatatctgggcgcagaaatcatgcttgcatgattttgcgggcaaatatgttcaggagctaagcgccaatctatgagcaaaggtagagcgtgttaacgcgactcccgtgaacggcgcggctgaactgttacgtttgacagtttccccacggtggactactatattcttatgaacactttctgaaaaatagccataaaaggagaaatactctatgatgatccataagatcgaaccgcataaatattacccggaattccgaagccaggatcctaaaccttccgattatctgctgttatttgacggagaaaaggtctatctgccctcccatacagaaaacagtgatgtaacggatactcccgccggtgccggcatctctgagcatcctcaagtatatcttcctacttttgaagaagtccatggactcttgggaatccgtcagcctatggaacgtttttttctggactgtgaatatctcttttccattgatgaccgagcattcttccgcaagacgacggaggatgccggtgctctcatgctcccggaagaagacctctacgcttccggtgtgttccgtaattttgagccggaatatctggcatttgctggaatcactgccacccagatcaatcgtttccgtctggaccggaaattctgcggccgctgcggacatcccacaattcacagcaccacagagcgggcctgcatctgcccggagtgcggtcagatcgaatatcccaagatctctccagccgtcattatcgccatcgtggataccgaacaggacaagatcctgctgacccgctacgccggcggttcctatcgtcactgggcactggtggccggcttcgtggaagtcggtgagaccttcaagggtgctgcccgccgggaaatcatggaagaagtcggtttaaaggtcagcgatctggtctattacaaatcccagccctggtccttcagcgattccgccatgatcggcttcttcgcgaagctggagggggatccttctattactttgcaggaatccgaacttggtgaagcaaaatggttctccagagaggatgtcccggatctgccctccactatcagtgtcggtcaagaaatgatcacattattcaagaatggtggggatccgttctgccagagataattgatacatttgaaagtttttcacttctattccatgatataccttgaccttgtgcccccgtggtttcatgccccgggggcttatttagtttcttttcctctctgcgccccgctctctcgatctccccggggcttaatcagcttcttttcctttctgcgccccgctctctcgatttccccggggcttatttagtttcttttcctctctgcgccccgctctctcgatctccccggggcttatttagtttcttttcctctctgcgccccgctctctcgatttccccggggcttatttagtttcttttcctctctgcgccccgctctctcgatctccnnnnnnnnnnnnnnnnnnnnnnnnnnnnnnnnnnnnnnnnnnnnnnnnnnnnnnnnnnnnnnnnnnnnnnnnnnnnnnnnnnnnnnnnnnnnnnnnnnnngatctccccggggcttatttagtttcttttcctctctgcgccccgctctctcgatctccccggggcttaatcagcatgctccttatatctacgccccatgtacgcaaaaatctgccttcgacaatagcattgtcatgaggcagactcctttctgtacttattctcttcactgtttcttcacctagagcatcgtagctgtcatcgcttctcattatctcaataagcggcacttcttcgctaccttcactaacagatatcccttcgggaagctgcgaagctcctgctccgtgatgccccgcatcaatatcagcatgacaaaatagactacagcagcaattacgattgcaggaatgacagagatccgcatggacttcgtcaccatatacagaccctcgtagattgcccaggctgccgctcccataaacgcggaggcgaacgccggaatgacgaaagtctttacgatctcctgccggtagcctaccgctcttcttaccgcccactggttcagcacacacatcataccggaatacagcgtattggcgatggcaatgctgtacagatccagtcttgtgaacatcagaagcagcactgctgccaccgtctgcaccaccagcgagatccccgcattgatgatcggggtattgactttgcccagtccctgcaaaatagagctgttcaacgtagacagtgcataaaaaataaccgacagtgacaatgtcattaaaagagctgccgccagattcagttcctctgccgtcttatttgtgaacagcagactgatcaccggcttcgccagtacaaaaagtcccacagcgcagggaatcgagatcaccatggtagtcttcactgccagtccgatcttctctctggctcccttcacatcccgggctgccatcagctgtgctacggaagggatcatggcagaagccatagcagatgcaaaggctatgggaatattggacattgtcagggactgtccggagaaaataccatatttttcataaatagataccgtatccagattgcgaagggacggataccatttggtgtagatactgttgttgaccgtactgcttaagttatatacagctgtactcaaaataaacggcgtcaccaccagtgtgatcgtcttgaatatctgtccgtaggaatccacatgttcatgcctgtcacgctgcactctgcgcaggatcattccacgattcagagcatagactcccgccataaaaagcagcgccactaatacgccgacaccggtacccagtgcacttcccactgcaccgtaggttgccctcatcacctgccctgcctgatccgccggaacctccatcgttcccataaacatttggatcagaaggtatgccgcgcctacgctgactaccgcattggcgatctgctccaggatctgcgatacggaggtctgcgccatgctcttatgtgcctgaaaataccctcgtaaaactcccaggataccatagacgaagatcgtcggtgcaaaggtgcgcagtactgtgaccgctgctccggacacgaataatcccgctccgaaaaacagaaaaaggctggctataccgccaaccaccagtacatagatcatggctccgtggaacagtctgtgggcgttacggtattccttctctcccagcttctgtgcgatagctttggaaattgccgagggaatactataagaggagatcaacagaatgatcgtataatagttatacgctgactggtaataaccaagtcccagattcccgatgacactctgtaaagggcccctgtaaaggagccctatgattctgctgatgattccggctgccgccagaattcccgcctgcatgataaaattgttcttggaactgttcttatctgccatatgtaatcttaccttattccagttctttatccgatcagccagtcatacatctcctggtattttccggcggataccttccaggagtagtcggtggccatggcacgatccacgatcttattccactctctcttcctgtcatagtaaatatgctccgcatagcggatcgtattcagcatctcatgtgcattgtaattcgtaaaactgaagcccgtgccggtgctctcatactcattatagggctgtacggtatccttcagtccgccggtctctctgacgatgggtacggtaccgtaacgcagcgcgatcaactgactcaggccgcagggctcgaacaaagacggcatcagataagcatcacaagccgcatagattttatgggacagtgcatccgaataataaatgttggcagacaccttgtctccatacttccagtcgaaatgacggaacatattctcataacgttcctcaccggtgcccagtaccacgaactggatatcatcctggcacagttcatccatgacataagcgatcagatccagacccttctggtctgtcaatctggataccagaccgatcatcattttcttatcatctacgcgaagtccaagctcttcctgcagggctcgcttattcttcaccttttccttgcggaaattcactgcattataggcttttacgatatttttgtccgtctccggattgaactctccatagtcgatgccgttgacaataccgcgcagatcatgacttctcgcacgcagcaatccgtccaggccctcaccgtaaaacggagtcttgatctcctccgcataggtatcacttacggtggtcactgcatccgcgaatacgataccgccctttaacagatttgcatccttataagcctccagcttgtcagaggtaaaataatactccggcaatccggtaatgctctgtaccgtcttcacatcccattttccctggaacttcagattatgtatggtaatcacagacttcatgttgcggtagaaatctccgccatggaaacgctccttcaggtataccgggatcagaccggtctgccagtcatggcaatggatcagatccggctggaaattcaaaagcggtaatgccgacagcactgccttgcagaaatatgcatacttctcgatctcatatctgggatcatccccataaggcttgaaaccaccgaaataactctcattatcaatgaaataataatgcaccccggcttcctctgcctccagaacacctacatacacattctgccagttgaaatccatgtagaaatgtgtcacatacctgagcttatccttcatctcctgcttcatacaggtatacttcgggataaacactcttacatcaaaatactccttgtcaatatacttcggcaaagatcctacgacatccgcaagtcctccggtcttgataaaaggtacgccttccgatgcggcaaaaagaatttttttcatgtaaaccctccacatatgctacggcttgtattcaaaatatagattgattataccatgtttacgattcatagaaaagagggcagcgataatttacaaatcttttagagtctgcggttttgcctcagtttctgtaagaaagtcgaatcctgtcagcgatcagcgcgataaattccgaattggtaggtttgcctttgcccgtgtcgatcgtgtaaccgaacatggcatccagggtctccatgcgccctctgctccaggcaacctcaatggcatggcggatagcgcgctccacgcggctgggtgtggtctggaaccgcttggcgatggtcggatacaggatctttgtgatagaactgatcattgccggatcctctaccgacatcatgatagcttcccgcagatactgataccctttgatatgtgccggcactccgatctcatggatcatatccgtgacatccttttccaggtcatggatgacttcctgggtctgttcctttttttctgtcgcttttactgtgctgtctttggcgtttttcgtagaaggaaccgtgatcataatttggaattccttgttggcattcatcagatcccccaggattttgtatactttttcattatcctttgtagttgtaatgtttaatttttccattaaactacctccatgactacaaaactacttttttcacgtaccgttctattataaatagatatgcactgtagcttcaagcagaacccgtcgcaagatttttccaaatttcgcagtatattcaacaacaataaataagggcaggaattttgatactccctaccctcatttatcactgtttttgtttgtccaaaaagtaagatacatttgtgctaccgattcaagcaacacaaacaatatatgtaaaataataaagatacaaacagctgtaatgtattttaatgttacaattggtaaaagattctgcataagtgaaatcgctataagtcctactaaatatataatctcaacgattacattgtaagctatattagaaagcaaaatctgaaataaagataattgctttccattaaccggcttatactgatttttgtttgattctgctttttttaagcattgtatattcgcgttgtccgcagatactaaaattgtaatgatcgctacggaaaaagaaattaaaatagctactatgtttatctgtgtatctataaattcagaaaaagtcaacaaaactttttctgaagtgccaatattaaaaaatatcgccagcaataatgcgaccaaagcaatcagcattggaaagaggaacttaataaaaacccatttccttgaaataaagtaatcttttaagggaacaaaaactatatttttcatgtcttattcctcgtttcttctataaattcttgcgctttgtcaaagaaatccgagctgtttacctcattggttacagcttcagctacgactgataaataatgtttcattttcataagatcggtatcaatctcaaattggcctgaagcatttgtcccttttacagaaatcttttttattctattattactttgcaaatcatcataatatgcccgaattagattgtctggaaactttttagctcctttaggacgcttaagccaaatttcaacttcatcgtcaatatcattgcgatctgcaaatcgcataaaatcgtctttgatatcttccttgctgacagtcaatttcagagccgaagttgttcgtgcattttttaatgacgataagaaatcatctcccggcataatctcatgtgataaagtatagtggtacttgtcatcggtatcttcattgtaatttacaaattgcgtattaaggtaatcaataatacaatttatagatataccataatgattgctttcatgtactgcaaggaaacgacattgtccgttggcaaggcgaatgcacaaatgcgtcttttcttcatccccatcctgctgacgcttacgagcacctaattcagtcattgtttcggtatcaatctcatttcgaacgtgattgtactttgcagatttaaaaataatattgtaatttccgttgtttaaatcttcgaatgaataaagccatacaatcttttccgaacttgtaatgtctttcttcctctcggtcaaatcttttgcagtaatgtatggtaataattttgaaaatgaacccactatttgctgcatatcgtaggtggaagaatcattactgtccttttgttttgaaattgtaagataataaaagtaaatcggaacattcttcttgggttcttgactactcattttttatctttcctccccttataatacatcggataacagcttccaactgtcacttttaatattgtcagaataagtatctgtacaaatgcaaagttcgctgctctgtttatcctgccgaacaataccaccaagcaagttatatttattgatataagcctttaatactccaaatttttttgcagtatacttatcaatgtcttcgctatcgccgcacttagtaaatccgcctttcgtttcaattatccaaaccttaccatcagttgtttcaacaatatagtctggatagaacgatttttgctttccaaagttatccgtataaacgatagaaaaatattcaatgcctttatctccattcttgtaaaaccactgaatatttttactgctctcgcaatagcgttcaaaaagcttttctggtaaggagcgtttttcagcggaagaaagatatcccttatatacattcttcgtaaactctgcttgtgactttgcagttccgtcataggtgaatatcatttctaacggaaagcctataggtttttccgttgtttttggaattgctaaacttaattgcaaggattcgtctgacatagcttcactaacatcttcaatcaacgaacgctcattattgattataaaagcgtatagttctcttatttcaattttcaaaattttgtaatcacaacgcaatccattaaggaataatttacgcatgatagtattcgtgctgttgtaatccaagtttactttatagcctatctctgcgacacaatgatgatattccttaccgtgtttatgtgtgctcagtggttcatgtattgaaatatcattcaattcggctatattttcttttgatagagtacttaccgaacctgactttgtatagtcgatgatatccttgtcaaaggaatagccgtgtgcttccagcaagattttgttcttagccgtatcttctgtgatatgatatttcttttcaaaatacttatgtattactctaagcgataactttgcatcacgaggatacggaacatcggttttatattcgctgataagtgtaaaagagcggtgtgccggctttaaaaaaactttgtatgcatcaagtgcccctttgcccaagcttaattttacactttctgtgaatttttcgtccaaagtatataaatagcaattgtcaagcaaatcactcttatagtgtttggcttcaggcatacgacgaatccgcccaatagtctgaatttcaaaaacctcgctcatattatcacgaagctttaccagtatttgcgctcttggacaatcccagccggtagctacagcctgcttgatgatgactgcgataggttctgcgttcaattcttcgatatcttcgagattttgtttcttgttagaaagccatactgcaagagtattgttttcataggtgattcctttactttcaaagtattcttctactctgtcaagtaaaatgtccgatttatttggaatttggacaattataagaggattaattttcgcctttcgattcagatattccgaacgaagttcccgttgtttatcaatcgctttatcaagtagatatgtaatctgatcatcgatgctgatgtgctgctcaaaattttcgttgatgataagtagtttttttattagctcttccgctataacatcttcttcgggaatatcaatcataatagcatttttataatttttaggcgtagcagaacaacggattattttatctgaatggaaaagctcgataatatcatccgcctttatcgtatcattttgatgagattcatcaacgatgattttaaaattcaaaccattattaagagcattgcgtatatgctcaataaaattagtacgttcgctgtcttttagggcattattgcctttctttgttagcttttcccagttaataaaacaagcgtcgttttcttcgaaaccatcagtcataatgtctgacagcaattttgtctgacttccgtggatatactgatccattttttctttgctttgttcctcaaggtttcccttgccaggagtaagccaaataaataccgtcttatgattacttttgaaatattcgtccataaaatgagtaagtataatggtttttccgcttcctgtgcagcttttaagaattatatctctatttggttgttccattgctgcagttaaatcagcaatcgcttttatctgaaaatttgcaagggtaatatccattttagccctccaattctttataatagtagtcaggaataatatttaccgtaatcttcctatctttcaaagtttgtgcctgctgtgcatccatcagtatgtcgtaccctaagtataacttctgacattttgtactattttcaagttgagaaataaaattgtcaagttcttcttcagtcagtacgatagcaatttcagtatttcctgtaaagttaattacattttctaattccaccaattcacgaatatgctttaaaagctcatctgcatattcataatacaagcgatccgaaatcggaacataatcaattttataatatttaagacttgcggcgtatccctctttgtcaatcacacgtttaatgcgttcataagtgacatctcgacagatattattctcgttattcgtgcagaggataaatttgcggttgccaccatcctctgcatttagtttcatgacggcgtgtcccgttgtgccgctgccagcaaaaaaatctaaaatacagctatttttataagaagcaatttgcgcaattctataaatcaattcaacaggtttcggaaacgaaaaaatattttctccaaaaatatttctcatggttatagtcgcttttttgtttccctcaatatcaatccaaaggttgcccacctgctttgttcttccatctaagtagaatttttgataaactttccagcctgttttatcttgtttccattcaattcgatgatcatctattaactgcttataagttttttcttgacagcgccacctactttcatatccgagtggcgcaataggataaatttgagttccatctggtgcggttacaggatagtacatactcggtctatcctcgcgtctatcttcgccacctgttttacgaagtggacgcactagatatttcccatactcatcttctaaattataaatttttgcatcttcagaattaaatggcaatccattaaatatcgcttgttctgttttcgcgtataccaaaatataatcaatctcgtttgatagaatagcattaccctgtcccgtaggtgttcctgttccgcgtacaatttgtcctctaaaattgtcattgccaaatatttcatcgcaaagcaattttaactgtgctacttcgttatcgtcaatgcttataaaaataatacctttccggcttaacaatcttcttgcaataagtagacgttttttcataaacgaaagccatttactgtgcttaaaagaatctaacgaatcaacaaaaatatctgaataaataaaatctttgttcccagtattgtacggtggatctatgtagataaggtcgattttgtccttatgtgttttttctaacagcttcaatgaagcaagattatcgccctcaataagaaaattcatctggccgtcgttgttgatgaaaaggtctttgttctcggtcagcacaggggtatatgtatccaaaatatcgtcgatttcttctcggtgttcttcaaaaacaagaccatattttttaccgttcacatctctttcaagattgcaaaggtaggacagaagattacctgtattttcatcctgcggagcagcggaaataaaatttcgaatttctttgattttattcaataagtcctctcgcttttgttttgatatattcgtactcatctctgctcctccgtatttttctttatcagctttgcctgcaaaatatttctctgcatagctaactctctaacaatttgatcgtttgttgactgactgaaaggagtcgaagatacggaaagatttacaaccgttgctgttgctatatccttatcgccttttcttaattcctgaatttttctaattgcatcatctctatccaaaaaaccacatttttgataattgcaaataataatatctctttcatgtatttctttaatcaaggatgctttatcaaattcgtctataatttgattattcataatacgattccccctattacatccacttgccattagcggcataccatttttcagtaaattctttgtccatgaccgctgctataaacggttttatcagaaatacttttattgttttcaacacagtactgtaatcatccgttttcgtgtcgattttacggacaaacgctttccattttttctgcattgccatatcttcatcgaaactcataacttgttcaaattgtactaccgtaaaattgtgctcacggttctgaaaggttctgctgagtgcttcggtcagtacattaccgtcaaaatcgaacttattagcaagataataaatatcgtaataatctttcatacgactggaaaattccatcaggctaaggattgcatcaattttctcagcaacagtcgtttcaatggaatacgtattaactgtgggtgcagtaaaatcaccaagctgagtgggtatttttcgcctttcctgcttcggcacaatgacatcaccaacaccgaaatcaatgccaaagggggttcgagtattttttatatgtgcaaccattgatgctccgatgcctgcatacttcttctggacggcgataggcgcaacatcctttatctcaaaagtcacgaaatcattgccggtatgaacaacgataatttcttcgagaatactctttaactgttccggcgtattggggattttccgaagcaaaaaatccacatcaactgtcactcggctatcaaagtcagtaatagaatagaggaacaatccgcctttcaacacaaagttctcagcatactcggaattttccaaacggcgcaaaaattcctcttggcaaaagagttgcaagcatagctgatagcttctaccgctttcagcagctttatttttgagccgtgccaacacagatgcagctatatcagccatttagcagtacctccattacattcataaccttagtgtatagtttcatttcttttgcatacttagacaaacttgcaaggttctttttttcatcaacagcataagcattgaccgccttattaaaaatctcgttgtcaagttttgtacggtatttaaaacaatcgcatattgttcgttcacgatcatacacaggcagtattacgccgttaaaattgcttacggacttacctatatctaaaaattccttttgaatatagtaagctttcataggaaattcttcaatgctctttacaacacgggttgccgtccttggtacggcaatcgaccattcacgaggagaaaaatcactgtatccataatgaaacaaagcggactccccacaaataattccctgtggaagaaactctcgtatgagctgttcttctgtaatacttttactttgtgggagttgataaaatcctctgcgaattctttcaataattccttctttacaaaacgccgctacttcgtatttatttatcccgttagcggcaaaatctgaagtttttgctatgccgccgttattttcaattactttttttaaaatttcttttttactcaagcaggcaccaactttcttcacacaagtaataaataatgtatgcaattattataccatatggtttcgtaaatcacaacaactatacgcgtatattatttaaaatttgtacgtcgaaagttatttcagaaaaactcaggataaaacaaaataaggcgcccggaatgacccggacgccaataagagggaaaatgtataagtagaaaaactacgagtaaagcaaatttaattaatgatgctctgccagggtgtgaagagcttctttgatgccttccttcactgtatcatcctgctcggcattcagtctgtgcagcagataagtcttggcatattcggtgccgatgctgcccagtgccttagctgcttcgatacgaatctttgcatccggattgtcgatcatgtgggcaatgctgttgacactgtcctcatccttaatctgacttaatgcttccagtgcagctaccaccacggtgtcatcggaagaactcagatatttgatgatcttgtcggattttcctttctcttgtaatttttggatcttacttaaatcatgttgttccataaacatgcgcctctttctttctgccagcgtgggggcggtaaaatcgtctccggatcatcactatatgtcgcctgtggtgattggcttttcttgataatattatgataacaccttatttgtcagaaaacaattatagcaaaataaaggatttctaaaaattctataacctgctactcttttgctcaaataaatcacatctgtattctaatgcccggtagtccaatgccgatttcacatagcccgcagccatatcattcattgctttctgcttagctccttgcattcactttgttggaatatacatttgggaaatcctctcgaagccattccacatattcatccgaaatactgtacaatttgaattcttccattatacttcctttcttcggtataaaacaaaaagagagcaaatattttactatctgctctctcagaatttaagattctccacttatatggcaggagctctcccgagtttaaaatcttccacttatatggcaggaactctcccaataatcaattccttatctgttaatcattatatgctttcttaatgaaaaaagcaatgagtattttagcagcacttgtcccatcacgttttttatactatactgatatcatcaaatcgaaagaaggtactctcatgacaaaacaggaaatcagcgagatcaaaaagctgttcaccccgaaaaactgctccatcacacgaatctgcggatgctatgtggatggagagaaaaataaaaagacggaattaaagcaggcctttctggcactgccggaggaagagatgttcaagtacttcgagattctgcggaagagtctgtccggcaccatcggcaaaaatctgctgaatctggaatttccgttaaagagcgaaacagaaggtggcacgcaggaatttctgctacgtctgcgagacagccgtctgaaagacgatgccctgttagagcagttctatgaccgcatcatcgaatcctatgaatatgtaggaaattatctgatcctgctgatccatgacgcctacgatgtaccgggtcgtaccagagacggcatcgaaatggaggacgcttccgacgaagtctatgactacatcctcacctgcatctgccccgtggatctgtccaagccgggattgagctataacgctgtggaaaataccttccagaaccgtatccgcgactgggtggtaggtatgccggatgcagccttcctgttccccgcattcaatgaccgcagcacggacctgcacagcactctgtattattccaaggatgcggaagaattaaaggagaacttcgtagacctgatgctcggttgtccgcttcctctgtccgccggtggtcagaaggagaccttccagacactggtagaagagacactgggcaatacctgcgatatcgaaacgttgaagaacattcacgagaaaatgaatgagattgcccaggaacataaggaagatcccgaacccgtggtcctggataaaaatgaa

SEQ ID NO: 949 - DNA, 30510 bp, unidentified
  source 1..30510: mol_type = unassigned DNA
tatttgccatcagaaaatgctccggcaccgccaaagccattcataatggcacaggttgggcatttgatacaggatttgatattctttccgtcaattggacattttctcttctctaaagtattaccttcctcaaatacggcaacctttagatcaggagctttcttcataagctcataagcagagaatattccgcccggaccagcacctataattattacatcatatttcattaaatattcaccccacaatcgttaatcgtcctaagtattatattataaaagcaggattattaacaagcaaaacaattaagatatgaatattaatcttgaaagtgttgtaaatacaacatattaatgcggaatgaagatgttacaatccagacatactaataatccacatacagataagtgtaattgtggtcttacaagatatacaggtaagagtgactgtaagcttacaagataataaagcagattataatatgatgcacatataagcataacagccagcttatatataaagctgataaattaccagcagatagattgaaaaatataataaaaataatggaggaattatatgaacaggacagaacagattaaaggctatcttaaaagacttggtgatggtgaaagtcttgagaatgttaagaaagattttgttaaggaattcaatgatgtcaatccaatagagattatggaagcggagcaggcgttgatagcagagggaacacctatatcagaggtttcaaagctgtgtgatgttcactcagcattatttcacggtgcgactaaggaagaaagaatagccaaggcggaaaatgaaatatcagagatgaaaaagtactatgatgacacaatgaaaggtatgactaagagtgccattgcagatatgcgtaaagacagagaaagcatttttaataaactggctatgataagcggccacccattaaatacttttgtgaaagaaaataaggcaatccagcaggttattgatgatattaaagaaaatattacaagcggacatattgatataaaggcactgaaagagaagatatataagctcagggagttatctattcattatgccaagaaaggggatttgttatatccggtgcttaatgtacgatataaaatcagcggaccttcggcggttatgtggacagttgatgatgagataagagatgagctgtcagacatagcaaagcagttaaattacatggacggtaataacagtagcaaagcagacaataataacagtgcggataacaataatggtaaaagtctggacggtaaattaattgaaagaatagaaaatgttataaagagggcagaggagatgatatataaggaagataatatattgtatcctaactgtgccgctaattttacggaagctgagtggattggaatatatcacgattccaaagattatgccgtgtgccttgatacagtatcagacagatgggagaaagcagaagaagtagaaaatgtgtataaacctgaagtgtcagaacaatctgataagaaagaagatgttcagaatgagttatatatggcaggcggacatatgacactttcgcagcttgaggcactgcttaatgcaataccaatggagataacatttgttgatgaagataatatcaacagatattttaatgaagggtcaaaggtatttaaaagacctgttatggcaattgacagggaggtattctcgtgccacccaccaaagattgaggcaaaggtcagaagaattatagaagaattcaggataggaacacttgatgaagtatctgtctggatggataaacaaggaaggactatgcttgttaaatatattgcggtaagggacaagcagggaaattatgttggaactcttgaggcggttcaggatatggaatttgctaaagaacattttgcaaagcttaaataaacgtgtatacaaggtttctctttaaatatagccgataaggacattgacatttctttcacataaaaatataatataatattgtctgaatggaattgattcagcattaagtatattgatatggtagaattatgaagaataacaataatgaactcattgattatatgattaatgattttaaaagtggaattaagcacggagtgcttgttgccaatctgacatatgagcttgcacagatgtgtggtttgtctaaagatgaggcatacgaattaaagattgctgcgatggttcacgatgttggaaagttaaagctttcagaatatctgtatggaagaaccgatgaggcacttccggaagatgagaagcagtatatgagtatgcactcaaagataagccatgatctattgaaaaaatacgattattcagataatataatggatgtcgttctttcacatcatgaatgttttgatggaagcggatatcctaatgggcttgttggtgagcagataccattaggagcaagaatattaaaggttgcagatgaatttgcggcacttatatcagacagaccatataggaaagcatttgatatagacactgctgttacaattatgatagatgagattaagaatatggatatcagagtattccttttattccagaggcttattcacgaagattcgactatagaattgattaataatagcagattagatattgatgatttggatataagtgatatactaaaaatcagtcaggattaggagtaacctaattatgccttagggcaaataaaacaggctgttaatacagctaagaagaatgaggtaattaactatggcagagtcaatggttggcttaaagagaacacacagatgcacagaagtttcaagtgcagatattggcagtacagttacagttatgggctgggttgctaaaagacgtaatcttggttcacttatatttgtggatttaagagacagaagcggtcttttacagattctttttgatgagaatattatcggcaaagaaggatttgacaaggcatatacattaagaaatgaattcgtaatagctgtagtaggtaaggttattaagagaagtggagcagttaatgacaatcttaagaccggtgatattgagattgcggctgaatcattaagaatactttctgagtcagagacacctccatttccaattgaggataatattaatactaaagaagatataagacttaaatatagatgccttgatcttagacgtcctgatattcagtctaatatcattatgagaagcaaggttgccactcttacaagagcatttcttgctaatgaaggtttccttgaaatagagacacctatgcttactaagtcaactccggaaggagcaagagattatcttgtgccaagcagggttcatccaggaaaattctatgcacttccacagtcaccacagctctttaagcagatgcttatgtgctctggatatgacagatatatgcagattgcaagatgtttcagagatgaagatttaagagctgacagacagccggaattcactcagatagatatggaattgtcatttgttgacgttgatgatgtaattgatgttaatgaaagacttttagcatatcttttcaaagaggtattagatattgatgtacagcttccaatccagcgtatgacatggcaggaagctatggatagatttggttctgataagccagatttaagatttggtatggaacttaagaatgttacagacatagtaaagaactgtggtttcggcgtatttacaggggctatcgagaatggtggaactgtaagaggtattaatgccaatggacagggaagtatgcctcgtaagaagattgatgcacttgtcgactttgcaaagggatatggtgcaaagggtcttgcttatatagctattcacgaagatggttcacttaagtcttcattctctaagtttatgactgaggatgagatgaacgcacttgttgaggctatggaaggtaagccgggtgaccttcttttatttgctgctgaccgcaataagattgtatggaatgtacttggagcattaagagttgaacttgctggacagatgggacttcttgataagaatgattataagttcctctgggtaacagaattcccacagtttgagtggtcagatgaagaagagagattcgtagctatgcatcatccatttactatgcctatggatgaggatcttgataagcttgagtcagacccaggttcagtacgtgccaaggcttatgatattgtacttaacggtacagagataggtggtggttcagtaagaatccatcaggctgatgtacagtcaagaatgtttaaggcacttggtcttacagatgaagttgctaatgagaagtttggtttcttacttgatgcgttcaagtacggagtaccaccacacgctggtcttgcatatggtcttgacagacttgttatgcttatggctaagagagattcaataagagatgttattgcatttcctaaggtaaaggatgcttcctgccttcttactaatgcaccagatgtagtagatgcaaaacagcttgaagacttatctatcagaattacagagtcagaacaggaataatattttaagagcatttgaaagtatttaatggatattttcaaatgctttttttaactatatttttagacaatactttgtgaaatctggatgaaaataatggctttatcagcttttttttagcaaaaatattgcatttgaataatcgtgggtatatactttttttataaatctttgcaaaactataacaaaagactggagaaaaattatgacagagaatcagtatataagggcaaacaggactgttttatttacagttctcatagtatttggttatattgcgctgaccctgatggcagcattaggagtgggtgacggacataacaaaggaaagattttaatacagtttgttgtggcacttgctgtaattattgtatcagtagctgcttatattttaaggaagaagaccagagtgtgtgaattaacgattgcggtatcaatggcatttggatatgttgttcttatactgcttaattcaactgatggtgtatggacatatgtacttcctttgattatggcttcgatggtatatcttaatgaaaaactaatattgtgggctgatggcgttgcgatagctggtaatgtcataagacttattatggattataatatgtataatggagtggctatggcaagcagggttcttgctatattagtattggttattgttacatgtatatctcttagtgtaacaaagctgcttaagcagttttttgcagagaatatgaataagatagaggcagcagcagttatacagaaagagaataacgagaagatggttgctgtagctgataatataaccagacatttcggacaggctatggatatgcttgatgagttagaaaagagcatagatataaaccacaattcaatgaaagatatagcagaaagcacagaaagcacagcagaagctatacaaagacaggccactatgtgtgcagagattcaagaaaacactgatattgctgaaaaagagataagcgagatggttgaggcctcacacagaacagatgagactgttaatgatagtaaggctatagtagttgaacttaaggaacaggcacagaatgtacatgatgcaagcaatataatcgtagatgtgattaacagtcttacagaaaaggttgatgatgtacagggatttattggttctatcgtagagatttcaagccagactaaccttcttgcattaaatgcttcaatagaagcagcaagagcaggagaagccggaaagggtttcgcagtagtagccgaagagataagacagctctcagaacagactaagaatgcatcttcaagcataacagatataatcaataatctttatgaagatacgaagaaagctaatgagagcataaaagcgtcagttgagtcagttaataagcagaatgaacttattgataatacaagagtgacttttgaggacgtaggaaaaacagttgataatcttatgaacaatatacattctgcagagcagagcattaacaagatactggattcaacttctgttatttctgataatatttcacatttatcagcaacaggagaagaggtagcagctgcttcaactgaaggcctaaaagtatctgacacaacagttgaaagtatgaagaactgtaagaatatattacataacatatatcttcttgcagaggatttaaagagttcagtagataactaaatggattgtaagagattaagcagattacaatgtattgcaagactagcagttgattattataagttgtaattaataatataatcaggatggttttgcagggttattaatatttataagacaacagtatgtttattataaggagtgcaaatgacattttatgtctgcattatttataaaagacagctgttgtttttttatgtaatagggaatttcgatagaatttcctatacataaaaggtgctatgtgccgatgatgcacacttgcacgaagatgtaggttgtcgcaagcgacagtgcttagtgtgagaaggtgcttcatatattttatttatataggaatattttatgcttgacttgaagttaactctaaatgctattatcaaaatgtagagttaataatcaggtttaattaataattatatgaggtgattaattatgagaagaaataatattagaaaaacagaggcacttataatggcatttgcattatcagcaagcctgttgttaacaagttgtggcaaccaaaatactaatggtgacagtgttaatgaaaataatagtacaacagacgaagctggaattaatcacgattatccggtaatgttgttctcttatgataagaatgatactaattatgaagaaccagaagcgtttaattcagaacatcttggcggcaattatggtgagattgagaagatagaatattattctccaactactaatgctacaagaaatgccaatgtgtatcttccatatggatatgataagagtaaaagctatcctgtagtatatcttcttcacggaatgagtggaacatatgaagattacagggttcttggtgcaagaccaacagcacagaatattgtgtatgaatacaaccgcaacgatatgatattagtaagctttactgtatttacagatgttgacagaaagcaggaatctgattatggattttcggatttaactgcaagatatgatgcctgtgaaaatgatgtgattaatgctcttattccatatattaattcgcattattcaactaagataggcagggaatacacaggaattgcgggatattcattaggtggacgggaagctctttatttatgctttgcacaccctgatatatttgggtatgtaggtgcatttgagcctgttggaggagttgttaatacaggaagcggtgaaacattatatggcaacaggggatatcttcttcctgagcttgttaaggaaggcggggaagcaccacttcttacacttatagtaacaggtgatgaagatccatattgcagggtatcatcagagaattattcaagatatatgacagaacattcaattgaccatatattctattacagacacggcggacacgaggcaggtgtatggaataatggcttatataactttctaaggcggatattctaatgaagattgtattaaataacttaattattgtacaaatgtataattatacattgacttattgataaataatctataaaattaatagtcaaacaggttgtataactacaactatagaaaatggaggttgtaatatgtattcatttgatgaagtattgaactatgatccagaattagctaaagctatggatgatgagttagcaagacagagaagccatattgaattaatagcttctgagaaccttgtaagtaaagctgttatggcagctatgggaagccctcttactaacaagtatgcagaaggatatcctggaaagagatattatggtggctgcgaatatgtagatgttgttgaaacacttgcaattgagagagctaagaagttatttggttgtgaatatgccaatgttcagccacattcaggtgcacaggctaaccttgcagcattctttgctatggtagaaccaggtgatactgttatgggtatgagccttgactgtggtggacacctttcacatggttcaccagttaatatctctggtaaatattttaatatagttccttatggagttacagctgaaggctttatagattatgatgaagtattaagaattgctaaggaatgtaagccaaagatgatcattgctggtgcatctgcatatgcaagagttattgattttaagaagttcagagagatagctgatgaagttggtgcttatcttatggtagatatggctcatattgctggtcttgtagcaggtggagagcatccaagccctatcccttatgctgatgtagttacaactacaactcataaaacattaagaggaccaagaggtggtatgattctttcatcagcagaagctgctgaaaagtttaagtttaacaaggctgtattcccaggaatccagggaggtccacttatgcatgttattgctggtaaggcagtatgcttaaaggaagcacttgacccaagctttaagacttatgctaagaacattgttgataatgcacaggctctttgtacaggacttatgaacagaggttttgatatcgtatctggtggtacagataatcaccttatgcttgttaaccttttaagcaagaataagactggtaaggaagtagaaaagcttcttgatgcagctaacattacatgcaacaagaacactatccctaacgatccagcttcacctttcgtaacaagtggtatcagacttggtacagcagcagttacaacaagaggcttcaacacagcagatatggatgtagtagcagaagctattgctttacttgtagatgacgttgatgctaatcaggctaaggctatggctatggttaaggaacttacagacaagtatcctctttatgaataatgctggaatatataagaaatgaacttctggggatgactgataaaggagaatatgcagcatttacatcctcacttattcctggctgcgataatataataggaataagacaaccggtattaaagcaatatgcaaaacagctgataaaggagaataaggatttccggcagctgcttagtgaaccggatatttatcaggaagaaacactgcttagaagctacataataggaatgggaacagcgaaggagaaagactttaagaaggctttaaaagacttcaacacattcgttcctcttgtgaacaactgggctgtaaacgacagcttctgtgtagaattcagggttatggatatgtttcgggacgagtttctgccatacataaaggaatgtatagaatcgtttgatgaatacagggcaagagtagggcttataatgctgttagaccactatttaaaggttgatatgcatggcatgaaaagaccgagaatgaaaaaggttactattaaagatatagaaagcacagatgaaataaattgtgctaatggtttatatcttgatgatatattttcacttgtaaacagggatttttcggcctatggatattatacacagatggcagcaggctggcttcttgcggaatgttttgttacatttccaaaaagaacgtgggaatatcttacagataccgactgcttaaagttagataagttgtcatatcagaaggcggtacgaaagatatgtgaatcgctcacgccggataaagaagttaaactaaaagttaaaaagtatctgaagcagatgtaataatctgtttcaggtctttttttattgctttagtatattttaataatttgaatatcaaaataaccttgacaaacacataagttttgtagtataaaaataatgtttgaaaatcaaagtaagataatcaaattgttagtaagtcaaataaataaggacaaaaaagtatgataagaacaagaatcataggaacaggaagctatgttccaccagatatattgactaacgataatctgtcagaaatggtagatacgagtgatgagtggataaggacaagaactggtatatgtaacagacatatagcaaaagatatggataatgctgatatggcatataacgctgcaagaaatgcagtagaggatgcacgtattgaagcttctaagattggtctgattatagttgcaacgtcaactcctgattatgcttttcctaatcaggcatcacttgtacaggcaaagcttaaagcagtaaatgctatgtgttttgatgtaagtgcagcatgttcaggttttattacagccctggatattgcagcttcaatgttaaaggcaggttcgtataaatatgcacttgttattggttcagaaaaaatgtcagaaatagttaactggaaagacagaagtgtgtgtgtgctttttggagatggtgctggtgcagtggttcttaaagcagttgataacaacacagaagatgttacaggtgccttagttggtcatgaaagaggaattattgacagcaatatctacaatgatggaacaggtgcatctgttttaacaggtggcagaagattttctgattcatgcagcacagatatatttatacatatggatggacaggaagtgtttaaattcgccgtaaagagtgttcctacagctatagaaacacttttacataataataatatggatattaatgaagttgataagttcatattgcatcaggctaatgtacgtattatagagagtgtagctaaaagacttaaggctgataaagataagtttccagtcaatctgaatgaatatggaaatacatcatcagcaagcattcctattctgcttgatgagttaaacaggaatggaagcttaaaacagggagagaagcttgtacttgccggttttggtgcaggattaagctggggaagtattctgcttgtatggtagcacggttaaagatgctaagcttattatatagatatttgcagactgcttactaaaagatatcaggcagccggataagcggcattttaacatatataagatgtttatggcaaaagctttgccatagatatcaaagttgtgggcttttgaccccgacaacatataataaaaaataataagaattaaggagatttaacattatgtttgaaaaagtaagagaattagttgcagcacagttaggtatagatgaggcagttattaagcctgagtctaatttcaaggaagatcttaaggcagattcacttgatctttttgaacttgttatgtcacttgaggatgagtgttcagtaactattccatctgaggagcttgaaaagattcttacagtacaggatgttgttgattatatcgaggctaaccagaaatagttataaatgtcaggaaggaagataagttatgaaaactcgtgtaacagagcttcttaatatagaatatcctgttatacagggcggtatggcatgggttgcagatgctaatctggcagcccacgtcagcaaagccggtggaatgggatttattggagcagctaatgcgccggcagaatgggttaaagaacagatacatattgcaagaaagataacagataagccagttggtgttaatattatgcttttaagtgattatgcagatgagatagcacagcttgttattgatgagcatatagaagcagtaacaacaggtgcaggcaatccaagcaaatatatgaaggcctggaaggaagctggaataagggttattcctgttgtggcatcagttgcacttgcaagaatgatggaacgtgccggagcagatgcagttgtagcagagggcatggaatcaggtggacatatcggcgaggaaacgaccatgacacttgtaccacaggttgttgatgcagttaatattcctgttatagcagctggcggaataggtgatggcagaggtgtatgtgcggcatttatgcttggtgcagaggctgtacagatgggaacaagattcgttgtggctaaggagtcaaatgtccatcagaattataaggacagagttatagctgccaaggatatagattcagtagtaactggcagaagtacaggtcatccagtaaggtcacttagaaacagcatgacaagagagtatcttgatatggaaaaagaaggcgttgagtttgaaaagcttgaaagacttactcttggaacactaagaaaggctgttgtggatggtgatgtcaagcagggaactgtaatggcaggtcagatagcaggtcttgtcaataaggaacagacatgtgaagagattattaaggagcttatgaaggaagtctctgaggtatataattcacataataagctggcataaaacagtgtatggaaatgaggatttaaaaggtatgggaaaaacagttgtaatgtttccaggacagggaagccagcgtactggaatgggaagagaaagctataatagctgcacttcatcagtaaagtgctttaagaaggctggtgaactgacaggtatcaatatggagcatttaatatttgaagaaaatgatcttcttgataaaaccgagtatacacagattgcgttatatgtaacagaaatcgcccagcttgctgatatggttgagcagggccttacgtatgatgcagctattggactttcattaggtgaatatagtgcacttactgcaagtggtgcgctatcttatgaagatggtgtaagacttgtaagaaaccgtggaatatatatggaacaggaggttccggctggtataggcgccatggctgcagttatcgggcttacatcagatgaggttgacagtgtacttgctaaatataacaaggataaaagtgggaacacagagtctgataatgatatgtatcctgatacagtttccgcagctaattacaactgccctggccagatagtaatatcaggtaaaaaggaatgtgtacaggaggctatggaagtgcttaaggaagcaggagcaagaagaacactccttcttaatgtaagtggaccgtttcattcaaagcttcttaagggcgcaggtgataagcttatgaaggatcttgaaaaagttacttttgataaagtgaagtatccttatgtggcaaactgtacagctgagtatgtggatgagaatacatccagtggatatataaaagaacttctttcaaagcaggtatatagttcagtacgttttgaacagtcagtcagaaaaatgatagccgatggttatgatacatttgttgaggtgggaccaggaaagactttatctggctttgttaaaaagatagctaagagcatggaaaaggaagtagttataaaataacaggcaataaatgcagacaagatattggtaaggctttagcaatattgtatcgatgaaaggcagtgtgttatgtgtatggataattgtataaaaagatatgaaaacaagatagtgcttgtaaccggagctagcagaggaataggagctgctatagctgcccgttttgccaaagagggggctgtggttattgttaattacagtggtaatgatgaggcagcagatagaacagttgaaaatattctggctgccaacggaaaggcagaaaaatacaagtgtcaggttgattcgtatgaagaaactgaaaaaatgattacatatataatggataaatataagagaatagacattcttataaataatgcaggtataacaaaagatggtcttatcatgagaatgaaagaggaagattttgacagagttatagatgttaatcttaagggaacatttaactgcataagacacgtaagcagatacatgttaaagcaaagaagcggaagaataatcaatatgtcatcagttgtaggcatagctggtaatgcaggacaggttaattacagtgcttctaaagcaggtgtgataggtattaccaaatctgcggcaaaggagcttgcatcgcgaggaataactgttaatgcagttgcacctggatatattgatacagatatgacaaaggttttatctgatgaacagaagaagtcagtacttgatatgattcctctttcaagaatgggaagcgtggatgatataagcaatgctgtagcatttctggcatcagatgaagcagcatacataacaggacaggtgatatcagtagatggaggtatgaatatctgatgagaagagtagttgttacaggtatgggtgcaataacacctataggtttaagtgtggatgaattctggaattctgttaaagagaatacagttggaatagataatataacaagatttgatacaacagattataaggttaagcttgcagcagaggtaaaggattttgatgctaagaattatatggatttcaaggcagccaaaaggatggaaaagttcagccagtatgctgttgcggccgcgcatgaggctatgaaggattcggggcttgatatggctaaagaggatgctttccgtgttggtgtatcagtaggctctggtgttggaagccttgaagctatggaaagcaatcacaagaagcttcttgaaaagggtccatctaggattaatccgcttcttgtacctcttatgataactaacatggcagctggcaatgtatcaatacagctaggtttaaagggtaagaatataaatgttgttacagcatgtgctactggaactaactctataggtgaaggctatagaagcatacagcatggagaagcagatgttatgtttgcaggtggaactgaaagttctatatctcctattggaatcggtggttttgctgcgcttacagcactttcaacatctacagaccctaagagagcctctatcccatttgacaaagaaagaaatggctttgtcatgggtgaaggagcaggtgtggttgtacttgaagaactggagcatgctttaaagagaggagcgcatatatatgcagagatcacaggctatggctgttcttctgatgcataccatataacatcacctatggaggatggaagtggagctgcatatgctatgacaagtgccatgaaggaagcagaagtaaaaccagatgatatcgattatataaatgcacatggaacaagtacccatcataatgatctttttgagacaagggcgatcaagctggcacttaaggatgcagcttacaatgtgcctgtaagttcaacaaaatccatggttggacatctgcttggtgcagcgggcgcagttgagttcatagcctgtgtcaagtcaatccaggatggttatatacatccaaatgtaggactatcagaaacagaggaagaaatggatcttaattatgtcaaggatgaaggaatcgaaaaggacgttgatgtagtcatgacgaattctcttggttttggtggacataatgcaactcttatagtaagaaagtattcataatatgatgaacgcttaaagtacataagtagattgctggtgagatatatggaataccagaatatgaataaaaggtcatgaagaaatggagataatatatggaattagaaaatgtaataaagctcattaatgctgtatcagaatcttcacttacaagctttagcatggaagatggcgacactaagctttcgcttggcgctgacagaagtgacagggcagctgttaaagaaactgccggtgctgatgatatagttaatagcgataacggcaatgaatcaggattgaataaatcggacattaaaacttctgatgataatgtgcttactgttaattcaccacttgtaggtgtattttacagttcagcatctccggaagctgatgcatatgtagcaataggtgacagggttaaaaaaggtcaggtaatcggtatagtagaagcaatgaagcttatgaatgagattgaaagtgattatgatggtgtggttactgatattcttgtagataatgaacagatggttgaatatggacagcctatgtttgttataaaaccagtctgacaatacgtcggtatcaaaggcatgggtttttgataccgacattatatatatgaaattcgattatttaatataaggagttaagtatgcttacaacaaaggaaataatggatattataccacacagacatccttttctgcttgtggatacgatagatgaacttgagcctggaataaaggcaacaggatataagtgtattacatatgatgagccttattttgcaggacattttccagctgagcctgttatgccgggggtccttcagatagaggcatgcgcacaggtaggcgctgttgcgatactttcgctggaagaaaacaaaggtaaaacagcatattttggtgcagttaataatgcaagatttaaaagaaaagtagttcctggtgataaacttaagatggaatgtgagattataaagaaaaaaggaccagttggcgtgggaaaggctgttgcgacggtagatggcgaggttgcacttacagcagagcttacatttatggtaggttaatccgtctgatgttataaatataatatgtggattatggaatgattataaggagatgaagctgtgtttaataagatattgatagcgaacagaggcgaaatagctgttagaataataagagcctgtagggaaatgggtatacagacagttgcagtatattctgaggcggataaggaagcacttcatacgcagctggctgatgagagtgtatgtataggaaaggcagcagctaaggatagttaccttaatatggaaagaatattgagtgcaacagtagctacacatgcagatgcaatacatccaggctttggatttctttctgaaaacagtaagtttgcatcattatgtgaaaaatgtaacatcacatttataggtccagattcagatatcatagagaaaacaggtaataaacaggaagcaagaaatacaatgatatcagcaggtattccagttattccaggaaccaaagaaccagttatggatgcagaaaaaggaaaagagcttgcagacaatataggttatcctgttatggttaaagctgcacttggcggcggtggcaaggggatgcgtgttgtatatacaaaagaagattttaaaagggaattcgataacgcacagagagaagctgtgaatggctttgctgatggcacaatgtatatagaaaaatatatagaaaagccaagacatatagagttccagatattagctgataaatatggaaatacaattcatcttggtgaaagagattgttcaatacaaagaaatcaccagaagttagttgaggaatcaccctctcctgcgttgaatgatgaattaagaaagagaatgggagatactgcagtggcagtggctaaggcagttaactatgaaaatgcaggaacagttgagtttcttcttgacaaaaacgacaattattactttatggaggtaaatacccgtattcaggtcgagcatggtataacggaacttgtgacaggtgttgatcttataaaggaacagataaagatagcagccggcgaaagtcttggtattaagcaggaggatgtaaggatacatggtgctgccatggaaataagaatcaatgctgaaaaccctgaaaagaactttgcacctaatccgggaacaataaagaatatacatataccaggtggtaatggtgtaagaatagatactgcagtttatagtggatatacgatacctcctttttatgattccatgataatgaaggttatgacatatgcaaacgacaggaaaacagtgattgagaagatgagaagtgtccttggcgagattattattgaaggtgtcacaacaaatacagattttatgtatgatatatgccagaatgagaagtttattaaaggtgatgtcagtacagatttcataccagaggagtatccacaggtatgtaaaaaatagttgttcgttatgcacagtaagagtgcgtggaaatgaggatttatatgcagataaaaggcttgtttaaaaagaatatccataaaaataaaatcaacaatctggatagcagtaatataaatgttccagatggattatatacgaaatgtccggtttgttcaaaaataattttaacagaggacatgtatctgaataattgtgtatgtccggaatgtggatattatatgaagctggatgccagaacaaggatatccatggtagtggataagaatacattttcagaatgggatactaacattgaagagagcaatccatgtgaatacccaggttatgaggagaaaatccagaatcttaaaagaaaaacaaatcttgatgaggcagtaataaccggtgttggaaagatagatggcagcaaagctgttataggtgtctgtgatacaagatttcttatgggcagcatgggcgaagttgtaggtgaaaagcttacacgggcagttgagaaggctacagagcagaagctgccggttattatatttacatgctcaggcggagccaggatgcaggagggaatagtatctcttatgcagatggcaaagataagtgccgcattaaaaaaacatgatgaggcaggacttttatatatcactgttcttactgaccctacaactggaggtgtaactgcaagctttgctatgcttggagatattatacttgcagagccaggtgcccttataggttttgcagggccaagagttatcagacagactataggacaggaactgccagaagggtttcagagagctgaatttctgttagagcacggctttgtggatgcgatagttaaaagggatgagctaaagaagacacttgcgcatctgcttgacatacataagtacagtggagcttatacagaagttaaagaaaatgtggatacataccggagcaattcagatattatgaagaagtatcttgagtatcttgataatatatatttcaaaaagatagatagagaagaagaaaaaaaggctgaggctgataataatctgtataatgagtatgatgtatgggaaaaggttgaaatagcaagaagcagtgaaagacctaatgccgcagattacatagaaaaaataactaaagatttttttgaacttcatggtgacagaaacttttgtgatgataaagcaataataggtggaatcgcaacatttggcggcattcctgtaacagtcataggacatatgaagggtaagactactaaagagaatatatcaagaaactttggaatgcctaatcccgaagggtatagaaaggcactaaggcttatgaagcaggctgaaaaatttaacagaccggttatatgttttatagacactccaggagcatattgcggtcttggtgcagaagagcgaggccagggagaagctatagcaaagaatctgtatgaaatgagcagtcttacagttccggtattgtcaatagtaactggcgaaggtggaagcggtggtgcacttgcactaggtgttgccaatgaggtatggatgatggagaattccatatattcaatactttcaccagaaggctttgcatcgatactgtggaaggattctaagaaagcaaaagaggctgcggaaataatgaagctgacggcagcagatttatatgagcttggcataatagagaaggtcattccggaatatccggttataaatgaaaataatataaaaagagtgacattatatatgaaacgcatgatatgtgattttatgtacagatatattgatatggacaaggaagaacttgcaagacagcggtataacagattcaggaaaatgtaagaaagcactaaatctattacattttttttttgttgtattaatataattgtgttaatatgattatgttaatgtgattgttttaatgtgattgcgtaggaagattacggaattgttatatctaaacagaaagaaggaatatatatgtcatatggatacagacaatacagggatactgctcatagatggacacagataggtgttggtttaatatctgtaatagcaggtcttatacttattgtatgtgtaacggcacctatgtatgtctcaagcatgttaaaggatgcaggactgtcagctgctatatcgcaccgttttatggatactgtttttgattcacttggggataatatggaggcgttatccagaattcagacaagtatagaggattctaagatagtagacagaatagcacagaaatatacaacggctatggttgacgggatgcttaaagaaaaatcctttgatgatatagagattaatatagatgcagagctggatgagcttatggatatgacatataacaaaatagcatctaatatcaatatgggaaatatacaggaaacaatagtcagggcagctcttagctatagtaaaaatggtgcaaatgaggctataaataattatgccagtggtatatatggtgatatatcttatcgtctgcagccgcttataaaggtatatggaataataacgtctgttgtgtttaagatattgatgcttttaatatatatcacattattgattgttatcattgcatttaatcctgtcagggttgtaaggtacacactcccatgtatatttgtcataacaggtggtatatatatttttattgcaaatataattggaaacagatgtatggcggctgtaagtaacagatatctaggaagaactgtgtttatagatactcagattgcttatagggttatgggtgttatgtgtatactggcagcagcttcttatgttattactttgatatatggaatggttgtgaaaaacaggagaaaaagaatatagaaatatctgagattaatgtttgataagagtttattagagtttataagagcttataaaaactcataaaacattataaaagatgaaaaatggagctgctacatatatatgtggcagctcctgattttgttttataatacttgttatataatattttttaaagtattatttgttattcttcttttcgttctcaagcttcttcatagctcttaccttaagtgaaagaccaaagaggttgatgaaaccatcagcatcatggtggtcataaaggtctccagttgtgaatgaagcgatagattcgttatataatgaatatggagatgttgtaccagctttgatgatgttgcccttgtaaagcttgaacttaacttcaccagttacgtattcctgtgtcttttcgacaaatgcctgaagtgcttcacgaagaggtgtttcccactttccttcgtatacaacctgagcgaacttgttagcaacattaatcttctctgctgttgtatccctgtcaagaactaattcttcaagctgctgatgagcttcgtaaagaatagttccaccaggtgtttcatatacaccacgtgacttcataccaacaacacggttctcaacgatatcaattataccaatgccgtgcttgccgccaagtctgttaagttctctgatgatatcagaaaccttcatcttcttgccgttaacagatgtaggaacacccttttcaaatgtcattgttacatattcgccttcatctggagcttcttctggtgtgcatccaagaacaagaaggtgcttatagttaggctcattagctggatcttcaagctcaagaccttcgtggcttatatgccagatgttacggtcacggctgtagcttgagtcagggctgaatggaaggtgaataccgtgctgtctgcaatattcgatttcatcttcacgagactgtaatgtccatcttgaatctctccaaggagcgataatctggatatctggagctaaagccttgattgtaagctcaaatctgatctggtcattacccttacctgtagcaccatggcagatagcaacagcaccttctttacgggcaatttcaacaagtcttttggcaatgataggtcttgccattgatgtaccaagtaaatatttattttcataaactgcgtgagcctgtacacatggaacgatgtagttatcgcagaattcatctgtgatgtcttcgatatataacttggcagctccacaagataaagctctttcttcaagtccgtctaattcctcttcctgaccgcaatctgcacatacacagataacatcatagtcgaaagtttcctttaaccaaggaatgattgctgtagtatcaagaccacctgaataagcaagaacaactttctctttcattattaatgtacctccatataattaagtaataggtttaattatgtaataaatattatgtagtaaataatgctattacaaagtgtaaaactctgctgattataataaactacttattatgaaaatgcaataggtaaaaatgtatattatgcaattttatgcaagaatattgcataaatataaaaaataatgaataaacactttacatagaaaaaaaagttgttataatggaacttgtcatttttattgatgaataatatatgtacacgaatgaataaataaacattcagatggaggacgtatggttaaggttggaattatcggagctaccggatatgcaggtaacgaattagtaagacttcttcttggacataaggatgtagagattgtatggcttggttcacgaagctatatagatcagaaatattcagatgtatacagaaatatgtttaaacttgtagatgccagatgtatggatgataatatggaacagcttgcagatgaggttgatgtaatatttacagcaacaccacagggcttatgtgcatcacttgttaacgatgagattttatcaaaggtaaagataatagaccttagtgcagactttagattaaagaatgtagatatatatgagaaatggtataagcttgaacataagtcaccacaatatattgatgaagcagtctatggtttatgtgagattaacagggataaagtgaataataatacaagaattattgctaacccgggatgttacactacaacatcaattcttacattatatccacttgtaaaagaaggaattattaatccagatacaataatcattgatgctaagagcggaacaagcggtgcaggcaggggtgcaaaggttgctaatcttttctgtgaagttaatgagagtatgaaagcatatggtgttggtacacacagacacacaccagagatagaagaacagcttggatatgcttgtggaagagatgatttaaagcttatatttacaccacatttagttccaatgaacagaggaatacttgtgacagcatatgctaatcttgcaaaggatgtaacttatgaagatgttaaggcggcatatgataaatattatgataaggaatattttgtaagagttcttcctaaggatgtatgcccagagacaagatgggttgagggaagtaactttgtagatataggatttaagatagagccaagaactaacagaattattgctatgggtgcattagataaccttgttaagggtgcggctggtcaggcagtacagaatatgaatcttttattcggttttgaggagaatgaaggacttaagattgcacctatgtttccatagaattatataatacaggcggcactataaatattttattcatataagattaataagacgttattggtaagtaataatcctgatagataattattatataggtaatttaataacaagcggttattaatctggacaggaggcagttatgcagattatagaaggtggagttacagcagccaaaggatttaaggcagctggtatggcggcaggaattaagtataagaatggtaagaaagatatggcaatggttgtttcagacaagccttgcgtgacagcagggacatttactcttaacagagtatttgccgctcctgttaaatgggataagaatattgtatataatgaagcttatgcacaggcaattgtagtcaacagtggtgttgctaatgcctgtactggtgttgagggtgatgaagcctgtgcacttgaagctaagacagctggagaggcacttggaattccagccgatgcagtgcttcttggttcaacaggtgttattggaatgcagcttcctatggatagaatgtgtgcaggaattaaggcacttccggaacttcttgattatactaaagaggctggaacacttgccgcagaggcaattatgacaactgatactgtaagcaagcaggttgcctgcacagtaaatattgctggcaaagaagtaacggtaggcggtatgtgcaagggtgccggtatgattcatcctcatatggctacaatgctctgttttattacaactgatgcagttatagagaagaaagcacttcagaagatgacaagtgatattgttgaagattcatttaatatgatatctgttgacggagatacatcaactaatgatacagtgcttgttcttgctaatggagaagcaggcaatgatactattaaggaaggcagcagtgattatgatacattttatgaggcattatcttatgtacttacagagctttctaagaaaatagcaggagatggtgaaggctgtacatgtctttttgaagttcaggttaagggagcttcaactaaggaacaggcaagaattcttgccaaatcaatagtgacttctaatcttacaaaggcggcaatatttggacacgatgctaactggggaagaattctttgtgctatgggttattcaggcgttgatttcgagccggagaaggttgatatattctttgaaagcaacgcaggaaagcttcagatagttaaagatggtactgcaacagattacagcgaagaaaaggcaactgaaattctttcacaaaatcctgtaaccgcaatagcagatattaagcagggtaacagtgaagctacagcgtggggctgtgaccttacatttgattacataaagattaatgcggattacagatcataatagttaagaataaaatggcattgtaatattgtcaggaatgaggataataaatgagtacaattaatatggaagaagagttaaagaaggcacaggtgcttgttgaagcactcccatatatacagaagttcaacagaaagattatagttgtaaaatatggtggaagtgcaatggttgatgaagaacttaaaagaaaagttattcaggacgtagtattattaaaggttgttggatttaagccaattattgtacacggcggcggcaaggaaatcagcaaatgggttgaaaagtctggaatgacaccagaatttaagaatggtttaagagttacagacgagccaactatggaaattgctgagatggttcttaacaaggttaataaaagccttgtatcgcttatagaggaacttggcgtaaaggcgtgtggtataagtggtaaagatggcggtatgttaaaggtagagaagaagtattcaaagggtgaagatataggatatgtaggtgaagtcaaggaagttgatacaacacttatacattctcttcttaaggatgattttcttccagtaatatgccctataggatatgatgacaatttccacgcttacaatattaatgctgatgatgcagcttgtgccattgcaagggcagttaatgcagagaagcttgcattcttaacagatattgaaggtgtatacaaggattataatgataaatcaagccttatctcagaactttcaacaactgaggcaagggaattattagcaggtggtacaataggtggtggtatgttacctaagcttaataactgtattgatgcgattgaacacggtgtttcaagagtgcatatacttgacggtcgtattccacactgcctccttcttgaaatatttactaacaagggtgttggtacagctatattatcagaaggtgctgagaaattcttcgatactaatatataataacaggagtagttatgcagacagaacagattattaaaacagcagaagaaaagttaatacatacatataacagataccagattgtacttgataaaggtgatggtgtaagattatatgatacagacggaaaagaatatcttgattttggtgcaggtattgcggtatttgcattaggttataataacaaggaatataatgatgcgttaaaggcacagattgacaagcttatacatacatctaattatttctataatgagccagcggtaaatgctgctaaagcacttacaaaggcttctggaatggacagggtattctttactaacagtggtacagaatcaatagagggtgctataaagcttgcaaagaaatacgcttatttaaagacaggaagaacagattcagagattatagcaatgcatcattccttccatggcagaagtatgggagcattagctgtaacaggcaataagcattatcaggaagcgttcggacctatgattccgggaattaaatttgctaattataatgaccttgaaagtgttaaacagttggtaaatgataaaacttgtgctattatatttgaaacagtacagggtgagggaggaatatatcctgcaactaacgaattcatcaagggtgtaagacagctttgcgatgaaaagggtattcttcttatacttgatgaaatacagtgtggaatgggaagaacaggtacaatgtttgcattccagcagtatggagttgagcctgatattcttactgttgccaaggcacttggctgtggtgttccagtaggtgcatttcttgccaaggaagaagttgccaaggcacttgtaccaggagatcacggtacaacttatggcggtaatccacttgcgtgtgcagcagcaacaaaagtatttgaattatttgagaaacagcatatattggataatgtcaaggaagtatcagcatatcttgaagaaaagcttgatgaacttgtagcagaatatgattttataattgagaggagaggacttggacttatgcagggacttgaactttcaatcaatcctaaagatgttattgctaatgcattagacaatggacttatactgttctcagccggaactaatgttatcagaatggtgccacctcttgttataactaaggcggacgtagatgaaatgataacaaagttaaagaaatcattttaataaaggttggatgaataatgaaagtaattaagaagcttgtgtcagttcttatggcaggtgttcttactttatctgtgatggcatgttcaggtacagataagaataagacagcaagggaacttgatatagagactcctgtaacagttaatgtctggtatgataataaggactatgacagctatcttgaaaatgtagcgaaagaatttaaagaggctaacaatctggttactgtcaatccggtatatgttgagtcatcagattttgttgatacaatttacaatgaaactgtaagaaatgataatgtgccagatgtgtatcttatgtcatcagagaattgcaataaggcatatcttttaggtcttatgcttgaaaatgattcttacaaggatgtatacaatgataaagtatatggacaggctgcccttatagcaagctcatataatgaaaagttatatggctatccggttacatttaatatgccggttatggtgtataacagtaagcttgcaggtgcagttgatacatttgatgagataaaagaatataatgataactacgaagttacagaagataataaaaatgttcagaggatatttaactttgatgcatcatcaatgtttcttaattatacatttacaggaagatacgttaatataggcggcaataatgctgaggattcaggagcatttgcaatagatgaggtgcattttaaaaaggctttaactgaatatgtgaagttaaaggacacttacgcgattgatagatataattcatcattgcagtcgtgtgtatcacagtttgcagagggaaagcttatatatacaatagttgatgccgacagcctttcaacaattgatgcttcaggtgttgaatatggaataattccagttccaaagcttgcagatgatttagagtcaaaggcaatgtcagttactacgatggcgatagtaaatccatacacatcaaatattgcggtatccaaggcagtagcaagggcaatatcatatgactatgcagaggatttggaaagtcttagtgggcatatgagtgcaagggcagacataagctataaatcaaagacccagcagagcaattacaatacactgcatacaatatatgctaacagcatcgtaaaagccaaatatgtaggagtaggcaacatatatacaaaatatgagattatgcttcaccagttatgggacggagtggattttaacagtgcatataatgagttttacaaagaaatctccaattatatgacactatcaaggcttaataattaaatatggaataatacattagtgtggataaaaatgtaatttactccaatattagtgaataaaatcctgctatcagtaaatactttattaacaatagagattgttaaaggaggttgtctgatggcaggatttattgttgcaataatctcaggtgcgttaatgagcctgcaaggtgtacttaatacgaatgttacaaaagcgagcagtatatgggtggcagcaggcttcgtgcagtttacagcacttgcaacctgcattataatgtggttgtttaacggaagacctgatattagtggaatatttcaggtagagaataaaatatcattattaggcggtgtgataggagcattcataaccttcaccgtagtaaaaagtgtatccgacctaggtgtagccaaagccgaagtcacaatagtagtagcacaggtaatagtagcctatataatagaacttatgggcttatttggaagcaaaaaagccgacttctcgtggctcaaactcttagccctgataatagcaatgggcggagtatttatgttctacaatacagggaagaattaaagttgtaaaactgacagtgaggggatataatgtgcgtaagctacaagccgtgccagacagaaaatttaaaagctgctgtgcttgcacaaagctgcttttaaaatttctgtctgatagggcgacagcccgacagtccaagaaagccagagctttcttggacctgcacggcgaaaccagtgggaaatcaactaaaggcgatgtgcaaagcacgagccagcaaaaacaaatcataagcaggctaaggaaagcgatgtgcgaagcacgagccagcaaaaacaaatcataagcaggctaaggaaagcaaagtgcaaagcacgagccaaaagtaaaggcaatctgcggcagtacataataagccaaggtaaagtagaagcgaagtgcgaagcacaagcgcaatctatgccaccactgcatttcccaccccaccccaaataaaagagaggacctcaaccaatgaccaatttatttaaaataacaggcacagtaaccctgaaaaaaggcgccggccgtcaattaaaatccggcggtatgtgggtatacgacaacgaaatagacacattttccgaaaccgtagaagacggaggccttatcgaactccatgatttcgatgattactttatgggaataggcttcgtaaaccgccgttccaaaataacagtaagaatgttatcaagacacgagggagagattaacgaagaatttatcaaacagcgtgtaaaagatgctgtttcctacagaatggatactgtcgatacatcttcctgccggcttatattcggagaggcagattttcttccgggtatagtaatagacaagttctcagatgttcttgtagtagagtcacttgcacttggaattgacagatttaaacagcttattgtcgatgacctgaaagaaatacttaaagaatatggcatgccaataagaggcgtatatgaaagaagcgatgccaaagtaagacagcttgaaggaatggaaagagttaaaggctttatcggtgaagaattcgataccaaagttatgataactgaaaatggtgttaaatattatgtagatgttaaggacggtcagaagacaggctttttccttgaccagaaatataacaggagagctatcggcggcttatgcaagggtgcgaaggttcttgactgctttacacatacaggttcatttgcacttaatgcaggaatatcgggagcttcaagcgtattaggagtagatgcatctgaacttgctgttaatcaggcgacagaaaatgccaagcttaacggacttgaggatattgtccgattcaaatgtgcagatgtgtttgacctgcttccacagcttgaaaagagtggcgagaagtttgatgttgtgattcttgatccaccagcatttaccaagtcaagaaattccattaaaaatgcagttaagggatacagagagattaatcttagggggatgaagcttgtcaaagacggcggataccttgcaacctgctcttgttcacattttatggatccggaattgttcactaagacaattggcgaagcggcaagaaatgtacataaaagactaagacagatagaatacaggacccagtcacctgaccacccaattctgtggtcagccgatgagtccttataccttaaattctatatttttcaggttgttgacgaaaagtaa

SEQ ID NO: 950 - DNA, 40387 bp, unidentified
  source 1..40387: mol_type = unassigned DNA
  misc_difference 20055: note = a, c, g, or t
  misc_difference 20056: note = a, c, g, or t
  misc_difference 20057: note = a, c, g, or t
  misc_difference 20058: note = a, c, g, or t
  misc_difference 20059: note = a, c, g, or t
  misc_difference 20060: note = a, c, g, or t
  misc_difference 20061: note = a, c, g, or t
  misc_difference 20062: note = a, c, g, or t
  misc_difference 20063: note = a, c, g, or t
  misc_difference 20064: note = a, c, g, or t
  misc_difference 20065: note = a, c, g, or t
  misc_difference 20066: note = a, c, g, or t
  misc_difference 20067: note = a, c, g, or t
  misc_difference 20068: note = a, c, g, or t
  misc_difference 20069: note = a, c, g, or t
  misc_difference 20070: note = a, c, g, or t
  misc_difference 20071: note = a, c, g, or t
  misc_difference 20072: note = a, c, g, or t
  misc_difference 20073: note = a, c, g, or t
  misc_difference 20074: note = a, c, g, or t
  misc_difference 20075: note = a, c, g, or t
  misc_difference 20076: note = a, c, g, or t
  misc_difference 20077: note = a, c, g, or t
  misc_difference 20078: note = a, c, g, or t
  misc_difference 20079: note = a, c, g, or t
  misc_difference 20080: note = a, c, g, or t
  misc_difference 20081: note = a, c, g, or t
  misc_difference 20082: note = a, c, g, or t
  misc_difference 20083: note = a, c, g, or t
  misc_difference 20084: note = a, c, g, or t
  misc_difference 20085: note = a, c, g, or t
  misc_difference 20086: note = a, c, g, or t
  misc_difference 20087: note = a, c, g, or t
  misc_difference 20088: note = a, c, g, or t
  misc_difference 20089: note = a, c, g, or t
  misc_difference 20090: note = a, c, g, or t
  misc_difference 20091: note = a, c, g, or t
  misc_difference 20092: note = a, c, g, or t
  misc_difference 20093: note = a, c, g, or t
  misc_difference 20094: note = a, c, g, or t
  misc_difference 20095: note = a, c, g, or t
  misc_difference 20096: note = a, c, g, or t
  misc_difference 20097: note = a, c, g, or t
  misc_difference 20098: note = a, c, g, or t
  misc_difference 20099: note = a, c, g, or t
  misc_difference 20100: note = a, c, g, or t
  misc_difference 20101: note = a, c, g, or t
  misc_difference 20102: note = a, c, g, or t
  misc_difference 20103: note = a, c, g, or t
  misc_difference 20104: note = a, c, g, or t
  misc_difference 20105: note = a, c, g, or t
  misc_difference 20106: note = a, c, g, or t
  misc_difference 20107: note = a, c, g, or t
  misc_difference 20108: note = a, c, g, or t
  misc_difference 20109: note = a, c, g, or t
  misc_difference 20110: note = a, c, g, or t
  misc_difference 20111: note = a, c, g, or t
  misc_difference 20112: note = a, c, g, or t
  misc_difference 20113: note = a, c, g, or t
  misc_difference 20114: note = a, c, g, or t
  misc_difference 20115: note = a, c, g, or t
  misc_difference 20116: note = a, c, g, or t
  misc_difference 20117: note = a, c, g, or t
  misc_difference 20118: note = a, c, g, or t
  misc_difference 20119: note = a, c, g, or t
  misc_difference 20120: note = a, c, g, or t
  misc_difference 20121: note = a, c, g, or t
  misc_difference 20122: note = a, c, g, or t
  misc_difference 20123: note = a, c, g, or t
  misc_difference 20124: note = a, c, g, or t
  misc_difference 20125: note = a, c, g, or t
  misc_difference 20126: note = a, c, g, or t
  misc_difference 20127: note = a, c, g, or t
  misc_difference 20128: note = a, c, g, or t
  misc_difference 20129: note = a, c, g, or t
  misc_difference 20130: note = a, c, g, or t
  misc_difference 20131: note = a, c, g, or t
  misc_difference 20132: note = a, c, g, or t
  misc_difference 20133: note = a, c, g, or t
  misc_difference 20134: note = a, c, g, or t
  misc_difference 20135: note = a, c, g, or t
  misc_difference 20136: note = a, c, g, or t
  misc_difference 20137: note = a, c, g, or t
  misc_difference 20138: note = a, c, g, or t
  misc_difference 20139: note = a, c, g, or t
  misc_difference 20140: note = a, c, g, or t
  misc_difference 20141: note = a, c, g, or t
  misc_difference 20142: note = a, c, g, or t
  misc_difference 20143: note = a, c, g, or t
  misc_difference 20144: note = a, c, g, or t
  misc_difference 20145: note = a, c, g, or t
  misc_difference 20146: note = a, c, g, or t
  misc_difference 20147: note = a, c, g, or t
  misc_difference 20148: note = a, c, g, or t
  misc_difference 20149: note = a, c, g, or t
  misc_difference 20150: note = a, c, g, or t
  misc_difference 20151: note = a, c, g, or t
  misc_difference 20152: note = a, c, g, or t
  misc_difference 20153: note = a, c, g, or t
  misc_difference 20154: note = a, c, g, or t
caaatgccaatgaggcaattgtttttccaccacctgttggaacagtcaggtgaaacaatcccctatcattctcacctgctatcagacaggcttttaatatctcagttcttctaccgtttatcgaattaagatcatcattttctaaccatgaaccaatatgtctttccagtcttgctaataaagatgccatttcttcacccgatgttcgttccacatggttattcttcataaaactttctgtttcaagaaagtccgcatcaacaagacatgaatataacatcctcataaaaatccccattgaaaaatgaggattttgtgttttacagctctcaaaaggatcactttttatttgtggaatttctacctcctgtctatatgcctgataatcacatattgattttctatatcgttcttcaagcttatagtaatccattagtccagaatgatgtcctgcaatagcatattgtaatatagaataatatccacctttttcattacataatctcattccagcagtagaatggtctactctgtcattcgtattaaactgtattttatgttgaaattctttggaatacttacctagatcatgtaacatacctatgcaatatccccactcatattttccaaatgattctgcaaattttccggctaatttggcagttccatccaaatgatcaataagcctttgctttctttcttcttctatatgcgcaatatattccatttatatcaccagattcatctttacactcccacaatctcatcaatcatcctaagctcttcctcagagaagcctgtgccctccataacctttaagttttcaagaatctgctgtggctttgaggcgccgacaagcacgcttgtcacgtcatcatcctttaccacccacttaagagccatctgtgctagtgtctcaccacgttttgcggctatatcgtttagcttcttaatctgctcgatgtgtggagtgagcttttcctgatttaaaaagcggccgtctgtctttatacggctatcctccggaataccgtttatgtaacggtctgtgagcatgccctgtgcgagcgggctgaaggagatgatgcccttttgacactctcttgctgcctgcttcaagccgttttgctctattgtacggttgaagatattgtatgaattctggttgatgataaacggacatttcaaatcagtaagaatctcgcaggctctcttcatggtctcgccgtcataatttgacagtccgacatagagtgcttttccgctttttactatctggtcgagtgctcccattgtttcctcaagcggtgtctcagggtccattctgtgatgatagaaaatatccacatagtcgagtcccattctcttaaggctctgatcaaggcttgcaatcagatacttgcggctgccccagttgccgtatggtcccttccacatatcatagcctgcctttgagctgatgatgagctcatcgcggtatgctgacagatgctccttcaggataagcccgaagtgcttctctgcgctgccgtattcaggaccatagttgtttgccaggtcaaagtgagtgatgccatggtcaaaggctgtgaagcacatctgcttcatgttgtcatacgatgaaaaatcaccgaaattgtgccatagaccaagcgatacaacaggaagcttaagtccgctcctgccgcatctgttatatctcattgtgtcgtatctcttttcgtctgctgtgtacatatttacctcccgcataaatacatgatattttacccgataaattattatactacagcagacttgatttttctattgttaaataaaatcctccgtcagctttccatgcttctcataatttgtcacacgcgctatcttgttttcatcatccacaaacacaaccttcggatgatgctcctttgcttcctccggtgtcatctgcgcatagcacatgagtatcacatggtcaccgactgcaacctgtctggcggctgcgccgtttaagcatatcatgcctgagcccggctctccggcgatggtgtaggtctcgaatctgtttccgttttccacatcgacaatctgtaccatctcatactccaagatgcctgctgcctcaagcagctttgtatctacagtgatgcttcccacgtagtttaagtcagcctgcttgaccaccgctctgtgtattttgcccttaagcattgtataattcattgtttgtacctcttttcaataatcgtttcttgtccgtctacgcaataaaattgtcaatcagccttgtctttccgatatagacagcaattgccacgagtgttgttcccttaatctcatcaaccggtgtaattgtttcaaaatcaaccacatctacataatcaattcttgcaagcggctccttgtttatctctgctgtgattgcatcctttatcgcttttgcactcttttcgccatcctctacgagctgctttccgatttttaagcttctgctcagtacaagcgctgcctgtctttcatcctcacttaaatatgtgtttcttgagctctttgccagtccatcctcctcacggatgattgggcagccgatgatttctgtgtcaacatttaaatcctttaccatacgctttatgaccgcaagctgctgtgcatccttctgtccaaagtatgcacggtcaggtgtcacaatgtgaaacagcttcaggacaactgtctgcacacctctaaaatggataggtcttgtttttccacaaagctcagttgtgaggccattcatatccacatatgagcagaagccgtctgcatacatctcctcaggctcaggatggaaaataatgtcaacgcccgcatcctcacaaagctttgcatccctgtttaaatcacgtggatagctgtctaaatcctctgcagggccaaactgcattggatttacaaaaatactcactacaaccttgtcattctcgcgtcttgccgcatcgattaagctcttgtgtccctcgtggaggtatcccattgtaggtacaaagccaacgcttttgccctcttttttccatgcctttactgcttctcttacctgttcgatttgtccgtatattaacattttatgtctccttattcttttatttttcgtagctattttttgtaaatattcttcaatactattttcgatactaatacagcttgtcaattattgtctcatccatcttaaaggtatgctcctcaccagggaagcttccctcctcaacagcctttttgtaggctgtgaacgcctcattcatttcttttccgacctgtgcaaactgctttacaaatttcggcttcatgtttgcatacatggcaagcatatcctgatatacaagcacctggccgtcgcagtctgctcccgctccgataccgattgtaggtatgcttatgctctctgtaattttttttgcaagtgcctttggcacgcactcgagcaccactgcaaatgctcctgcctcctcgaccgcacgggcctcgtcaagaagcttctgcgctgcctcttcacccttgccctgcaccttgaagccgccaaatgcatttactgactgtggtgtaagccctaaatgtgcacataccggaattgacgcatccacgatagcctttatctgtggacatacctccttgccaccctcgagcttgactgcctgcgcatggccttccttcacgagtcgtcctgcattgaccacagcatcataaaccgatgtctgatatgacataaaaggcatatctgtgatgagcagcgtatcctttatgcctcttgaaacagctgcgctgtgatgaatcatatcctccatagtcactgaaagtgtatcctcatagccaagcaccaccatgccgagagaatctcctactaaaattgcattgattccggcctcatctatgagctttgctgtcgaataatcatatgctgtgagcatcgtgagcttctcgcccttttcctttgcctgtttaaaagttactactgtatttttcattgtccaatccctctgtctttctgcaacaatccgtttcttgtaactacttggaaccattcacggtattgtcagcctcttagcaattccatcatctgagtgtaatccttatcaggattctttttttcagcaatatttactagttttgtaccaagcattttgtacaatctgacatcatcgctatcgtcattttgcatacatgcgatgtgctttttcactgtttcaatatcgtttctctcgattggcccggtcagtgcgccgtcacagcctgcttcgagtacgttttcgatattgcgcatcacaagctggcctgtagctcttacagcctcagcccttgtaaagccgcagtcctccaaaagagaatagcccatgtcaaggacagcaatcacctgattgctcaaaatactagccgctgcatggtattttgcctttttagcgccatcaatgcggcatacctcatttccaatagaacaaaacagcccggatattgcttcaaccgcagcatcctgcccttccactgtgaaaaatgctttatttaattgctcatatgatgaaaatttgttactgaacggtaacattggatgaattgaacagcatgatacactcatgctctcccttccggaaaatgaatcggatgataatgcgccactgcaatgacatataatctgattcgttagagacagctcttttaattgttcccaaaccggtataataaatgaatccggtgtggtgataaatataatctgtgattgatccgccagttgctttagcgaatcaaagctctctgtccttgtaaactccgcagcctccttagccgccgcagaatccacgtcataatagcctgcaagctctatgtcctttgtccttaggtatttacctatagaacagcccactctgcctgcgccgattatgcctattttcatgctaccaccttctttccaagccggtcagaccattccttatctcgcagctgatataatctccgccatgtgccgtatggcagcggtcgatttaccctgtgcgcgcctgtcactttgctgtctgcttcatatctgctacagcaatgtgcttttggcttccttgtgtctgccggatatgctctgtcataaggtgacaacacatcctccatgatacagtttccttcgaataccgttcgaagaaaactataccacattgactattatttaacaatccctattttacctcagtcattttgatatactcatactgcggcttgaaattctctctgtcacagagtttatagtaatgcataaagattctctccatgacatttggaatctgattttcctgtggttcaaatagtatgataagatactgcattgagctgtagcgcgtgcagacatccacctttctgatcttactgcggatagactgttccatgcagtcaagtgccttctcaatttcctcgatatctgcaagctgctccggcagagtgttcatagtcaccatgaccagatagcagttgtggttgtgcctatctcctacattgttcacgaactcatagattcttgcaaactctctgtagtttaaatccaacgcacctgtatagctgccactctcctttaaaagctttgccacgtttcgtaaatccgcactcagatttgtattctccttattgtcagctaagagctgctcatagaagaaatatgaacccttacagttctgcttcacatagtagagcgccttatctgcctttgtgtagtcactttcaaacatggctccctttgtcgtcatgcacagtcctgctgaaagagcggcctcctttatctcacagtctgcttccctggcgctctcgaagccctcaaatatgcgctttataacactctccacgcttgccctgtcagaatatggcataaagatgaggaactcgtcacctccaagcctgcaggctgcaaaggtctcattctcagtctctttagcaaggagattacctataagcttaagtgccctgtctcccgccttgtgaccatgcacatcattgacttttttaagattatccatatctatgaaggcaagacagccatcattatcctgcatcagggctgctattacctgctgtccacgacttcgcatgtaaagtcctgtcagataattaacactatcggctttttcctgactgctcatggtcttcatgacctcagatatgaatttgtctgccactgactcgatagccgcattatcacggtagccctgagccgccggattatcctcatcaatcacaaccatgccattgtcaagcatatcaacaaacatactcgaaatctgcggatcaaactgagtgctgcagttatccaaaagctcccttcggatttcttcatctggcagggcattcctgtaaatcctgcgcgacctcatggcatcatagctgtccgccacacacactatacgggcagaaagcggtatctcctctcccaccagtccgtcaggatagccctttccatcgtagcgctcatgatgattccttgcaatatccaccagatggtctaacagggtaatatcctttaagatatctgcgcccatcacagtatggctctttatggcggcaaactcttcatcagtcagcctggtcggcttatttaatatagtatcaggcacgccaatctttccgatatcatgcagatatgcagcatttctaagattttccacatcatgctcactccagccaagctgctttgctatgagagcagagtactctgcgactctgtatgagtgacctctcatataatcgtcctttgcctcaattgtggcagcaagtgtcttcatcatctgaagggaaactctctctgtctgatttctaagcctgtcactctcttccttctggcgcttgtattctatctcgctgattctttttattgtgactatgatattgacaaacaaaatcacaataaggcctgttccgataaagaaacctgacatagtgacaacaaagtacacagatgcagcctctataagcgccagaacaagtgccacaatcatggcaaccatctcaggtctgtagcccaaagccctgtgtttaattatatcaatgataaatgttgtgatgacgaccacgcagcagacagcaagcattccctgtcctgccggcagagtctctatataatcgcacacaccaaaaagctgcagtgatgtgcagacaatgaaattcacagccgcaagtgcctctatgcatgtatacactcttgtataacgcccgccctgtatgctgtcaatataaatcgaaacagcaataggactaatcagaataaccacaaagcacatagccgccaaaacagatgcattcggcaccagcatctgacgcagctttgattcaccaagcatccatattgccccaagaagcatacaccagcctacatactccatgtcaaaatgtgtcttgtatacaatactgagtgctatactgaacataacagacactacagcagcaaaaaaaatgaaaaatgctataatcgtctctcttgagctattatgaaatatatttgtccatatatcgctcttttctccacagtatactgtatttacaacgcctgaatagttggatgcatggcttgtcagctcaatgcgcagctctttgccggcatcatcctccgacatattgcaaaatacatatctgctcgcggaatccttgccgaagggtctcgtgtcctttgtatcatactctgctctcagactgccatccacgtaaaatctgactgtctgaagtgatgctctgattgccatgacacttgcattgaaatcatcaggcagaacagtagttatgaccatcgtatcccccggcttaacatcgtacctgccgggtacttcaatagcctccctttcaccatcggacttctcccatgtaaagctgccctcgtaggtgatattattatcacttacagactggcttctctcactcggtaatatgcactcggcaattataaatccaacaatcaaaaaggccatcattaaataaaacaatgacctctttgtcctactcacgctgtatctatccatcacttatcctattccgcaaacataaggtctgctttataatagtcaggttttctaatgtcgcagatgggaattcagacacactatgcagtctgctgttcaaccatggtgttgatttccttgctgattttatttacatacatcatgattactacacctgcagcaaaaatcactaccgtgacaataattccaactgctgaaaagcacagctgacttaagtatcctataaacggagtctttgcgataacctgccctttaactaccttatatgatacaccatttccatcacgaagtgcaatctcttttgcagaagaatcattagaatctacataataagaatcaacccttctggctgatgaatcagctgattcgatggctactatattgccatccttataagtggcctcgtcaatagtctttaaatataccacactgccatactttgagatatttcctgtgtgatctgtgcccgaaagatatgtatgatagccaaatatcggtggaagcacaaccggaagcactgtaagaagtgccacgatcacaagcacatagcccagtattgtaagccctgtccttttaccctttttctcgtctactgtctgattgttgttagtgtttttactcatattaagctcctttctgttcataaaccctgtattactacaaatggagtatttccatgtagtctgttgcatcagccgctacagcagcctttttctgcatggcaagcgcctcatcaatgagatgcggcatagccagtgtcaggttgagtgcctccgccatatcagcgtactcgctctccttaaatgtattcgtgtctgcggtgtaatatgcgttgtgcatggtctcctcatagcccactataagcatgttgtttaagaaagctctgtgaaccgcatccactatctcaccctcgtgattgatatcgaggtagaaatcacacttctcaaaaagactatccagcacggacatcttcacattagggtagagtgacacattgtcatactgccctgccgacataagcttcgacgacatctctgtgatggccgccacatgaaaatgcatctgcggcatgagtgacgcaagctctgtcagatgccccacattctctgaattggtacatacaagtatgtgcggcctgtgcttattttccctgacgaagctgtagatatatccaagctgcttcaccttatcagaaggagcgccaagtgctataagcctgtcgtaggactccctgcgcgacacaaatacgcgctttgccctcgttccctgatcatgcagtataatctgcatattgtctggtatctcatcacccaccggctcgtgccagaagagtgcgtcgcgaaagccgtttggcgcaagcgcctgtgatgcaaaaaacggatatgacagcgagttgaaataaaccgctgtatcctccagccctgcgcacctgatgaaaaacgctataaagtctgtcttacttctgaaaatccagtccttatcctgccatctgacgagtatatcaccggtgacaaagttttccactatcatctccctgcccgtcacatcaaaaaacttcctgagtgccttctgtccctttttattaaaaaccgtgtgacagaaaatcgcgccatacctgttataatgctctgaaagcctgacctgaccggcatcatcaagccagtcaacaatcttaacctgccgcctgtgcgtaggctccgtgaaaaatatcctcgctcgctccctggtacggtccatgaccttcgcagatgaattatctccctctatgcgccagtaatcaggaatctgtatctgattgaaatacagcggcttccccggtaagctgtcagcctcccggtaatcgcctaagaaaaatccatacacgctcatcacatcatctgtcaggaaaccgtcatcctcaatgactgctgcatgaaaggcagcaccggcattcttaaatgactcaaggagattcttgctctcgcctgaaaatgtatcaaagagcagtgtgataccatccgccgtgtttgttacttcaacagctctatccatctgtgaaccacctccttagtcagatattctttggccttctcatatgaatgtgctgaaaatgcatccatatcatcctctgtaaacatcctcactatacgctcagaaagaagctttatcttctccttctgatccatctcatcggtgattggaatcctgtagccgttttgcccatcatcgataaaggtctggttgccatacctcacatcaaagcccactataggaagccctgagcctatggcctccatgagtgtgagcccgaagccctcactctgtgaagctgccacatacgcatcatagtgcttgtatacatcatctaatttctgttgtcccatcaaatgcacataatcggcacagcccagcctgccgataagccccttaagcttcgcctcatcgccaccctttccatatatatcaagtgaaatgtcaggcacgctttcttttgcctttacaacggcctccaccagccagtcacagtgcttctcagtcgcaagacgcgacgcagtgatgagtgagtgcctctttcttggctcatccggatatttaagctcatcaagactgcccaccggaatagtcaccacatgaggctcttttccacagtacttcttaaactgctgcctcataagctcattctgcgcatccgtcgctgtgatgtagaaatctatgtgctcagtctgagaaaatgaatactcataatagttgttccacagtatgtaatcatcatcagtgcctccctcgctgaaatggtccgcatgcaccactattcctacgcgcgccggtccacagttttcgaggattgcctgacctatgcctgtcgtcctgtcgatgatcaccacatcatcagccgttaagttaagcctctttaccatatagccgaccaggtcagccttggtataaagcacctgcgctccgatcctgtaaaaggtgctgtcatcctctatgacctcctcgtagcacaccgaaccatcctcattgaaaaatgtcctgccgtacagatgagccttgccgtcaagcggagcatagtactcgctaaaggtcctgcaataggtgtagaaatctttcctgatcaggcatccgtttgatacaatctcgactctgtgcacgagatcacttgtatcatctaccatgtagcaggtgtagaacctgccgctctccttaaactgatacctgcacgtcttgccctctctggaaaaggtataatcctcctctgccatcgtagcctcaagctcctttagcgtaaaggtgacaggcgatgtcctcacatctgtaaaaaatgtgtacagccatatcacttcctcatccaaaaagcctatatttcttgtcatgtgctctatattttctgttggaaacatatctgtgaaaacaaaccttgccggaatgtgcgccctgcggagcagattagccctgtagctctgtgcgtactccacgccgcttgaagcccagcctattccgagattgaagttatataccatatgattctcctcgtatctgtcaaactatttaaattataataacctttaagggtagatgacctgtagcctgccatccttgccgattttcacatcactaagcaaaatattccttatgatattacattttaccgctttttctgtatccaaaaacgactcgaaagcctcattttggtattcaaacataacatttctctgtgcagatgctcttcccgctaccgcatacttgagctgctcaaggtagtcaatcagctcaacccagccatcatccaccgcctttagagttgcctcacgtacaaactgctcgtaagtctcctcatcgcctatgcgctcacgctgtcttgaaagcccctgatacacgcgaagcatcaggtaatcgctaacagtggcggcgctttccatgtcagaccttgacaggccggtatccagcttgtaggagatgttgtcaagaatgtatctgttaagcattgatgtgtattgctgtgtattggtatttttatcgctatctttctttctgccacggcgcctgccatgcttcttattactctgtatgcagtcaaaatgattaacgaagtctgagatattctccttcgcaatccctactatcttctcctgctcgacgcttgcgccgtcgagcaggttttttctggttgcgtagattaggtctcgctggcgctggaggacctggtcatactgcagtgatttcttgcggttcatctcctcagactccacactaagcttctgacactggttgacaatacgctttatttttcgctttccaatacgctttttgccatcaatatagcgctgcagcttgtcatcatcctcagctcccactatgtcatcctccaggctcacatagtactggctgaagcccggatcaccctgtctgccggcgcggcccctcgcctgcctctcggatcttgaattgttcatccttcctatacctatgacagctaagccgccaagctccttcactccgtctccgagctttatatctgttcctcttcctgccatcgttgtagcaaccgtgaccgcattcatttggcctgcgcctgcgataatctgtgcttcccagaaagcattgcttgcgtttagtacattgtgcgggatatttttctctattaaaagccttgaaaaaagatctgtatccgtaacggaattaagcaccacaagcaccggctggcctgtctcgtgaagccttatcacatcatccactgctgtccagaactgatcatgaccgtttttaaagtatctgtccttcctgtcgactcttttaagagacctgtttgtaggtattttcaccacatgcttgccgtaggtctcaaaaagctcatcctttgcatccataagtgtgccgctcatgcctgccatcttgtcaaacatcataaacagattctggaaggtaacggatgccacagttctgtattcctgcgatatctccaccttttcctttgcctctatagcctgatgctgaccgccacgcagcttgacaccgtgcatgagacggcctgtcgctccatcaaacagctctacctctttcttgtcagtaacaacataatcctttttgttcttcaaaagcttgtgcgcccgaagagaaagcgtgacatgcctgtttatctcaaaattctctttaccgtagaaattggatatgccaaagaagctctcggcaaacttaacaccctttggagtgagccagacggccttatcctcctctatgtagtctatatcctccacaagtgtcgtgacgaaaaaatcacatacatcatacaggttcgactgcactctcggcactcccgatatgacgagcggcataattgcagagtctagcagcaccgaatcagcctcgtcaattatgacatagtggaaatcacagagaaatctgtcctcctttttctttaccagattgtcaaaaaggaaatcaaagccaagtgtgccatttgtggtatatatgatatcagccgaataaaactgtcttttctcgtcatcatcctgcttttttgtatcatccgcatccgggtatgagcagctaagacccatgaaattatagacctctcccatctctgcaccatctcgcgatgccagatactcgtttgtggtcacgagcatacagctcttgccggtcagcgcattcagataaagcggcatcgtggcagatagagtctttccctcacctgtattcatctcggcgagatatccaccgtgaagagctgctgccgctaagatttgcacatcatacggtctctttccaagcaccctgtaatccgcctcgcagatagctgcaaaggcctccggcataagcgattcaagcgattccccatcgctatacctgctcttaaactgctctgtcagtgcagaaagctcttcatcacttagattttttattttttcttcgctttttcttacttttgttagagtcctctttaagtctctcaattctttcctgctctgcatcaaactcttcctctgaaacctctttaatcaccagtgatttgaatgtaaaatcagcatttccaccatttatcagctctatcctgtagctgtaggtcctgatggacggcttgaaaaacgcctttttatcgcggacaataatactctgcgcctgtacatcatacctgtcaaaaaatatgatacgaagcatcagtgcctcactctcactgttgtgatagtcaatattcaccgcaatggaatatgcccgctctccatcgatgagcggaagcgacggctctatcctattcccctggaaattcgtcatagaataccatgtgtgaatcaccgtgcccggcggcatgaggcggttcttataagaaactgaaccatcctcattaaattcaatttttgatccatatacatacgagtccgatagaaattccttccagcggacctgccatgtgtcaccatacataatacttacctgtcttactattgttcacttaatatttgttttcctgttactgttcacacctaactgtgtgacctgcaacgtttatttgcttatcttgaaaaatcatcatgcagcagattattgtactggctcttgaaccatgccatgacatttgatgaattgtcagtatgtctgccgtgtgagcccttgccatacacctcaacaccgctcgacttaagatgcgacaaaatgctcggataaccatccgggtcgtaatcatcctcatacagatatgagatgatgaactttgtttgcgaccagtcggcactgtcgaatctgtcccacatcctgttgttgagctgctctatcgcctcgtcagagagattgtcataatttttcatcagaatatcaagcgaggtagcgaagcctccggctctaaggattcgctcgtttcgtgctacatttcccatgttggcaagcggctttgcaagaagcagtgcatgcggtgaaagctttgagccatagtatagtgaaccgaaggttcccatcgaagctcctgagagcacgagctcatcctttgtaagaccaagctcatcgagcttatcagtcacataatccgtaatcatctgctcaaattcactgtctcccagataaaaggctccaccctcacttcttgggtctgtcacaagaataaacggacatccgaagcctcgcatcatatagtagccctcaaagccctcctgagtcctgtagcctgagaaatagacagcaagcggtggcttcatatcgcccttctcaaagtatacaaacacttcctctcctttagaagagacaagcctctcacctccgggcaggaaaaatccgtgtccacggcgggaatgtctgtcgtgcaatgatatgatattcaggctgccggtgccccttgcaagtatagaaacaaaaacaggaccctgatctgattcattatctattctgaaaacatcctgaagctgttcctcgtcaaactcccagacctgcttaatatcaccaatcgagccatagtagaactgaaataatctaagcttaatctctacatccccagttttctcatattcaagatacatatcaatacactgtccctcaaaaaccgggatattatatctccagtatgcaatctgcgaaaaatcctccccaaactctccatctagaaccaagttatagtttccatcacatgctacccttcctgtaaaggaatcactgacagcaagcttggcaggattaaacttctcaccataaggatttggatagtaatttctcacctcatgagccagaaaatactgcacatcgccggtatacagatactgtcccattcgtgccttgaaatatctgctcgtcgcgctgtttagcatctgcacattttccgttgcaaaaagacagtagccccttgtaaacttcgtaaaagccttttcctctgagagtgttatatccctgtcaagaataactaaatccatgagctttctcgcaggtctgtttgccgttagttcactctcatcagactcgtatacttcaaactctatattgtccggaatgctgtatttagttgtccaatcgtcatcgccaacatataaaacatgaatcttactcactaaaatttagcacctttctccacttcttaagcagcaccgatgtggtatatttctgaccaagctcatagcactccaccaatgcctgattccagttttcaaagctgtccagataataggtcagactccttccgatatcagaaaaatcatctatgaccattccgttttttcctgaaacaagaaactggtctgcactcaggctgattctcggcacgcccttgctgatagctgtaacataaacaaaaacatccatcgtgcctctcatatcgaggatgactctctgctcgttgatacacttgctgatatcacgctcatccacacatacatccacgaaaaatctctgctccaccgttttttctatatcccccagctcattctcggcaaatacatcagccccgctgcctccaaagccgagagctgcctcaccatcgcctgttaccaaacgggaatcatagcccatactatcaagaagctttaccgtatcattctttatagcatcctcatgaccccatgaggcatctcttgtaaagaaatgaactctcgcaaggtcattaatggtcagataatccgcaagcccctttataatctgagcaaatgcatccttagtcagtccatcaaccggcacgaggatgttctgcacccgaagctgcgagctgataccgaaatccatcctggtatcatatggtggaatatctgtgatatgtaatctgaacggcttgttatttactgcacccagatttgccataataatcttcgtcgtataatcagaatccgtaatgatattttccgcatgctctaaaaaatccgctgccagtgatgtctgcgtgaaatcaaatctgttttcaaaaaatgtagcaataacccttttccccttaagcacatgctctgcaaccctgatatgaagcggatgcatcgccacgaaaaagttgtcattttgccttgtgagattcacatagcttgcaaatacctcttcgataaccgcctcgaggctgtcatattcagcctttgtaaagcgcatctcaaccggctcacctgctttgccgctcttggcatcaggcaccacatcataattagggcatgtctgattgataatcacgtgaccattattcttatactcacgtatcttccagatgccgttttccatcaaaaaatcctgatactgctctatgccgttttcatatataacagtactggaaacaaagcctctgtcatcataatagttgcgcctgcagattttgccatcctcaaacatatctatggatatcggattgccatcctcaccaaactctacctgtgcatacttcacatcgccctgcaaagcgattatagaaaaaggcgaatacacaaactccagccccttcggccacttgatatcgtgatatgacagcacagcgaccttctttctcctgacctgtgctatcgcatcaaagcatgaccagtactttgagcggtacatgccctgcctgtgtaggaaatgtctgaaatttggcgagtatccgagcacaagaatcctgtaaggtctgtccacatttctatgaaaaagagtaatctgctttatagtctcgtcaaactctgacttgagcctgcgcatataccactgctgctcgttttcgcaccacatattctgtttataccatgccggtataaaatatagcattatgattcctcctaattcttaattcaaagcgccgggagctatatgaatgtatgatatctgtccatattccggtacacctctgcctcgcggtacagcgaaatccaaagacctgtcgtcatcatgatagagcacggcagcatagcaagtgatgcgtccacatatcctccaaactgtaaaaacagcggtccaccctgacatatacagataatgattgagcttataacggaaaagctgagcactgtgccaatcagatatctcttcgtaggctttcctgcatatatatcctgtatagaatcacccgacttaagcagatcatctgctgtcctgcccggagacagcataaccatagaaaagataattgtaagcagacatataatcaccatgtatactacaattccaagcggtgatgtgagcctcatattgtccatccaccactgaatatcagcattgtccggaaacagataatgaagtccattgcacataaactgtggaagcaaaaaagcggctgacgcaaacataagtggcgtagcaccgacaggattgagcttgtaagcgatatagttcttatccgcataaatattgtttatggaaactctctgtactgctattcgcttctcagtggtctcaagtactatcatgacagcaatctctgccacgcctatagctacaggcagtgtcagcttctcaagcggctttcctgtaaacatggtcatcataccactgactatattgaccatgaacacactcaccttgccaccgataccatacctggtagctctgtcgcacatatacaccactatcagcatacccgcgatgagctgtatgaaaactattatcttattccatataagttcatatccactaactctatacataagtgtctgtgttttgtgatatgcctgaaccgccgctataatcatcatgatggtaactgtccatatgtttatcttcttcggtgacagctttctggtgtggtcaagcgatatgattgcaactatcagtatggcaagcatggatgccagcatgtacggccacaagcctatgatgaaaatggaacagttcttcatatcacctgaaatagcctgtaaaagtatggactgcgcatctacatttacattgctatatgcatctatatctatcccgtagagtggtatatttctgcctaccatgtacacgagcatggtcatgaacgaatataaaagcttatataataatacgtgttccttctgttgtttttgttttttcttctttatactatccttctgcttcaaggaattcacctttcctcacaaagtaatttcgtcttactacaaaacagcttaacaaattagtgaccatccgctacagatggtcactaatattataaaacaatattgttagtattgctattaattatttatttctcatcagaattatcttctgaatcgtcgctctttgcaggttttcttctgcggttgtcataaacaccctttcctgtgatagctgcaactgctgctgcaatccaccaccaccatgttttgataccgtccttggctgttccgcctgctgcaagaggtgtatcctcatcctcgatgttctgaagattatcttcatcctcatttactccaagtggaacctgtgcatcctgaattggtgtattcggtactgccggtgccgcaggagctgctggtgctggtgctgccggaggtgtagctgctgcaagaggtgtagcaaccggtgtgatagttgttgcaggtgcaggagcattgtctactgccggtgctggtgcaggagccggtgtcggtaccacatttgcagctgactgactctgactcgtacttgtgcttgtgctgatgctctcgcttgtgctgagtgactcacttgcactggttgattcactctcacttgctgatgtgctctctgactcacttgcgctggttgaggcactctcgcttgctgatgtgcttgcacttgtcgatgcgctagtacttgccgatgtacttgcacttgttgatgcacttgtgcttgctgatgtacttgcacttgtcgatgcgctggtgcttgccgatgtacttgcactcgttgatgcactcgtactagctgatgtacttgcacttgttgaggcgctggtacttgccgatgtacttgcacttgttgatgcacttgtgcttgccgatgtacttgcacttgtcgatgcactggtgcttgctgaggtacttgcgctggtcgaagcactgatactagctgatgtacttgcacttgtgcttgctgaggtgcttgcgctggttgaggcgctcgtacttgctgatgtacttgcacttgtcgatgcactagtactagccgatgtgcttgcacttgttgaggcacttgtacttgccgatgtacttgcacttattgaggcactggtgctcgctgatgtacttgnnnnnnnnnnnnnnnnnnnnnnnnnnnnnnnnnnnnnnnnnnnnnnnnnnnnnnnnnnnnnnnnnnnnnnnnnnnnnnnnnnnnnnnnnnnnnnnnnnnnttgaggcactggtgctcgctgatgtacttgcacttgttgaggcacttgtacttgcgcttgttgatgcacttgttgaagcacttgtgcttgcacttgtcgatgcactagtactagccgatgtacttgcacttattgaggcactggtgctcgctgatgtacttgcactagttgatgcgctggtacttgccgatgtacttgcacttattgaggcactggtgctcgctgatgtacttgcacttgttgaggcacttgtacttgccgatgtacttgcacttgttgaggcactggtacttgctgaggtgcttgcacttgtcgatgcgctggtacttgccgatgtacttgcgcttgttgaggcacttgtgcttgctgaggtgcttgctgaggtacttgcacttgttgaggcactggtacttgctgaggtgcttgcacttgtcgatgcactagtacttgccgatgtacttgcacttgttgaagcacttgtgcttgctgaggtacttgcacttattgaggcacttgtgcttgctgaggtgcttgcacttgttgatgcacttgtacttgccgatgtgcttgcgctggttgaggcacttgtgctggcactcgttgaggcgctagtacttgccgaggcgctcgtgctggctgatgtacttgcacttgttgatgcgctagttgaagcacttgttgaggcgctagtacttgccgaggtgcttgcgctggttgaggcacttgtacttgctgatgtgcttgcacttgttgatgcgctggtacttgccgatgtgcttgcacttgttgaggcacttgtacttgccgatgtgcttgcacttgttgaggcacttgtacttgccgaggtgcttgcgctggttgaggcgctcgtactagctgaggtacttgctgaggtacttgcgcttgtcgatgcactagtgcttgccgatgtacttgcactggttgatgcactggttgatgcgctggtacttgccgatgtgcttgcacttgttgaggcgcttgtacttgccgaggtgcttgcgctggttgaggcgctcgtactagctgaggtacttgctgaggtacttgcgcttgtcgatgcactagtgcttgccgatgtacttgcactggttgatgcgctggtgctagctgaggtgcttgcactcgttgaggcactcgtgcttgctgatgtacttgcgcttgttgaagcacttgtacttgcgctggttgaggcactggtgctggctgaggtgcttgcgctggttgaggcgctcgtactagctgaggtgcttgcactggttgaggcgctggtacttgctgaggtgcttgcactggttgaggcacttgtacttgccgatgtgcttgcgctggttgaggcactggtgctggctgaggtacttgcgctggttgatgcactggtacttgccgatgtacttgcactcgttgatacactcgtgcttgctgatgtacttacacttgttgatgcacttgtacttgctgaggtacttgcacttgttgatgcgcttgtgctggctgaggtacttgcgcttgttgatgcactggtacttgctgaggtgcttgcactggttgaggcgctagtacttgctgaggtacttgcacttgttgatgcacttgtgctagccgatgtacttgcactggttgaggcactagtgcttgctgatgtgcttgcacttgttgatgcgctagtacttgccgatgtgcttgcgctggttgaggcacttgtacttgccgatgtacttgcactggttgaggcacttgtactagctgatgtacttgcacttgttgaagcactggtgcttgctgaggtacttgcgctgattgatgcacttgtacttgctgatgtgcttgcacttgttgatgcgcttgtgctggctgaggtacttgcgctggttgatgcacttgtacttgctgatgtgcttgcacttgttgaggcacttgtacttgctgaggtacttgcacttgttgaggcactggtgctagccgatgtacttgcacttattgatgcgctggttgatgcactcgtacttgctgatgtgcttgcacttgttgatgcgcttgtgcttgcttcaacactcaaactctctgatattcttactgattcactcttctcatagtttggatctgcatcatccagtaaatcaatggaatccccatgcttatatgcgtatttatacgtatgtactccacccgtactactacttctaaattctacccattcattatcagacacttttaatacaaacgcatttccgtcacatatatacaattcgcctgttttagaataactttgcttattatgtccccgccctgttgtccaattaaatgtaacagaatcaaaatcattaaaatattcatacttacctgtatatgaattagctactctatactggcatgatccattctcccaaaaccacgcccatatatcacctttagattgaatatcagatccagctaaatctttaaaattacttgccgtaatcttagtcacatgatgtacctgatctgatacacaatcatctctatttgtatcattacttgcaagctgtggcattccactcattcgagcataaacagccatatcctgttctgcatcatctgtgtatgcagccgctacaacattatcaccactctgctgttctgcatcactctgcttcgcactttcgctggcgcttgaactttcacttacactcacgctctcgctagtgctctctgaagcgctttcactcatgctctgtgttgtactctcgctatactctgtacgttcgctctcagacaaagagcctgcgtcaactaatgaattggaatctgctgccgattcattaattgcagccataaccatatcagcaccctggatagagctgactccacccatggcaattcctgctgcggttataccttttaaaatactgtcaaccttcttcttattcatatagtctctccttattcacatgaatccggatacttgattatctgtttcctaatcctctttcatccggacataactatagttttcctctttaacactataaatataaactcctaggtgtatctaaaatcgtataaaaacatttatataccgccaaattatagcctttctccacacataatcaaggtatccagcaataattttctggtatatattccatttatgaacaaattttgcagttttttgacatttgcgtagtattgactcaatttatcttccgattctgatacagctatccggtatacatcttcaaaatctgtcgctgctgctcctatttcattatctgtcacatacttttcacagctcaacccctttttaactatcactgggattccggcagccatataaagtccaagcgcctgctcatccgcatcccaaatcaatccaaagcctccgtctgacaacctgagtatagattccatggcacggtactcatcatattgcaccacctctatattcaaattgttcaatggatattcattttgactcgtttccgccatgatatatagttttttatttttatgctcatttgcgcaaatgtctgtcatataatccggtatattctgaatcagataaggtttttcttttaatccatttgcgatatagtaatcccgcagcgcagctgaggcaaaaataaacatatcagccctgttaagcagcgtgatttcatcactcaaagaatactcactgtcatctctatcgaatgctatttcctgtataaacgcaacaatttttgttccatgatatcttcttaaatgctcaaataaaaatccatcgtatctgggactctctccgcttggatgctgaaaaatcactatatcctccggacaaagtgatgcgattatgccatccatcctaacatgaagctcatcatcactatcatatgcatcaggaaatttaaataaactcatttctttaaagccaagtgtttcaccagcgtttttcactgcattttgacggagaccaatcaatccgcctatgttataagtttttgtaatatgtacgctcataatctcttccccattattccactgtagcaactatctgtgattcatacacctgatcatggtcaaatactatatcctgtcactgttgatttgtctgctaaatctatatatgatcttgatatctgttttcaaccggtgtacaggcattttccaaaacctcaattattgcatcctgaagtgtttttcttgtatatgcgccatctaatatcagcttttgaatattcttcacattatggtaaagctttatatactctgcatccgtaatactctgaaccagtttatcagcttcatccaacgtatcgactgcatatcccagaccgtttctttcgacaaatttatcatgaacacagcctctttttactataactggtatccctgctgccagatttgtaccgagcttgtacggctgattcatcgaataatatctgtcaaaatattcgtcatcactccaaacaagcccaaagccacctttggaaagctcatgcattagcttttcctgctcaaaataccctctccagcaaaagctgtcatcattttctctgtccggcttatttgcatcatattgataaatcggtgtcttgccatggtactctgccagaaacggaaaacgattatagttcccggcaaagtgaaagcatctcgttacagcatgatccacaaaacaaatgtctgatggcatatcccagatagtctgatagataacaggcttctcatcaagcccattttctttcagatagcgatgcatcttctttgatggcaaaataagtaaatccgccttattgagagttttaatttccatatcaagaattgcctgctcagaatcaaacatgagcttttgtatatcctgaacaaaaattatcagctttgtatcccggtacgactttatcttgtttacaaagctctcatcataattcaccccaatccagcttggatactgaaaaatcacaatatcaccatagttaagaggcgctattatcccatcaagacgtttgtctatctcctttgcatagtctggctttaaaggataaaaagacaagcccatttcatgacagccaatactctgcgccacctttaatactcttctatgtgccagactggcagttcctgccatgttgtttaatgtagtaatgtgtgttttcattgatactcctgtctacaagcctgttgtttcattgatgttttccaacatttttctctcatactcaagccaataatccttaggatgttttaccttcatgttactgcatttctctataaaattaagtttgacggattgagctatggtatattttttataagctgcatccattttgattctattacatgctccttatattcttcagcaatcatataagaattttcatggaatttcttcaatctgtcatcatcctcaaatattttaactattgctgctgcagttctttcacagagcttatctttattttgatagtctgtttcaatatcaaaatccaccagatagccattttcatccggatgtataaaaagcctgttcccatatcttacatccagtccaaccatggctagtccgtctccaacagcctccatgagtgaaagtccaaatgtttcccacaaagaaaaggatgcaaacaattcatagtgtggataaatcttttcaagattacagcgccctttaaagtgaatataatcatcagcaccagcatctttaactatattttgtaaatatgaagtatactcatcattgccacttccgtatatatccagattaattgtctgatttatctcatgagcttttatcacacttttaataagaatatcaatacctttccttggactaagtcttgaagcagatattatactgccttgccaacgattatttttacttttaagtttgccttctggtatggcgcccggtggaatagctgcaatatgcggaacaaaacaatcatactcttttaaaaatgcttccagacttcttttatgttcatccgtaccaacaacaaaataatctattgcctctgaatatttgaaccaataataatactcatagttcatgtataatgagctttcatcctcatatattttgtaaaaatgatctgaatgtaatacagctatcagctttgatttgcctttattttcaaaaagaggctgtatataatcaagatatcccgctctatccattatacatatatcattctcacaaagattaagtgtctttacaaatctttctagaaactctacattgtctataacttcaccatttttaaacagatattcaacattatctttatagatacattgttcataaaccatctgtccttgtttgttccaaaaaattctccttcctagatttaagccatcgttcgaatcattatcccaattatacagctctgtatatgacaaactgtctgtataataattttctaaatacttttttccgtttttaaagagactttcatttataacaaatccatcttcatcgcataatatttcaactgatttttcaccggaattatatagacgaatcacctttccatcctcatctatattgtcatactcatagttttctttttcattttctaaaagagcttcttttttcacagacaaactcatatctaatcttccggtcataaaaagatgtgcagacataatctgaccacgttttattttttgcgaaccatacagttccatatccctaattgtcggcagctctgtaaaaataaatttagcgtttacattgttttttgcaaacaatcttgctctaaatccctgagcaacatcgactccggaaaattcatatccactaagtaatgtaaaatcaaatactctcatctgtatcacccataactacttttgcagctaattgttttaattgcttcttttgcctgtctatatattcattgaatatcgtctgactagttattatattttttagagtttctttcatcttcacatagttgctgctttcaaaaatatttcccattggatataattcttttgaatgcgctgtattgtcaaacgctagtattatcatattattaaccattgcctcgtttactgcattgtatagctctctgtaatgattaatatccaaataaatatcgcatctttcaaacagttcttttctcttttgttccgtaatacatggatataactcaacattattatttatatccagtctcgttaatttatctgacataatggtactggcagctatatgaaaagttatttccggaaagtcatttataagctgttcaatatactcaagctgatccgattctgtaatagtaagtgcttccttttttccaaattttaattcattattttcaaaatatgaatatactctgtcgcatttataatttgaattttctttataccaattgacctgctgctcttcactgcacagtattcgaaacgctgtgttagtctgagttattactgtcaaatctgagtttaatctattttgtggcaggtatgatattttaaaattaccataatcccaggcaaatttatttaatatctcatcacttgtcagccatatattttcatcataaattttattatatttaagataagcttccaaataatcagcaaagcctctatagctcttcggactaatgcgggtgccaaacgtggtatatgtctttggacctgtctgttctaatactttaatgtcaccatttctatcatagaattccctgactgtaacattgccgccactcacattctccgaacaatacatatatccgtatttgttgtaataatctattctatatactgtattattcctgtcaatccactcgactctgctgaccattcttttctctatcggattcttaaaatagatgtttgcctttttggttttattatcatatatagcaccatttagaccatctgcacgaacactccaatattgagggatatctatgaatgcataatacctgtctttttccttaagcacatcgtttttttcagatatgccacaaaacaaatctatggcttctattgttttgcattctttaaatcccatattttctgccagctctattatatttttctcaaacttacctaattcatcagtaataaaaatcatagggcaaacccaccctctgtataatgtaaaaacctctgtgttataaaataattctcgccattttctaatccggcatttgcaagtatttctaatccattactatcgtccgcatccgctgaaactatatagaccgtattatcatcacagataatctcattctcctttaaatgctcatgccattcacagctatcgaattttctatttaatagcctcattgcattccttatagagctattctctccaccatagaatacgagtcgtatattgttttgagtagctttttttagcagcttctccagcatagctgttctatccacaattctgcccatagaattacacaataagccatcctccatctgctctccccatggggttctcagtattgtgaaatagtaggctctgtcaatttcattatttgtatgcagcatcaacagggttgcagcataatgatatatttttttctctgctttctcattattttttcttgcctcatcaataaaataattccatttttcatctatcaataaggtttttccgctgaatatggcatttaaagcatcctggtcaggaagccatgtccgtggattatcgttcagataatctataacctgttgaaacaggcttccatttttcctgatattgtcaagattcatgcaaagaacacccgcattaaaatatctgtcacgacttgtctgccctgctgctacagcgtatggagttccccaatttcttattgtcgaacaatcctgagcagccgccagacagtaattatctatatttaggttccataattcttcaatatctgtatttacaaataaatcagagtccaaatatattattttttttaaatccggcataatatcgggcaacataattctgaacattgttccaattgcaaatctattcattgaatcagcaaacgtgccaaaaacgtccgaattaaaatgatgaaattctatatcatttccactattatcagcaataagactcagcttatttttatttatttcgttcaatgtgtcatcatgtaatatatgaaaaactattggcgcttttgtgttttcaacaatggattgcatcgttgttccagcccagacactgtaatttccatccttatcatgtataccaagacagatatgcattgcattatccaaaaagtatgcattatccatttttttcgcagttactctcagccttgacattcttttcaataccacatcatctgaaaaaaacttcacatatggattattaaatatatccggttcactctttaaaaactcttctttgcaaatatccagttccctattcataaaggtttctattctactatatggctcaatatattggtgccataacaaaaatgtctggatttcacaataacactgctcaattacatttcccagttctgcttttctactttgaatagcctgccttatatgatccataataatcttagcatcccggatctttgcattgctaatttcagaacgtataatgccctctgtattctcaaagtaatagtataatgtcgattgcaccttacaatatttctttgcaagtaacacacaaagcatagaaaaatgtgtatcctcataatatacatcttctataaatcttagattatgttctattataaatttggttgagtatagctttgcccatgctgttacattagtaaatccggtcagacctataatgagatttttcctattatcaacattatccaaatcaagcctttgaatttcaaaatcatttacttctaatacatttggcttatctgctttaaatcacgatacaccacactgtgccacatcataatcgtcctctgtcattctgtcatacagcaccctgagcatatccggatgcacataatcgtccgcatccacaaatgtgatatatttgccggtgcagatatccattcccagattacgtgcaccgccacactttccttttttctgtattttaagagatataacattctccgggtattgtctttgtaaggattctaatatagaccatgtattgtctgttgataaatcatctatgagtatcacttcgagattttcaaagccatatgtctggctgtaaattgaatcaaagcatctcataatgtatttttgtacattgtagcatggaataattactgatatcttgtctttaccattcataacattttctccataatatataaaataatcaaattagtacttcctctaatcgtgtaaaatcaccttgtagcttttccaacctatttgtactatttcctttacaactcacaaactatactgttcacatgacatttctctgcggctctcggatttttctttgcgaactggcggttgattctctttttcactatctcgcagtcctcacgcttgattccgatgagcatgataagaaactgcacctttccatacgaggtatatatgtcactgtagcggattgattcaccaacgcacttcttaagctgccttgaatacttgttcatctttgtctcgctctgtacctgtctgccttcctcgtcctccagagtacagagcatgagatatacaggtacccttgtgcgcttcataatacggatggacgcctggtatattcctttgaataccggatagctgcaaaaatatccgcctctttcagtttcctcctgctcgttcatgccctcctggatgttttccagtatctcatgtgcatgattcatctgattactgtatttctcaagtatttccaagagtcttgaagatggataaataccgcactccctgagataatagtccacgacatccgtgtataactcttccgcctcatcatagcgcctggtctctaccatcgcctccatgatgagctcctcccactcattgaacgggtcgacctttgccgcatatactccgatcttctccagtcccttgaattgttttctctttcgcagtatgtacgcagcttcatttatgattttctcaaacatggtgtgatagcgtctggcctcctgtgctatccacgtctcgcctgtatatgccaccaaaaactctcccttgtacagatatagtgcttttacgtacagctcaagcatattgtcttctatttcctttatccgctcatcacacactgtctctgcactctctgattcctgtggcatctgcttttccagtgcacaggcctcgttatagagcttctcaaactctgctgcatcctcttctatctctatatccggtgtccagtaatatatgcctccctccaaatatatgaggttctttcccggcagtccgagctgtgcgagcttttgctttgtcttgtatacaataactcttagtgccgtgtgaggtgcatctatgtcacgctcaccgattactatttcctcgagcttatcctttgctattccgcagtcagaatagtgtatcaaagcctgcatcatgcggttgaactggctttccttatgcattttttccgccacaaatggtgccccgttatagtccattctgaaattgccaaacatctgtaccttgattttatgcgtcataggtgcctctcttcccgagttttataaacctgcttattatagaattcatattatcattgactcatatattcagctagtttttaactaaacaaattaatctaattatcattatacatcaattccgcgcatggcaataacaacgacaatttacacaaaaagtgtcaaaactcgtacttgacaaatcgtaagatatatgatagctattcaaagccagaaataaaaaaagatcctgcaagaaaatctcacaggatccggcttttcagatatattaaattagaaaatagcatttacaattgttgaaccaatggctgttgcaaggaatgccagtccacacacgagtggaagcttgttgtcatcctcttctattgcccttactccaaagaatatgcttacatatcctactactcccgcaaatgtatgcagccagctgctcacattgccaaagaactggaacgggattatgtcaatgattgctgccaccaggataatcggaaggtatactgcatcatacagacatgctgctgaaagtgtctgtgcaaatgtcacctttttatccttctgcactgcgtttaatacaaccagaatgactgctgccaggatgagtacttttactgcctctcctacgattcctgagaagattccctcaaagaagctcgccgggtaaaatgagaatccaaagccgcctatgctgccaattacacttgataacagatatactacagacagcactacttctactatggcaaataagccaataaatataaagcctgatgccatatttgcattctttacaaagtctgctgcagcctgtgccggcttcttaacaagacccttgtagaatgtaatgatagatgccacattcttgtcattctgcagctgctgtcctgctgcactcacctgctgtgtgaagttatcaaacgcctgcgactgtgcgctgccctgtggttgtccattaaactgtccctgtggttgtccattgaactgtccctgtggctgtccgttgaactgtgcctgtgcgctgccctgcggctgtccgttaaactgtccctgctgtgctgcattatctgcctgtgcattgttgtcctgtgtctgatttggtgcctgtggctgtgcctgctgacgacatgtgcatacctcatcatcagctaactgcctgccacaatttgtacagtatttcataactgaaacctccttaaaataattaataaactgctgataattatattagcatttcggatatttaatagcaatatttatttgatatttatttgatatttatttcatattatattatgattatttataatcattcacattctacagaggaataaacatgccacaaacacttaatatagctgtatgcgaggacgaagctgcagagaccgtgctgctttgtgatattctcaaccacagcgatatccaaaatacatacactgtctttacggatgcagattcttttcttgcctcatatgagtacggaaagtatgacctgctgctcatggatatatacatgaaagattccatgaccggcatagaggcagtctccataatccgcgagacagatgccgatatcccggttgctttcatcacgacaagcacggagcatgccttggaaagctacaggctgtctgccatcggatatatcgaaaagccggtttctgcagctgagctaagtaacattcttcaccttgccatgctgaagaaatcagatgccccgtctctttatgtgaagagaaacaagagtatggagaggcttgccctttctgatatcatgtacatagagcagagagccaggcagattttcatacatttaaaagaaaatgaggaaatcagctgctatgagaagctttcagatctttcagatcagctgcccgctgagctgttttttctgccgcacaaaagctacgcggtaaacctgtcgtatgtcacacgcattgatacttcactcaaatgcttcgtgatggccgatgacacaaatatccctatcaagagagagctctccggcaaagccaaaaaggctctggagagatactactttgatcacaccagagggcttaaataaggcactttcctattgatttgatatgagctagactgtcaaaagtaatacactgcaaggagcccggattatgaaaaaaattagcgctatacgaaatattccctatctgacaattatactgcttacactgatttgcataatgcttctttcctccaaaaacatgattatgagccaggcgagctatcctgaagccactatcgtaagctctgcatatgctgtggtggagggctcggattcagataaagaagaaatcacatttccacatacctttaagcacctttcgccgcgcacacatgtcaccgtcacaacacatatcaatctgaacaaggatgatccaatctacataaaaactgtctattcccctgcgaaggtctatctggacgatgaactcatatatgagtttggcaggaccgaaaactatccatcctatatgaaggatcccgcaaccgaggggtacctgataggcactgacggtcattcaggtgatacagagcttcgcatagagtatctgtctcctgttaccagaagctcgcttacggtatattctcctatctacggagcatacaaatccttatttttcactctgttaaagctgaataaatggtcattctttatagcactgcttgagcttgccgcaggtgttttgtttatatttatctcactgatgcttttatactacgataaagaggtttgcaagatgatatttcattttggattcttctcactcatggccggcatgtggtctatcggtgagtgcaactatacaggtgtcatagtcaaaaaccctacactgctttatctgtgtgcttttatagggcttttctcgcagatgattccgctgctgtatttctgcaggcttgcagttggttttaagaatgacaagccaattatagttatcgcgaagctcctcaccgtgcttgaccttgtcgcttgtgtcttacagcttagcggtacggttgcactgtcccagagcatgtacgtgttccatgtcattctgcctctcatactttgcttcctgactgcatacatcatccttgaggctgttcgcagccaaaacagcagggcaaaacggctgatggttccggtattcatactggcacttgcttcatgtgccgagataatcaattatcatttaaaatttgtggcctcattgtcattgctgtaccagattggaactctgcttttcattataatcatgggaattgtaatggggcttaatataagcgatatgctcagtataaaacgtgagaatgaaaggctcatatttgatatgaatctccttgagcattccctgttggagcagaagaaatataattcgctcatcacaacaaacgaacagctttttaaaaagcagcgccacgatctgcgtcaccagcttgttgcaataaaaggcctcgcaaacactgaaaataaacagctgaatgaatacctggattccctgatccacagcataccatctgcgcctgcaagctattgcgaaaacagggtagtcaattccattctgtcatactatagtgccatatgcagaaatgaaaatatcgctcttgagacaaagcttattgttccggaaaccgatgatgcggccttggacaatgacctgtgcctagtatttggaaatctgatagaaaacgctatagaagcttgcagacgcatggatactctggattcttcagacgaaacaccatcacgttttatccgactgcatgcccacgtacactataagacacttattattactatggacaacagctttgacggacatgttaccatccaaaacggaaaataccgttcttctaagagggacgactatggtataggtctgtcatccatccgctctgttgccggcaaatatgatggtgacgttgcatttgaagcagctgatggtatatttcagtcatcagtataccttcaaatatataaatgacacattaaaatcattaatttatattaatgcttcatacctaaatatcattttcagagtccaactaacttattgtatataatgcatacatatgctataataataaaagaattttgtgcattatacacatatggagttttaatttatgatagaaaacacgatatacaaggaatttattgataaaatttcagaattatcagacgggatatatcctatcatcaccgacctggataatgacttatcttacgtaccggacaagacagctgattttttcggctttgaagccggcgagcatacctgcttctttgaacagctgagctcttgtgtcaacgacgttgacctgcaggaatataagcaggaaatccactatcgcttaaatggcgaaaaaacggatgatatattttatgtccgcatgggaaagcataccaaagaatatatgatgggattttattctgacatttttaccggtgatgacgggcaccgctaccatgtcctcgtgctcagaaacgaaaatacccttccggatatcgacccatatacatatctttatggtcagtcaaagtttgaaagagacatcaacggctatatcatggaaaacaggtctgtagccataatcgaggtggagataggtcatatagatgagttcaatatactttatggttccaatttcaacactgcaatccagcgtgagcttgcgctcaagttcatctacatgatggatggcagcaccgctacctactatatgaataattgcaagtttgtatttgtggtaaaggaagcagaccgtgccttggccgaggccttctatcagaaaattgccgatacaataaagtccatgtatttctttaaatgctttaaatttgagtttgatatatatgctgcgtgtctgattctcaaggattatgatggtgatacctcaactgtcatcagcaaggtggagtacactctagaccgcgcgaaggagcttcacagccctgatttgttatttttcaatgatatggtcaggttcaatggcagctcgcatatagatatcatgaaaatcattcatcagtcggttatcaatagctgtgatggcttttttgtagagtttcagcccattgtaaaggcttgcaatggtgaaataatgggtgctgaggctctggtgcgctggaaaaaggagccttttggcacggtgccacccggactgtttatcgactggcttgaggataccccggctatgtatgagctaggaaattatatcatgaggactgcaataaacgcagccagtgaatttgcaaagataaaaccgggcttcttcatcaatgtaaatgcatcctcagaacagcttgaaaaggaaaactttgtaaaagatactctggcaattcttaaagagtatgattttccaccttcacagctatggatagagattacagagcgatgcagagatctgcctttatctatgataaagaaaaccgtcactgcattcagggaagccggaatccacatcactatggatgactatggcacaggaagctcttcatctcagatgatgcttgagcttcctgtagagggtatcaagatagatatgttctttgttaaagacattctcgaggagaaaaagaagcaggcacttgtaatcggaatgattaattttgccaatgccgcagacttaaggatatgtattgaaggcatagaaaatgatagccttgagagctatctcaggcagttcgacgtcacctgctttcagggctatcactactctaggtctatctgtcaggatgagcttatgaagcttcttataaagccatagctctggatattactcaagattttccttaaatactgtcagtgcgccatttttctttaaaatcagcatgacaattgctgccactatgcttccggccactgtagagataaggaatggcactatgtatataaacatgccttccggctgaataagcatcacgtattttgcaagaggatacgctgccaggcctccgagtatgcctgtgccaagcgcctctgcaatacatgtcggtatgatttttttgctgaatctgtacatcagtccacagcacagagcgcctaccatgcttcccgggaatgccatgagacttccaagtcctgtcaggtttctgataatactcgcacaaaatgccacaccgacaccccatgcaggtcctaaaaatactgctgcgcatatatttaccatgtgctgtacaggtgcacatttgctgccggcaacagggaagcttattaagcttcctgctacagcaactgccacaagcactcctgccatggcaatctttctgattgaaagagttctttttttagtgttctttttactttccattattacctcaccttaaagtataccgtaactgttcagtaccttcacagttgcgagtcgtttctgtactaaaaagttatagtatatcaatatactctcctgcaagtgccttgttcatgcttcgcacagcacagaacttaccgcacatactgcatgcctcgctgtggtcatcctcaggcagacggtcatccctgatagccttagctgtctccggatcaagcgcacatgcaaactgtgcatcccagtcgagcacacgtctggcatctgccatcttatcatctatatctctggctcccggtattccctttgcaatatcagctgcatgagccgcaatctttgacgcaataattccctgctttgtatcctccacatttggaagagcaagatgctccgcaggtgtcacgtaacaaaggaaagctgcgccgttcattgctgccactgctccaccgattgctgctgtgatgtggtcatagccaggtgcgatatctgttacgagaggtccaagtacataaaatggtgctcccatacagattgactgctgtaccttcatgtttgctgctacctgatcaagcggcacatgtcccggtccctctaccatgacctgtacgttgtgatcccatgcacgctttgtgagctctccaagtcttacaagctcctctatctggcatacatctgttgcatctgccaggcatcccggtctgcaggcatctccaagcgagattgtcacatcgtgctcctcacagatttcaagtatctcatcatagtgctcgtagaaaggattttcctctcctgtcatgcacatccatgcaaatacaaggctgcctccacggcttacgatattcatcttacgcttgtgctttttaatctggtctatcgtttttcttgtgattccacagtgaagtgtgacaaagtccactccatcctctgcatggagtctgactacatcgacaaaatcctgtgctgtaagtgttgcaagatcacgctgatagtggataacactgtcataaacaggcactgttcctatcattgcaggacattcgcttgtaagcttctgtctgaatggctgtgtattgccatggcttgaaagatccatgatagcctctgctccaagctttacagcactcatgaccttctgcatctccacatcatagtctttgcagtctcttgacacaccgaggtttacattgatttttgtgcgaagcatgcttccaacaccctctgcatcaagtgacttgtgatgcttgttagcaggaatagctacctttccgcttgcaacaagctccatcagcttgtctacatccatcttctctttctttgctaccttttcaatttcaggtgttacgatgccctttcttgcggcatccatctgtgttgtgtaattactcattgtactctcctgttcttattgttatttgtattattaattagtaattatttcaagattaatgctccatgattcataggtccactgccgtgtcccagatcaagcatggcttttaaacatgccgtgacatatcgcttgccgttatccacagcctgctcaagcggctgtccctttgccaggccgctggctatcgctgatgaaagcgtacagcctgtgccgtgtgagtttggattatccactcttttggtctcaaatgtgataatctgctttccatcccacaaatagtcacacacacatgctgtgtctgtgaaatgacctcccttgcttaaaaccggacagccgtatttatcataaatagcctttgatgcctctatgatgtcatctgtgctttcaatctgtctgcctgatatcacctcaagctcagggatatttggcgtgatgatgtcagccagtggaaaaagcatctccataagagtgtttgctgcattttcttcaagcagcctgcttccgcttgtagcgaccatcaccgggtccagaactatgttttttgccttatattttacaagacctgcggcaatcgcctcaatcgtatctaccgatgatgtcataccgattttcaccgcatccggataaatatccgtaaaaacagccttcatctgtgcctcgataaaatcagccggtacattcatcaccgcatcaactcccatggtgttttgtgccgtgagtgctgtgatgacactctcgccaaacacaccgtttgcaagcatggtctttaaatcggcctgcacgcctgcgccaccgcttgaatcgcttcccgcaattgtaagtgctgtatgcatatttacgctcctttctactgaatattgtgatttctcgtaactgttcagtatcttcaaaatattgtttaattactgtagttatagcagtttgtcatactgtgattacagaatcttgtcgc

SEQ ID NO: 951 - DNA, 25678 bp, unidentified
  source 1..25678: mol_type = unassigned DNA
ttcttcggtaattccatacaaaaaacacctcccatgccgtttctatcagttatcactaactatagcatccgcacaggaggtattttagcgttctttgtcgcacctcttcaaaaacagttcgacaaagtttgcaccatattctatgtattcttagctatgcttcaaacttatatacggtaacagaatcgtattctctgccgttctccccgccaaatacataggaggggaaattctcatgatgaatggtatccgggaaatactgggtctccaatgcaaaaccgcagcggttgccgtaggtcaccccatcttttccgggctgtacatcaataaaattgcctgcataaaactgcactcctggcagggtggtgtatgccttcattactctgccgctcttcgggccttttactgtggcaatatgccgtaatgtaccgtcatcgttccatccatcgatcacgaaattatggtcatagcctccggtcaggagtaactgctcataatcttcccggatgtctctgccgatcttcttgggctgtgtaaaatccatgggtgtgcctgctaccgcacgaatctcaccggtagggatcgatcctgctgccaccggagtaaagtgagaggctctcagccacagttcatgctcttcaatgctgcctgcaccgtgaccgtccagattgaaataggaatggttggtcaggttgataatggtcttcttgtcactggaagcatggtaatgcagagtcagctcattctcttcactcagagagtaggttacggataccttcttattgcctggaaatcccagctgcccatcctcatcctccagagaaaatgtcacgctgttctctcctatctccgcatcccagagtctcttatggaatcccagttgcttatgggtatgtaaattgttggcaccgtcatttttgtccagctgataagtaacgccatccagcgtatactctgcaccgccggtacggttcgcacaggggccgatcaccgtgccgaaaaagctgtcgttgccgtaatagctctcaccattgtcaaatcccagcaccaggtcgtccaccttgcccgtggcatccggtaccagtacgcgcaccagagtagcgcccagatccgttatctctgctttcatcccttgatcattactcagggtatacagagatatctctttcccttccgcacttttcccaaataaactttttattactgccattgtcttgtcctccctcttttaactataattctactctaccctctaaggcacggagtaatgttacctcatcaatatattccagatctcctcctacagggacaccgctggcaattctcgtcaccttgattcctgtaggtttgatcagcttgctgatatacattgccgtggtctcaccttccagactggagttggttgcgataatgacctcctccacatccccctgtaagcgttccatcagttccttcagcttgatatcacccggtcctacgcccagcatcggagaaatggcgccatgcagtacatggtacacgccctcgtatttgccggtcttctcataggccgccagatctctggtgttctccaccaccataatggtacgatgatcccgtctgggattcgcacacaccgggcagagttccttatctgtcagggtataacactccttacagtaccggacattggctctggcctcgatcatgacattcgccagtctgtccacacggtccttcggcatattgatcaggtgaaaagccagtcgttgtgcggacttactgccaatccccggaagggctgccagttcttctattaatttattgatctgtccgctgtagagttccattagaaaggaaatcctcccaggccgccggtcattttgcccataagctctgcattggcttcatccgccttgcgcagtgcttcgtttgctgctgccacgatagcatcctgcagagtctcgatatcctcgggatccacgatctcctctgccagtttaatggatgtgatctcttttttaccgttgatggtcacttccacagctccgccgcctgcagatgcagtgaactccttggtctccagttccttctgtccttcttccatctgacgctgcattctctgtgcctgtttcatcagattattcatatttccgggcattgcgcctccgggaaatccacctctttttgccatgttgctgtttcctccatattatttataattgatttctccgcgctgcgtactctcgaaatcataacatatattcgcatttcgggctatcgtcctacgtgctcatatataggtgagttattattctatcttaccttatctgtaaggctgccgcaatcccaaattcacgcaggatcactcttcctcgtcgatctccatgttgatgaccttgcccagatccacataattgtcttcgaactccctgctgctttccacggtctggatcgtcacttcgatctccttaccggagaaatcggacaacagcatttccaactgctgcttgttctgctcgtgagcttctcctttgaaataatcggaagccagtccgtcctccaacaccaccatgagcttgttgtctccacccagacttaatcgggcgtttttcagatacatcttcatgggattctcggcatttcccacgatggccggccatttccgtacgatctcctggatatccccggggaccgccttcggcaactgtggcttcggctttgccacaccggcctgcggcactccctgtgctccgggagctccggcaggcatttgcgccgccgtaacgacaatgccgttttccactttttcctccacctggcgaatacgatccaggacagcttcctgatccgtctccatctccggcttacacagcttgatcagcgcgatctctaccaggatacgcttctgcgccgcatagcggatctgtccggacagttcggagaaaatatgaatatagcggatgatctggtccatggacagcatggaagcttcttccttcagattcgccagattgtccgtagacatgtctatgacatcctccagattatccgctgtctgtaccaacatcagattccgcagataccaggtaaagtccgtgacgaactgtaccagctccctgccctgcatgacgatctcttccaacagttcaatgcagcctaacacattccggtccataacgaagcgcagcaatctgctgaacacttctgtatccactgcccccagcacatccagggtcatatcgtaggtcagttctttgcccagatggaaggcaatacactgatccaacaggctcaaggcatctcgcatagaaccgtccgctacttttgcaatgtagcgcagagctctgtcctccacctgtacctgctcggtgtccatcagttccttcatacgatccgtgatggtatcaatggagattcgtttaaaatcatatctctggcagcgggacaggatcgtaatggggatcttgtgcacctctgtggtcgccagaataaaaataacataagagggcggctcttccagcgtttttaacaatgcgttgaaagctccgggggagagcatatgcacctcgtcgatgatgtagaccttgtattttccctccgcgggggaataggatacctcgtcgatgatctcacggatattgtccacaccgttgttggaagccgcatcgatctcgatgacattcatgctggctcctgctgcgattgccttacaaatacggcattccccacaggggccgtcctctgtggggtgttcgcagttcactgttttcgcaaaaatcttggccaccgtagtcttaccggtacctcttgttccggtaaacaggtacgcatggccgatccggttcgctcgcagctgattcttcaatgtcgtcacgatatgatcctgacccttgacatcggaaaaagcgtccgggcggaatttccggtatagtgctgtatatgacatgttttttctctcttccttgtaactattcagagccatcaaatattagcagatgcttggcaaaaatagttactcattaattttctgtcttaatcgccgaagcagatgcccagcagcttcgcttcctgtacgatggtagcatcgggatccacggtctttaacttgcccgctacatcctctaacggaacccttacgatctcacggttcttgtaacctaccatgaatccatactgattatccaggatcagcttgcctgcctcggagcccagacggctggcgaatactctgtcataagggcaggggcttccgcctctctgcatatggccgggtacggtgacacgtacttctctgccggtcttctcctggatctgtgcagccacctcgtaggatacggaagggaacggatatttttccatctttttcttgtaatcttttttggtcagggcagcatcttccttggaaatcgcaccctcagccacagcgataatggtaaaacggcagccctttttgtccctgtcttcgatcttctcgatcaccttatcgatatcataagggatctccgggagcaggatgatgtccgcaccgcctgccattccggcattcagggtcagccaccctactttatgtcccataacttccacgataaatactctgccgtgggaagctgctgtggtatggatgcagtcgatggcatccgtagcaatatctactgcgctctggaaaccgaaggtcatatcagtaccccacaggtcattgtcgatggtcttgggcagggtcacgatattcagtccttccttgcgcaacaggttcgcagtcttgtgggtgccgttaccaccgagaattaccaggcagtccaactgcagcttataataattctgcttcatggcttccactttgttcagtccgttgggatccggatcctggatcgtcttgaacggggtccgggaggttcccaggatcgtgccgcccttggtaaggatgccggagaaatccttgtctgtcagcatgcggaaattaccgtaaatcagtcctctgtagccatcgaggaagccatagatctcgacctcttccttactgttcgccagggtcttcaccacgcctctcatggctgcgttcaatgcctgacagtcaccaccgctcgttaacattccgattctcttcatcgtaggatcctccgtttctatatttcattattttctcttgcgtttgctgtaactatgcaaaactgtcttcgttctgtcaatacttatttctattttaatacatttattttcatctgaaaatagtttgttgtaatttccggcagatttctcccctatggcaaaacaaacctcagaagcaccgggcctctgaggttcgcttatcatcttatcatacgttatttgaatttaaactttcctttgatcatggtcacgtagacagctgcgccgccaccgccgaccactacggctccggctgctgccgctgccgccacgcggcctgcgttcgttcccttaccggaggtctccgttatctgctctgtgccggattcctgagagtcggaagtctgggcggtcatggaatctatccgctcctcctgcggtgcttctccactcgattcctgcgtgtcctgtgcctccccggagggctttgccgcatcttccttactgttttcgtccgcagcgggtgttgtcgggggcacgggaattacagaaggctttaccacaccgggtgtggcaggcgttgccgtggctgcgggaggtgttgccgcgcccgtggccttctggtccgtattggacgcctgactgctgtcatcgtcgtcatcatcgtcatcgtcgttactggcagcaggcttcttcggtgcgatttcataaccgcagatcgtacagatctccgcccgttctgtggtggccgcgccaccggatgcatgcttttccgtattgctggtgattccacagacaccacacttatgccagtgtccggtcatatcggacagatatccttctgcccagctatgatccgtcttcggaagaacgatctctgtcgctgttatgctcttgcttccgtccgcggatgcaaaatacagtccgcagacgtcgcaggtccagtattcgatgctgccctctgcctgacaggtgggttccacccggtcgtggcggttcagcgggccgtgaccggagttccatgtcttcgatacggcggggcttgcgttataatcatcggtttccgcatagcggatctgtgcaatcaccttctcgttgtgaccgactccggtggatttggtctgcccccagtccgttccatcaaagctgaactccacgtcagtacgatctgtggtgatctgcgccgccagatcgttgccgctgacggtaaaggtcatgtcaaaggcatccggatccggggtatcctcgcggtctgcttttgcggtacgggtgatagttatgccaaacacaatatcattataattttttgaccgtaactgaacacttactatcgcatgctcgccaatatcatccatggtgttttcacccagagtgaatagcaattttccctcggaatatttgatgtcgggatctgccgccaaaacgttcatggaattatccaacatgataacttccatcgttgtctctcccagatcctcgggcaaccccggtatctgcaccgccttctctcctttggccgcccaactgtatttgagatccaagtcttgaatcttcggagcaattgctttactgatttccaattttacctgtgccgtcagcgtctgatagtattccggatgctccgtaggaataaacgttgccgtgtaggtctcactatcgccaacataaggaaccttgtcatcatcgctctggatctgccaagttccgtcgatgggctcggttcccagttttgccgtcagtcttgtcactttgagttctctcagcttattgccataggttccaccggcaatgcccttaccttctacagtaagtagagccggattgatattcacggtcagatccttcgtcgtctgctccgggaagaaagaagagtttgtcccggtgtaaacgagggtgaaaatggtctcgcccacggtctgcgccttgtaagttgcgatgccgttcttgaaatccgctgcgcttaccaccggggtatccccgatccggatctcaaagctgccctccgtatcttccgcagagatgggctgttcgtctgtcacaaagtttaccagtgcctttgcgttaaaagttatatcctgtccataggtgggcgtaacgtcatctgctctctcaaactgcagaccggtggtgtacttcacaccaactgcattattttccccaagcgaaggatagtaggctatgccattctctttgtcgttggctttcttcgtccagatggccggatcaaagccattgtctttgagttctttgaaaaagctggaagaggtcagttgcagggtagaatgtcccaaatcacagtcatcttttacgttacaaatatctttattgaaataacacttctccgggttgggatcaccactatttgatattcccgcaagttctccattccctttgacatttcctatgctaatgcaatggtcaatagttccgcccataccacagattcctgccgcagaatcctttccctgcacgtctccttcaaaaaagcactgggaaatcatagtgtattgtccacccacgccgctgattccgcctaccatagacccttttaccgttccggtaaaggagcagccataaatttcgcccgcagacaaatttccacaaattcctcctgtttcacaataactcgaaacaatgtctccgttggcagccaacagcattaccttaccgctttttttgctgggttggtcgcctatttgtgcgaacaaaccagaactataaacatcattttcttttgtcatatccacatggcttatcgtatgtccgtctccactgaattttcctatgtatggagttccgggatctccaatagatctgagttccactcggctcacatcaatattgttttttaatacatagttttcgttacagtttgccgtatcctgtccgatggctacgaattcctccgccgtggtgatcagggtataggtatcccagtcgtcaccattcgttgtaacatagttgtaaaccggtacggaagcagtcttcgtctctccgatctttgccacctttgtcagattgatgtaagtccctgtggctgtaccaaatctacttcctgtatctgtagcctttgcagtgctggtatcgacactgccctctttccagattgtagaatccaagccctccggaagtgcaccgcaaagctggctggtagtcaggggaatcaccttatcgcttgctccttctcccacaccggcattattcaaatcactgttgtaatagcagttgccgataaagttcatataattcgaatccgtgcttccagctatgccaccaacatttttgccattccctgtaatcttaccacaattcaggcaattactgatgtcatacctattcgctgatgcaccggtaataccacctacagagctatcctgttgagaaactgttacagcacctatattataacagtattgaactacgccgtttccatctcttccttcataactggcactgcccatgattccgcctgctgtagaatttccttttactgaactgctattgtagcagccggaaatatttcctatcagacttccgcatacaccgcctacacaccgactcgcataaatcgtgttttcgatactatagcagtcagaaatatttgctcctgctccagcaatcgcgcccacaaagctatgaccagaaatattagcccgctttactgtgacactttttatatagctggaaggagcggtaaagttgtagcacgctccaaacagacccacatatttgttttcctttcctgtaattgtcattccggttattgtacgtccgccgccgtcaaagcctccccagaaagagttgctatatgtacctatcggcgtccactccttaacgctaaggtcaaggtcagaaaccagcagaaaatgcttccctcgataattcgtgccattattcacctgctgcgctagatacgcaagctgctctgcattttcaatccgccagggatcttcctttgtgccactaccttcggtaaaagcttccactgtgccatcccaggtatctactgtttccccctccgctctcgcactcaccggcacggcgatccacaccagtgccgccagtgccagcagggccagtctcatcttcatgctccatgcttttgtacttttcttcataaccctcatgcctttctatatcctgcaaaatttcaaatatttcccaaccctttgcagatgtaaaatcccaatcttgtttttatactttccgtatcatttattataccgaaaaagcaaaggcatcgtcaatattttccatacgattcgtctcatatttttataaaattttgtcaaacgagtgcgcccaccgcaaaattgagcaggctggctcatcgtaaacacaaaaaaggagccaccagatctctccggtcactcctcgttgccttctctgaaaaatatatccagttttcccagacatttgatcaatgtcttcatttcttcctcgtccagatcccgaatgatcgtatggatcattttcctgtggaaatctctgtggtggaaaaaagcttttctccccttctctgtcagggtcaccagcactacacgtttatctctggtgctgcggttgcgggtgagatatccttttctctccagactgttcatattcgtggtcagggttcccacggtaacgtggagttcccccgcgatacgggacatgctctttggttcctcgataccgatagcttcgaggatgtgcatatcattatttgtaatatccctgaattcgtctgttatgaccgcctttgcctctgcatccatcacgttatggaacaggttcaccagcagttcattcagtacccggttgttgcttttttccatagttacctctacgatatctggaatttttctttcgtatgtccgcaatcctccgaagccgccttctctgacgcatatccgcagtcttcctgcgctccggatcattttcagtataccgtctaccaggtcatcacgcaagccccaatcgtaagcccggcgccgaatcccgccagaacgatacgatcgccgcggtgcagctttccctgcctgttcagttcatccagaagcaccggaatggaggcagaggacatatttccgaccctttccagattggtggggaatttgtctctgtctgcatgcagtcttttcgccactgcatcaataatacgtgcgttggcctgatgcagtacgaacaggtcaatatccggcacagtaagtccggcatctgacagtgcttcctcgatgcactgtggcacccgtctgctggcgaaccggtacacttcctgtccgtccatctgaatataaggttctctgccatccgtcggctggttttggtccgtttttgccgctgaagtccttgcatatggggttgtcagttctcttgctccgcattgcaggactccgccaccggtgccgtcggagtgcagtgcccggcccagaatgcctgctgccggtatccgtttctcctccgccgtctcctgcatccctttctctgtctccggcaaagcgttactgtattccaccgcccgagactccgtcctgcattgctccacaactaccgccccggcaccgtctccgaacagaatacagctgccccggtccgtccagtccaccagcttggacagtacctcactgccgatgatcagggcatttttcgccaatcctgtcctcagataagcatctgcggtattcagtgcaaacaaaaatccggaacaggccgcattcacatcaaaagccaaagcattcaccgcgccgacagctgcctgtacctggcaggcacagcagggcagatactgctccggagaacaggttgccaccaggatcaggtcgatctcttccgctctttttcctgcctgttccaatgctttgcgggccgcttctgacgcaagtgtcacaaccgtttcgccaactgacacatgacgttccgcaataccggttctctcacggatccattcatccgaggtttccaccatctgctccaattctttatttgtaacgatccttcccggaagtgcacttccggttccagtgattcttatggtcctcacgccatttcctccatgatatccactgttctttctattttctgcgcccgccaggcattgctgccgcagaacagcagtccgttatccacatctcccattgccgcattgatcaatgctctggtgatgcaatacggtgctgtcttcggatcgcaggtcttaatgcaatgtctgcatccggtcataaaccgttccccggccgccaccttttccagaaaagcattctgtatggctctgccgggcattcccaccgggcttttcacaatgacaatatcttctttctgcgcccggagatactcctgcttgtacgcctccgccgcatcacattcctctgtggtcacgaaacgggttcccatctgtacccctgcagccccgaggtacaggcaatgctccagatccctccggtcataaataccgcctgctgcaatcagtggaatttccagttctgctgcctgccggatcattgccgtaagttctctctcatagttctccggtgtgtaagcatccagttcttcccgcttaaatcccagatgtcctcctgccaacggtccctctgccacgagaaagtccggctttctgtcgtattttttcatccagtatttcgtgacgaccgacagggcacgggtacttgacacgatcggagccagcattgtccggtggctgcgcccgggcattccgttttccgtctctgccacaactccgggcaactccagtggcagccccgcaccggagataatacagtcggtgcctgccagcactgctgccctgacataatcctcgtagtgctgtgttgccaccatgatgttgacaccgatgataccgccttttgcgatctgccttgctttttctatttcttttccgatagtacgcagattacaggcgatgggatctctgtcaaaatccggctcccggaaaccgatctgggcagtagaaataatgccgatcccaccggcggctgccactgctcccgccagaccggacaggctgattcccacacccatgcctccctggatcacgggaatatctgcatgtaattcccccaggatcatttttccgtgcttcatcccacatcacctctcattaccgctttaatacttgcggaacctttcataacgttcctctgcgatctgttcaccggtcatgccggtatatttttgcaggaattccttgatatgttccttgagatacccgccgatggcttccacggtactttgatctgccccgccgtattccggtacaatcctctcgatcactccgaggcgtttcaggtcctcggatgtaatattcatgacttcactggcttctctggcacggtcagcatccttccataatatagaagcaaaaccttcgggagacaggatcgagtatgtggcattttccatcatccatacctcattgcctaccgccgtagccaatgctccgccgctgccgccttctccaataaggatgcacaataccggtaccttcagggccgacatctccagcaggttccgggcaatagcctcgccctgtcctctctcctctgcctccacgccgcagaaggctcccggcgtattcacaaagctgataatgggccggttgaatttctccgcctgcttcatcaggcgcagtgccttacgatacccctccggcatgggcatgccgtaattgcgtctggcacactccgcaaaatccttgcccttcacatctgccaacactgtcaccggctgcccgtccaggaatgccaccgcacctaccagtgctttatcatccccataataacggtctccgtgagcctccactacataatcgaaaatgtagggaatatagtcggttgctgccggtctgtccactctccggacggtcttgaccttttcccatgccgttctggggagtgtcagtattgaccgttccttcacgatctccgtaggttcaaaatggaagtcaaaatttttcttaaaatccgcataattcccctcactgcaccgatgcgtcgtgatcaggaaatataaggtcttcttcagattctcccggcggacgataccgtccacaaaaccatgctcctgcaaaaattccgctgtctggaagccatcagggaggcgctgtcccagagtctgcttaataactctcggtcctgcgaagccgatcaaggctcccggttccgccatgatcacatctcccagcatggcaaaactggccgtcacaccacctgtggtgggatctgtcaaaatagtcgcatagagaagtcctgcttctccatgtcgtttgatcgctgcggaggtttttgccatctgcatcagtgacacgattccctcctgcattctcgcaccgccggaacagcagaacaaaaatacaggcagccgcaattctgtcgccttttcaatcgcctgggtgactttctcgccgaccacatgccccatactgcccatcataaatttggattcgcagatgccgatcacagccttttccccgtagatctcgcattcacctacggtcacagcttcttttacgccggatttttccctggcctccgacagcttttcctcatagccctcatatttcagtggattgctctcttctatctcctcgaaccagggctgaaagcttttccggtctgccaccatgcggatccggttgtgggtcttcacccggaaataataaccacactcatagcagacatatttatttttcgctgcccggtctctgtttatcattttcttacatttcgggcatttgatctctgtttctgtatctacacttcccatacctgcacctcttattctgcgtcactcttatctctctgtcccacccataagaaatcacttccgcagactatttttatttcaacgcaaaggtaagctctgccttcgctaccagttttccgtttaccgtggcgatcgcttccccgacacccaccggtcccttactgcggataatggtggtctccagctccaaggtgtctccggggcgcaccatctgcttgaattttgccttatcgatcccggcaaaataagcggtcttgccacgatgctccggcagagacagaattgctacagcccctgtctgtgccagtgcttccatgatcaacacgcccggcatcaccggattccccggaaaatgcccggcaaaatacggttcgttaaaggtcacatttttgcgtcccactgcccgcacaccgggctccagctcctcgatagtatcgatcagcagaaagggatgtctgtggggcagaatctccatgatttcctgtgtattataaactgacattgttcctccgttccgcgaatgctgtcgtatcaactacttcctcgcattgtgcaatcgtcctcgttgatactctgccttctatcctgtgtcttgaacatctgctgcggttattctgtgtacttcttcaacagcagactcgcattatgtccgccgaagcccaacgaattggtcaatgcataaggcacctcttctttgtagctgtcccggcagtaattcaggtcaagttcctcctccgtctcacgcagtcccacggtgcggtggatatagccttcctgaatttcttttacgcaggtgacaaactccactgctcctgccgctcccaggagatgtcccaccatggatttggtggaattgatcttcaggtcatacgcatgttctccaaatgcgagcttgatagctctggtctcgaacaggtcattatgatgggtgctggttccatgggcattgatataggtaagctcttccggttccacaccaccgtcttttaaggcattcagcatggcggtggctgctccgctgccatcctccgcaggggatgtaatatgataagcatccgaagaacagccgtagccggtcagttccgcatagatcttcgccccgcgcctctttgcatgctccagctcttccagtaccacgatagcggaaccctctcccatgacgaagccgtttctctccttgtcaaaaggaatggatgcccgttccggatcctcactaaatgacagcgctgtcagtgctgaaaatccggcaattccgatgggggtaatggagctttccgttcctcccgctatcattacatccgcatcaccgtactggatcgtacggtatgcttctccgatggaatgtgtaccggttgcgcaggcagtaaccacattcaggctcttgcccttcagcccataggcaatgctgacattgcctgctgccatattggagatcatcagaggcaccagcatggggcctaccctgccggggcctttttccttcaggcggtcatattcccgctccatggcctgtaaacttccgatgccgcttcccacactgcagcccaccatataaggatcttcctgttccatagtaagacccgcatccgtgatcgcctgtccggcagccgctacagcgaactggcagaactgctccattctgcgggcggattttttgtccatatattgtgcgggatcaaaatccttcacttccgccgccaacttacaacggtaatccgcagtatcaaaataagtgataggaccgaatccggtcttgccctctttgataccattccagaattcctctacgctgtttccaatcggagtgatagctcccatgcctgttactacaactcttctatttttacccatacgtgatatactccctcgcgtcctgacttattttctatcctgctgtactgttagcggacatattttctattctgctttactgttgccggaggtattttttacattgccataccgccgtccacgcacagcacctggccggtaatatagtccgaggcatctcctgccaggaacagaaccgcctgtgcgacatcctccggtcttcccattttcttaagcgggatctgtccaaccgcattatcctgtaccgcctccggaagcttatctgtcatatctgtccggataaatccgggtgccacggcattcacacagacattcctggatgccagttctctcgctacacttttcgtcagaccgatcagtcccgctttggaggcagaataattagcctgccctgcattcccgacgatgccactgacagaagagatattgatgattttcccatatctctgcttcataaaggtcttcgtcagatgccggatcatgtgaaatgcgcctttcaggttcgtatccaggactgcattgaattcttcttccgtcatccgcacgatcagattgtcccgtgtgatcccggcgttattgacaaggatgtcaactctgccgtatttctctgttactgcctttacaaaggcttcactctctgcaaaatctgcaacattgcatttcacagcctccgccatgccgccttggcttcggatgtccgccgccaccgcttccgctgcttctgcagagccgttataattaatgatcaccgtggctccttctgctgccagtgcctgtgccacagcttttccgatgccccgtgatgcccctgtgacaatagcaacttgtcctgtcagactttttcctgtcaacatgccagttcctccatcacccggtccagatcctccggtttctcgatattgtatactttgacatttctgtcaattttccgtacgaagccgccgagtgtcttccccgggccgatctctatgaaagtgtccacgccatctgcgatcatccgctctacgctctgggtgaaatgaacgggactggatacctgttgtttcagcagttccgcaacctgtgacgcatctgtcacataatccgctgttacgttggacacgtaaggaatccaaggggttgacagcttgacgcttttcaattcttctgccagctgttctcccgcagttttcagcaaagctgaatggaatggtccgctgacctttaagggtacacagcgttttgcacctgcttctttcagcgcttccgatgctgctgctactgcatctgcctctccggtgatcacgatctgccccgggcagttataatttgccaccgagacgactttgccggtttcttttgctgtctgtccgcagatttttgccacggtatctccgtccagccctaatattgctgccatggctccgccttccggataggcctcctgcatatagataccacgcatccggatgatccggaacagatccggcagctccatcacaccagcggcagccagcgccccatattctcccaggcttaagcctgctgccatctccgctttcagtccttttgcctccaatactttcagaattgccacttccatggtcagcatggcgatctgtgtgtattccgtaatgttgatataaggattttcttcaaaggtcagctgttccatggagtacggatgtccgctttccgcctgtacttcccgcttatcctgccaatacagattctggagcaccttgtctgccagcttccataccgcctgtgcttccgggtaagtatcatagaactccttgcccattcctatgtactgggagccctgtcccgggaataaatatgcgatcctgctcattttgtcttctcctaattactatgtgatgctattgttctcctcggttacagcacatttttttataatgcgccgttttccatataactatgccgcctgtcgctgttcgaaatctgttgtcagcggttacctgtcgctatattttatttatgctgtccttgtgccgctatgcactcctgcgcctgctgtactgtttcttcaataatctcacggcaggtctgttctctgcggatcaagcctgcaatctgtcccgccatcagtgttccgtttacggtatctccgtcctgcactgccttcctgagagatcccagtgtcagcttttccagttccatgaaatcggcattctctttttccagcttcagatactccctggtcatctgattacgtaaagaacgcaccggatgtccggtagacattcccgtcactacagaatcaatatcctttgccttgatgatctgattcttataattttcatggacgatggattcctttgatgcgacgaaccgggtgcccatctggataccttccgctcccagcataaaagccgccgccattcctctgccatcggcgatacctccagctgcgatcaccgggatagataccgcatccactacctgcggaaccagtgccatggtcgtggtggaaccgatatgtccaccgctttccatgccttccgccaccacagcgtccgctccggcacgctccatcatcttcgccatagccacactggctaccaccggaatgactttcactccggcattcttccacagttccatgaattttcccgggtttccagcaccagtcgttaccgcttttactccttcttccacgacaatcttcgctacatcctccgcattgggatttagcagcatgatattcacgccgaagggtttgtcagtcagttctttgcatttacggatttcctcccggacaacctcaggcggagcggaagcggcaccgatgatacctaagcctccggcatttgataccgctgccgccagcttatgttctgccacccaggccataccgccctggaaaacgggatattctatttgtagaagttccgtgatctttgttttcattgtctttctgatccttctcgtcattctgcgttatattacatattctgatgataccagggtcaaaaggtctaagcccacatgagcttgctcataagtgggtgaaagaccttaggacccgccccgatatgagcataaaagtgggatgataatcccacgatatgcgaatattgggtagggtgctatgtgccagtggcacatgtctagcacggaccgaagcggagcggagacatgggagtgcgtagcacgaagcaatccgtaggtatcaaaatcgagggcttttgcctgcggactcttgcattcaggcagatatgccgttcttacgcatgctcctgaatatatctgataacatcacctactgttgccatattttccaattcctcggaaggaatggatacaccatattcctcttcaaacgccattaccagttcaaacagatccagggagtctacttccagatcctccttgaaacgggttgcctctgtgatttctacattctcctgatttaactgttctctgatgatggctgctactttttctaacatgtttttgctctccttatgcatttcattattgtgtttctgataccttgctttactactttgtcgtctccggcgtgtttgcctttcatttcaaattgttttgactatcaaagtatttatctgcaatatactacgcggatgttgttctgtcaacatctttttttattattaccgcttacaaacttattatcatcacgtaagcagtaataatctcattgcaaaagatccttttcccggaaaaatactgctacaaaagcgtaatttccttgccaggcggtaaaatccggtggtttccatcggaaaatttgcaaaaactaccgcctgcaaaaataatttttcaaatcaggcggtaaatgccatcgcaaacaatagaaactactaggttttttcgtttctccccttgccaaacggttatttttcagataaaataatctacgttgtaatcttttggagacgtatcgaagtggtcataacggggcgcactcgaaatgcgttagccctccggggcacgtgggttcaaatcccaccgtctccgcacataaaaagccggtaatctgtcaaaacagactatcggcttttgtattttagaaaaatgtgattattggtatttgattttttcagaaaaatgtgcaaaacagttgtttatttttcagaaaaatgtgttatgctattattattcccgaaaaggacggtgtatttatgaagcgaaatgcaatgcaatccctgataaactggaaaaacgacccggaacgaaagcctctgattttgcgaggtgccagacaggtgggtaaaacctggctgatgaaggaattcggacagacctgctatgctaattatgtctatttcaacttcgatgaagaggatgaattaaaatccatttttcaggcgaacaaaaacccccaccgcattatcgaattgttgtccatgataagcggtgaaaaaatccaacccggtgagactctgatcctttttgatgagatccaggaatgtcccgaggccttaaacactctgaaatactttaaagaaaaagcgaacgaataccatgtggtttccgccggaagtctgttgggaaccattttagcccagccaaaatcttatccggtaggcatggtaaatctactcgatattttcccactgacttttgacgaatttctcgaagctacggatcctgccttatatacctattatgacagcattcaaaaagagcaaacgatcgaagagatttttcactctcgtctatctgaagcatgcaattattattttatcatcggaggaatgccggagtgcgtatcctcctggatcaaatacaaggatccggcaagaatctcccagatacaacgggagttaatcgaaatatatgaaaatgacttttcaaagcataacgggaagatcaacagtggtcgtattcttctagtattccgcagtatcgttgctcagcttgcaaagccaaacgagaaatttatgtatggtgctgtccgcgaaggaggaagggcaagagattttgaagaagctatcgaatggctggtctcggcaggaatgctcaatcgcgtatataatgtctccaaaatggagcatccactttcagccttcgacaagctggatcagtttaaactatttgtctttgataccgggctgcttaagcatatggccggtatcgacaacagtgccattctgttaaaatcaagctacccgttcaaaggagcattaacggaaaattatattttacagcagttgcagggacaatttgaaatcgctccccggtactactctgataaaaacagcgagattgactttgtgcttcaaaacggaaccgatatcattccggtggaagtgaaagccggggaagataaatccgctccctctttcaaaagatatgttgcagaaaatcaccctgctgcagccttacgtttttccaaacgcggctaccggaaggatggcgacatcaccaatcttccgctgtatcttgtatgtaagaccagagatttactataaatatatttttctaaaatagatcagacatttttcagcatttcctgcataaccgggtaaatccgctccgccatgcgcaggaaacccagagtattcgggtggcagccgtcgacggtgcattcagaccgtcctatcttgccgaagagttcatgtccgtcgacaaaccaaaccttctcatcgcctctgcgtttcgccgcctcgtaggtagcgcaaacgacatctctacggcggatgctgtcctctggctccgcatcggtatcgggacggctgaggaagagcaccggaacgtcaggatgcgctttccggatgatttcaaaaaacggtgcatgggtctccgccagatgctccggactcggcgaattgtggtcataatccatgacaaagagactcatctcgggaaatcccgcaagatattccgcgaaatcctcttcgccccgtgcgctgccggaaaaacccatgttacggtagtccgcatccagccatctgctgacgatactggtgtaagcattgccgggtcggggtgcgcatccaccctctgtaatcgaggaaccgtaaaatacgatcggcttctccacggtatacgcgggtgtttcccatagcttcgctctctcctcgatgccgatctgcatcccgaggagatgatcgtttctcggcagattgatcgttacgagtacctcctctcccgtgaggtcaaaagtcttctccactgtaatctcgccctcggtatggatctttggcgcaatgtaaccgagatatgtcgcttctgtaccctttccgagataaatatctgcgcccgccgagccggacagcggaatattgatatcctctttcgtgcccgcgagcgtcatttttacatataatttctttgcatccgtctgaaagcggactctgccgccggcagctcttcttccgaggtagccatactgtgggaagcgctccagtgcctcttcggacagcttgaaaaactgtcttttctcactgtctgccacagcaagaccatagattttcaatggggtctccgtgatatcatataatttcatcatgtctttttcctctcatccactcaatagtatcattcgctaaggtttaatgctggctccggcggaactgccccggtgtcatgccgtattttttcttaaagctggtcgtaaaataggatgcattgctgtagccgacaagctcacagatctcctgtatgctgaggttctcccgctcgaggagtagttctctcgcccgctcgatgcggagcgccgccagatagtcaggaaaggtgcagccgcatttttcatggaagaggcggctgaaatacgacggtgtaatatgatatttgtccgcaagatactgggcactgatgttcggatcgccataattgctctgcaaatacgctatcgccttctccacaacgtcctctctgcccgtctgccgattccgctcgaggatcagccagatttcttctgccatccggaaaaaccattcctccacatcgtccatatattcataggatgccagttgtcccgccagcacctcgtaatccttcttcgtcaacggttcaaaacggtattgcaacgaattccggtaggtctgcatctgcccagcgatctccatcagtgcatcctgagctttctggatcgacagctttttgagctccccgacaatcttgcggtactccgccgaaaagcctgtccggtcactctgccggagtctctggatcaattcttctgatgacggtgcctgttctccatttaacgccctctgcgccatctctccttccgtaaccaccgcacccataccatagataaaacggtatgctgtcgctgcccgcgccatctgatacatgagatttagctccgtaaagccctctgtttcgcccttttcttcgctgatccctacatccatgccgatatggatcagctctccggtgacttcaaggatatgctgcgacgccaccgtcacacgttcctccgttacgctctcctcactgaacagaatcgccgcgataaactcatggtctaccggcaaaacgaggacgttgcccaactcacggagcgtctgctcgacgatcgtcttgatcgtctccatctcaaaagcgatcgcttcttccgtgttattactgtggagatcctggatatcactgaggcgcatgaccacgacacgaatccggacacccggcttggcgtaagtctcttccacccactccggcaattttgcggttttctctctgctgattagatacgcggcaagatcctcctgctctttgcgcaggttgatatggttcagtctctgcaccatcgtctgataggtctgggcgatgctgtacagctccgtattctccagctgtctcgccattgcctcggagggcagtccctcctcgctggcagtccgcaccatctcgccgatcggattgtatacacggttcgacatcagcagtgcgagaagcagtacgatgatcgccacaagcagaccaattcccaaaaagaggaagccaacccgggtcatcgatccggtgagctgtcggtaggaaatcagccataccagcgtaaattcgtcatcaatctccgcagctacggacaggaatctcccctgcgccgtgcgcacaatttcggcggaagcctcggtcagatttctgtttttccacagaatatcctccagacgttccccgacccgatatatctccctcgttccctgctcataaacgatattcccgtccctgtcaatcagcaggaactgttcctcctccgtcttcggcagagttaaggtcatgatcttgtcgagatccatgttgacttggatgccgctgcgtttgcccccagtggtgggatccatcgatccgctggtcaggcagaggaggctctggctctttccgtagatatccagatatggaatgaccgcactctcgtgaaacgtgctcatccggaaaatatccagcatccgcgcatccccgttctggtcgatgggataggagggatttgtgcttttgatcagataatcgtcctcgagccagacataggcggagtggatcatcggattcacagaaacaagattcgtgacctcctgcgctgcgatccccgtggtgctgtcccatgcaaatgtattccggttgatcagcttgcagatatagacgtcattttcgagcactgttaccacattctccatggatttgccgtaattctgcaataccagtacataggtatccatccggttctcgtaatcgctctcctgttgctggatctgtgacacacggaaccacccaaagccgagaatacacgacagcagaatgcagactgcagccagtccgaagctcaccgcaaatattctcctcagaatgatctttcctctgtatttctgaaatatcttcatccgaatttttactctccatctgaatcttttgttacacttattctatctgctccgccgcccagaagccttttaattttacaaatggcggttccgaagtgcttaccagccgggcactcatccgattacccttccatgcaaagtccatcgcaacgtgcccttcctcctcatcaatgagaaagctatggaatacaaaatgtcccaacgtccactgtccacggcacacgcaggtatagtctgtctccgggaacttctggtactcccatgtgccgtcaccataataccactcgtaggttttctctgctgacacaagtgttatgatacattgctcccagtcaaagacaaccgtctcccaaccactggaatcgcaggttgcgcccgttttatcctgcattccataaaagtgccaacgctctacaccgcgccgcctctctccggctggcagtttttgtgtgtttgtatattccgacactcctgtcaccgcaggatataccgtatcataaaagcagtcatagatcatctgcagtcccgctggattcccgatcgtatctgccatcgtaaggaatacaagatcccattcggggaaacagagcgccagctgaccacccattccatagaatacaaaaccgtcataacgggtcttccacatcatatagccgtagcccagctgctcatcaaacgtgggctggagatctgtcggcacctgacaagcggttgcttccctcagaaaatctgccgggatcaactgctcaccatccaaaataccgccgcggcagcataacatggcgattcccgcaaggtcgcccagtctgcatacaagaccgcttccgccctgactgacaccgtagggatccttgataatataggcttcctcagagaatccgacccggcgcagcactttttcacgcagatagtccaacagatccatgccggtcagcttctccaccagcgccgccagcacatgggacgccgatgtgtcgtaattgaacaccgttcccggcacatgatccggtgtcacccggaaaaaggactccacccaatcaccgtcatagcgtttaaaggtcgtggattcataacaggtacgcatcgtaagtaaatcccggatcgtcatttcttcgcaccatggatgtgcgccaccctccggcagcttttccggaaaatacgtacagatccggtcgtctaagccaatcttgccctccgctgcc

SEQ ID NO: 952 - DNA, 8519 bp, unidentified
  source 1..8519: mol_type = unassigned DNA
atggcagcaagaatttcaaaggcggatttcgatgaaaaagtattaaaaagcaagcttccggtaattgttgatttttactcggattcatgtgtggcctgcaagaagctggcaccggttctcggagatatcgaggatgattatgaggataagcttcacgtatacaaggtcaacacaaactttgacggagagctcgctgatgagtatgaggtgactgcgaatccgacactgcttttcgtaaaagacgcagaggtcttagacagaaaggtcggcgcacaaaagcctgccgatttgaaagcatgggttgaagaattattatagtctttagattattatataaagcagtctgatacaggataataacacatacagataccacaatctgtgacacaggaggaaataaaatgactatcacagtagcaggagagaagaaagaatataaggatggacttacattaccggagcttatcgagcttgagaatgtagatatgcctgagtatgtaacagtttcaataaatgaggaatttgttgccacagaggataagccaaagacagtgcttaaggatggcgacaatgtagagttcctttacttcatgggaggtggatgctaatggcaatgactgatgagcagatcgagcgctattcacgccacattatccttaatgaggtgggcgttaaaggtcagaagaaattattaaagggcaaggtgcttattatcggtgccggcggactcggagctccggcagccatgtatcttgcagcggcaggagttggcacaatcggtattgtggatgcggatgaggtagatttatccaacctgcagagacagattatccacggaacagccgatgtgggcaaagccaaggtaaagtcagcaaaagagacaatgaacgccatgaacccggatgttcaggtcaatacataccgtatgtttgtagatgcgtcaaacatcagagagcttatcagggaatatgatttcatcatcgatggaactgacaatttcccggcaaagttcttaatcaacgatgcatgtgtgcttgagaaaaagccgttttcacatgcaggaatcatccgtttcaagggtcagctcatgacatatgtgccgggagagggaccttgctacagatgtgtattcaagaatccgccaccaaaggatgcagtgcctacatgtaagcaggcaggcgttatcggagctatgggcggagtaatcggttcgcttcaggctatggaggctatcaagtatttaatcggtgttggagagctgctcacaggatatctgcttacatatgatgcactcaccatggagttccacaagattaagcttccaaaggatacacacaactgtgcagtctgtggcgaccatccgactattctcgagccaatcgactacgagcaggaggtctgcgaggagacagcgggcagatttgatgcacctcgtacacaggaataaaaagacagtaaggaaaggaacgatatgagtatcataagaatgaaatatccgtttctggatgaaatagcaaaatatgctaaagagcatctgccggaggaggcgtgcggtctgatagcaggcagtgaggacgaaaacggtcgtctcatcacaaaggtatattacctgacgaatacagaccatgccgaggaccatttcacaatggatccaagggagcagctggcagccataaaggacatgagagcaaacggccttaagccgcttggcaactggcattcacacccgtctagcccttcaaggccatcggatgaggatataaagcttgcatacgatccaaatgcgagctacatgataatgtcgcttatggcagaaaatcctgtaatcaactcgtttcatatcgagggtggacaggtcacgaaagaggatttacgaatatattctgatgaatattacttctaaatcatatgttaatgttttgagtcgcagcgaaagctgcaaagaaaagtcagcttcatcgaagatggcttttcttttttagagaaagatgttattatagcatgtatatttaataaaacgaaagagcgttcgaaaatgaaattaaaaacgaaggaacttacaacatgtgcactttttgcggcacttatagcagttggagcatttatcaagattgatattccgcttcctatgtacaccatgcattttacattacagtggttctttgtgctgatggcgggatttctgctcggggcaaagctggcatcgcttagcgtgatagtgtatttgtgcatcggactggtgggagtgcctgtatttgcggcaggcggtggtcctacatacattttaagaccgggctttgggttcctcttaggctttgtgcttgccgcatttttaatcggagcgattacagaaaagtttaaaaagaccaatgcgtttacactcattcttccggcaacggtcggactggtggcatattatacagttggagcaatatacttttactgcatgaagaatttctatgcggcaacacctgtcagctggggcatagtaatagtagattactgtctgataactgttgcaccggactttatattatgcgtatcggcagcagtgttttctgctaagcttcgtcctgtttttgaaggaatactcaatggatacagtgtgaagcataaggcaaaaaataaagcataaagcgtataataaagtataaaataaggcatgaaataatatatgaaataaagtatggatatggtattacagggagataaaaatggcgtattttccgatgtttgtggatatgacggaaagagagtgtctgatcgtcggcggtggaaatgtggcataccgcaaggtgatcgtaatgctggattttggcgcgaatgtcacggttgtggcagaggatatatgtgatgagctgagaaagcttacaattgatgatatagcaagcgaggataaaacgggctcatatacggcaaatatagaaaacaatcagacggacccggatgcagcagatagaattacgttcataaaaagaaggtttgaacgaaaagactgtgatggcatggaaatggttatcgctgccactgatgacaatgctttaaatcatgagattgcagagtattgcaaagctaaggacatcatggtaaatgcggtcgatcaaaaggctgattgcagctttatttttccgtcatacataaaggaaaagaatcttgttgcggcattttcgagcggaggaaacagccctgtgctgactcagtatctgaaaggcaaagagcaggagattcttactccgtttcttggtgagctgaacgaatacatgggacagatccgcgaaaaagtaatagcgcaatatgacactcaagccgagagaaagcgtgtatttaaggaaatattgtgtgcagctattgataatggaaggattcctgaaatatagtttaaagtatggtattacagattttaagttgttgttcatttataaatgataaatggaaaatggcatgatccgtaggagagtaaaatgaggtatttaataggaacgagaggctcaaagcttgctcttgttcagactgattacgtgatagataagttaaaaagagcatatccggatgatgattttaaggctgttatcataaagacaacaggcgatttagagcagaaaaaggcactcgataagattggctcaaagggtatcttcgtaaaggagatagaggacgagcttttatcgggaaagattcatatggcagtccattccatgaaggatatgcctgatgaaccggcagcagggcttacatttgcaaaggcatggaagcgtgaagatccaagggatgttttggtactaaaaaatgccgcttcactggatgagcttcctcatggtgccgtgataggaaccggaagcaagcgcagaaagtatcagcttttaaagctgcgtcctgaccttaaggtggttggcatacgcggaaatatcgatacaaggcttcgtaagctatatgatggtgaaattatatatgaagagattgccgataatactgtaaataacaatgagatagctaacgaaaaacagaataagtataacgaatacaggctggatggaatcgtacttgcagcggcgggaataaagcgtatcggaagagattctgagatcacacagtacttttcagaggatgatatgattccggccccggcacagggcacactggcgcttgagctacgtgctgacaatgctaagctgatggcaaagcttgatgctttgtcagatgagaaaaccaatctgtgcgcaggcattgagagagaatttttaaagcgaatcggtggaaactgtcatctgcctgtggctgcatactgtgatattgtaagtgaaaaagaccgcggtaatgacagcaacaaaaataacaggctaaagcttcttgcgatgtttggctcagaggatggaaaaaagcttgcaaggacagagcaggtatgggatatgacatcagacagaaacaatattgtagagcgtgcggtgcacgatattcggtataaattggaaatcgactaaaaaaaatatcaaggcataatttttaatcataataattcagtagaaaaataattaggaaaatcatgagagaaaacacaggaaaagtagtattagttggagcaggaccgggagatacgggcctgctcactttaaaaggagaaaaatatataaaacaggcggattgtctggtgtatgacaggctgtcatcaccagagtttctttcaatggcaaaggcaggctgtgagcttatttatgtgggcaaggaaaatcacaagcatgtcatgaagcaggatgccataaacgagcttttgtacgagaaatcaaaatatcatgagcttgtagtccgattaaagggcggagatccgtatgtctttggaagaggcggagaggaagctctctacctggtagatagaaatgtggaggtagaagtggtaccgggtgtcagttcatcggttgcagcgcttgcggctgcagggatacctatcacacacagaggcatagcaaaaggctttcaggtcatcactgcgcacagcagaaaggatgaggaggcagatatagactattcccttcttacagatgagacaatcacctgcgtatttttgatgggacttgcgcatgtaaaaagcattgcagcagggcttatgaaagcaggacgaagagcggatactccggcagcagtgatatcgaacggtacatttgccgcgcaacgcaaatgcataggaacgcttgcggatatcggagaaaagattgaggaagcaaagctgacatcaccggctataatcgttgttggagatgtggtttcactgaatgacaggcttgatttctttgaaaaaagaccactgtttggaagaaaaattacagtaccgtatatcaaaacaaacgaattgatagcaaaattacagcagcttggagcagatgtcacaccggttaagacaggcataataaacccgataataattcctgaatttgccgataaggtaagatcagctgactggattgtttttacaagcaaaaatggtgtaagatcatttttctataatctggagctggcaggggcagacatcaggcttatagcaaatgcaaggttcgcagtggtgggaaaagctacagaaaaagagcttgtaaagcatcacataaatgcagatattattccggcagaacagaccggaaaagaacttgcaggagaattgagttcgtatatgggcgataatgatgaaatcaaagtctgcattttctcggcaaaggaggcttcacctgaccttgaggcaggacttaaagaaatatgtgaattagaaaagattgatgcatatgtaaatgagcaggcatatgagagtattcctgaaagcattggaaacatggtaagtgaagctgtttttacaagcgcatcaaatgtggaaagattttttcatatgctgccggagaatgcatacgtggaaacagcatactcaataggtgaaaaaacaacagcagcattagagcagcacaatgtcagagagatagtacaagctgatgatagcagttatgaagcgctggtagataaaatatcttataaagatgcttttaaagattaagaatttatggtgacaaaagttatataaagttatataataaatgcaaagttatataaggttatataaacttatatacgaaacaaaaagttatataaagttatataaggggaaaacaaaatgcaaaatccatttacattatcattcgggaaaaaaccactgcaatatatatcaagaatctcacagaccaatcagatagtagagacatttaggtcagaaaatcctgcaaaccagctttttatgataaccggggtaaggggatcgggcaaaacggttatgatgaccaatatagtatcagagataaagaaggatgaggaatggctgacagttgagcttaaccctacgagagatatgcttcagagccttgcagctaagatttacagtatgcctcagatgaataaaatatttgtcaatgcaaaactggatttttcagcgtttggactgggcgtttccatagaaaatgcagcaccggttacggatatagaaaatgtgctggaattgatgcttgaaaatataaagaaacataataagcggttactcatttcagttgatgaggttatgaactgtgaatttgtaaaagtatttgtcagttcatttcagatatttctgagacaggattatcctatttttctgcttatgacggggctgtttgaaaatatatatgatctgcagaacgacaaggcacttacatttttgtacagggcgcctaagataatgcttgagccacttagctttacagcagtcaggaaacactatatggatatttttgaactggatcaaagagaggcagacaaaatggcagctcttacaaagggatatccttttgcattccaggtattgggatatctttactgggaaaacagggatgatcacacgatagaagatattttaccggaatatgatcagtgccttgatgagtatgtgtacagtaaaatctggtcggagctgtcagagcttgataaaaaaatattgttggaaatatcagtaagtggtgaagaaaaggtaaaagaaatcagagaaaaactggatatgaattcaggattattctcggtatatagagaccggctcaaaagaaagggggttatagatacctctgagtacggtaaaattactctcacacttccacgatttgaagaatttgtcaaaacgcgccaaatgtaatatactatatccaactgaaacattaacataataaaggagaagcacaatgaaagaatacagtataggtacaaagtgtgtacaggcaggctatgcagccggaaacggagagccgagacagattccgattattcagtcaactacattcaaatatgacacaagcgaggacatgggaaagctttttgaccttgaggcagagggctatttctacagcagactgcagaatccaacctgtgatacggtagcaagaaaaatcgcagctatggagggtggcactgctgccatgctcacatcatcaggacaggcagccaatttctatgccatgttcaacatatgtgagtgcggagaccatatcgtggcatcatcatccatctatggaggcaccttcaacctcatcgcggtaactatggcgaagatgggtattacagctacattcgtatctcctgatgctacagaggaggagctgaatgcagcattcagaccaaacacaaagcttatgtttggtgagactattgccaatcctgcgcttacggtgcttgatatagagctttttgcaaaggtggcacacgagcacggagtaccgcttatagtggacaataccttcccgacacctgtaaactgcagaccaattgagtggggcgcagatattgtcacacactctaccacaaagtacatggacggacacggagccacactcggcggagcaatcgtagacagcggcaaattcgactggatggcacatgcagataaatatccgggactgtgcacacctgacgacagctatcatggcatcacatatgcagagaaattcggcaaggaaggtgcgttcatcaccaaatgtacagcacagcttatgcgcgattttggttctatgcagtcaccacagaatgcatttatgctgaatcttggccttgagtcacttcatgtgcgtatgccaaagcatgtggaaaatggacaggcagtggctgaatttttggaaaatcatccaaaggttgcctatgtaaactactcagggcttccttcaaacaaatactatgagagagcacagaagtatcttccaaacggaggctgcggagtcgtatcatttggcttaaagggcggcagagaggcagcgtctgcatttatgaaggcattaaggcttggcgcaatcgagacacatgtggcagatgcgagaacctgctgcttaaatccggcaacaagcacgcatcgtcagatgaatgatgagcagcttaaggaagcaggagtgccggcagagcttatcagaataagcttaggtcttgaggacaaggtggatttgattgcagatatctcaaacgcactcgacgctataaaataa

SEQ ID NO: 953 - DNA, 13947 bp, unidentified
  source 1..13947: mol_type = unassigned DNA
  misc_difference 5829: note = a, c, g, or t
  misc_difference 5830: note = a, c, g, or t
  misc_difference 5831: note = a, c, g, or t
  misc_difference 5832: note = a, c, g, or t
  misc_difference 5833: note = a, c, g, or t
  misc_difference 5834: note = a, c, g, or t
  misc_difference 5835: note = a, c, g, or t
  misc_difference 5836: note = a, c, g, or t
  misc_difference 5837: note = a, c, g, or t
  misc_difference 5838: note = a, c, g, or t
  misc_difference 5839: note = a, c, g, or t
  misc_difference 5840: note = a, c, g, or t
  misc_difference 5841: note = a, c, g, or t
  misc_difference 5842: note = a, c, g, or t
  misc_difference 5843: note = a, c, g, or t
  misc_difference 5844: note = a, c, g, or t
  misc_difference 5845: note = a, c, g, or t
  misc_difference 5846: note = a, c, g, or t
  misc_difference 5847: note = a, c, g, or t
  misc_difference 5848: note = a, c, g, or t
  misc_difference 5849: note = a, c, g, or t
  misc_difference 5850: note = a, c, g, or t
  misc_difference 5851: note = a, c, g, or t
  misc_difference 5852: note = a, c, g, or t
tcatttttcatccacaacctggaagatgtagaatttcagataatagctctcctgcgcctcccacagtattgggtggtcaggtgactgtgtcctgaactcgacctgacggagtcttttatgtacagctttagcggcctccttaatagtcttggtaagaagctcctgtgtcatgaagtgtgagcatgaacagcttgcaaggtagccaccgtctttgacaagtttaagtcccttcatattgatttccctgtagcccttaattgcgttctttgtagcttccctcgatttggtaaatgccggcgggtcaagtattacaacgtcatatttctcacctgcttcattaagctttggcagctcgtccaatacatttgcacatttaaaatgtactgtatcctcaagtccgttaagctttgcattggctctcgcctgttcaacagcatattcagatatatcaagtcctgtaacttccctagcacctgcaattcctgcatttaatgcaaatgtacccatatgggtaaaacagtctaataccctcttgtccttgcaaagcttctgcattgcaagtctgttgtacttctgatcaagaaagaacccggttttctgtccattcacaacatctatcatgtagtggacaccattctcaactatctcaacattagtgtcaaattcatcaccaataaagccctttactctctccattccttcaagagtacggactttggcatcgcttctttcatatactccacggatatcaatgcctttttcatgaaggatttccttcactttttcgacaataagcgacttaaatctgtcaatgcctaaagcaagcgattccacaacaagcacatctgagtacttatctataacaagccccggcagaaaatctgcctccccaaatataagacggcaggcaaaggtatctactgtgtcaaatctgtattcaaccgcagcccttactctctcctcaataaatgcctcatcaacaacatcagtgtgtcttgcgagcattcttactgtaatcttggattttctgttaataaatccgattcccatgaaataatcatcaaaatcaagcacctcaacaagatgtccgtcaattattccgtcagacatccattcaatttcgttatcatatacccaggcaccgcctgcctttaaggttcttccttcaccttttcttaatcgtatctttccgcatacgctgaataaatcttccattctgttccttcctgccagataattctgacatttatcttaattcttcataatatattaatccgttgacggattcccaagaaaataaaacatacatactcctgcaaccgtaataagaagcgacacgagcttaatccacgaaaatgctgtcttctcacttccaaataatccgaaaattccaagcagatatgatactattatctgtgcaactacaatcgtaacctccgctttagcaattccaagaccacttatactttttataactgtaaatgttataaatgcacctatcacacctccaagaagtgtaatcttgttgtcaaccttaaacagcttcatgatttcaggtcttccatcaattacccacataatcgcacaagtcgccagtgctgtcaactgcacaaacattgccgtaacccacacactgcttgcttttgtaacatttgtattaaacgcaccctgtaaactcataagtgtgcctgatattattgcaataaaaaaccctgccattaactaacctcctcattaatctgcataggataattattagttaataacaggatatttattcataatgttatttcgtactctgcgtactgttttcattattatttttagttgttttttctattgttgttgcaaatgtactgtaagctgtatcaacatttccaccatcatatacctgatgaagcataatctcatatctcatatacacttctcctactccgatatatttagcttttacaacagagtcagaataaatctggtgtaacttctggtagctttctgctctcttaacctttaaatccgcccttgcacagcttttcttagccatgtttccaagataatctgcataatcataagaaattgctcttgcaacagccttggatgcatctacattcttagtgtacggattaactactgccatcgtagtaacagacattgccttagaatcaaggtcatctcccattgaaggatactcacatattccataatctacatctgtaacattaatctctgcaagactgtctgcatctagcaccgtatagagcatatttccagtagaaaacaaatccgcacattctttaagacttactgtatttctgtcaataccaaatgcatcttttaactgagcgtacttagtaagaaccttcttaatcttttcctcattaagagatacttcagccctgttctctgcattaactccgcctatattaatataggctcctgctgctgcataattaaggaacattgaatcaggatcccattcaaacaccattgaaacatcctgattctcatctgtaatctgataattatcacttatattacgaatctggtctatagtatcaactgcttctgcatatttcttattatatacaagaaatgaagtgttgaacgacaccgggtaaccatataacttaccaccatacgaacatgcagtcattgcagccttaccatacacattctcattatagacttcaggatacatatcattctcagaggtaagacctgaaagataagccttctccatctcttcagatgtcagaaaatatatatcacatgcattgttattccttaccgattcgtcatatatataattaatatatgaatccgcctcaatatatactggcttaacagtcaccagttcattagatttcttaaactgtctggcaacgaattcaagataagactcatatgcgctgtcattataccagacattaactgtaataggtccactaagattaagcttcttcgcagcctgtgtcctgtcatctttattaccacagcctgcaaagactgtcagcatggtaacaatcagcatcatactgataaatcttcttaatttcataaagtaaactcctgattctagaaggatttcttaagcttagctatgcattcatctacatctgccttagtgattacaagtggtggaacaaatcttataacattagttcctgctgagaacagaataagtccgttatcaagtgctttggcaattacgtccttaggattaactgataactcaagtccctgcataagacccattcctcgtctctcgacaacaacatctattgtctcaacaagctcatcaagcttttcttcaaagtaagcagatacttccttgacattatctaatacatgctgcttctcaaaaagttcgaacaccttggttgctgctgcacatgcaagtggattaccaccgtatgttgttccatggtctcctggaactaatgccttcgcaacttcctctgtcgctgcaaatgcacctacaggaactccacagccaagagccttggcaactgtaaggatatcaggcttaacgccatactgctggaatgcaaacatacttcctgttcttcccattccgcactgaatctcatcaagtataagaaggattcccttctcatcgcataactttcttacaccttcaataaattctttagtagcaggataaattcctccttcaccctgtactgtctcaaatattatagcacaagttttgtcattaacaagttcctttacactgtcaaggtcgttatactgtgcaaacttaattcccggtatcataggtccgaatgcttcctgataatgcttattaccagttacagcaagtgctcccatacttcttccatggaatgaatgctgcattgcaataatctctgcatcagcctttccgttcttgacataataatatttctttgcgagcttgactgcaccttcaatagcctctgttccactgttagtaaagaatactctgtccattcctgaagcctttgtaagtgctgttgcagcctctacagccggttcattgtagaaataattagatgtgtgtataagcttatcaatctgtgcctttaatgcatcattatattctttattgttataaccaagtgcaaatactgctatacctgctccaaaatcaagatattctttaccatctgtatcgtaaagtcttactccgtcacccttatcaagtactatctggtaacggttgtatgtatgaatcagcttctcttctgctgtttctataatctgctgtgtattcatgattactctcactttcctattcttatgagcacacattttcacatgagccaatataatattataacctcaaagcttacggttcgcaattatttatctgagtcaaagaatttttctgcatcatctgaaagaatagctgtaccaacacccttgttagtaaatatttcaagaagaaggcagtgtggaattcttccatcaagaatatgtactcttgatacaccatgctcaatagcatctatacagttattaagcttaggaagcataccgccgccgattgttccgctctctaaaagagttctcgcctctgaagtagaaagctcagatataagtgaatccttatcgtcaaaattcttatatacaccttcgatatctgttaagaatgcaagcttctcagcattgacagctcttgcaattgcacatgctgcgtcatctgcattaatattgtatgcatgaaagtcatcatcatatccgatagggcatattactgggaggaaatcgtccttaagcaaggattcaataagtgttgtgtcaacatctgtcacttcaccaacatatcctatatcctcacccttagaatacttcttctcaacctttaacatgccgccatccttaccactgataccgcatgccttgacgccaagctgctcaatcattgaaacaagactcttattaaccttattaagaaccatctcggcaatctccattgttggctcgtctgtaactcttaaaccattcttgaattcaggtgtcatgcctgacttttcaacccatttgctgatttccttgccaccgccgtgaacgatgattggcttaaaaccaacaagtttaagaagaactacgtcctgaataacttttctcttaagttcttcatctaccatggcacttccgccgtacttaactacaattatctttctgttaaatttctggatataaggaagtgcctcaacaagcacctgtgccttcataagttcctctgtcatatcttttgcgctcataataatctccatttcatatttattcagatatctatttgctttaaaatgctgtgtcagattagcttctgtaatcagcatttatcttgacataatcaaatgtaaggtcacagccccatgctgtagcgcttgcatccccctgcttaacatccgcaatagcaattacaggattctgtgaaagtatttccgttgctttctcctcgctgtaatctgtagcagttccatctttaacaatctgaagctcacctgcttcactcttaaagaatatgtcaaccttttcagggtcaaagtcagcaccagaatatcccattgcacagagaattcttccccaattggcgtcatgtccgaatattgctgccttggtaagacttgaagtaacaattgacttagcaagtgtcttggcttctgccttagttgttgcaccctttacctgaacctcgaaaagacatgtgcagccttcgccgtcacctgcaatcatcttggaaagctctgtaaatacatagcttaagccttcatagaaagcattataatcagcaccctcttctgtaatcttcttattgccagccattccattagcaagaannnnnnnnnnnnnnnnnnnnnnnntagcagagcattgttgccatgttaggatgaatcattcctgcgcccttgcacataccaccgattgttaccttagtacctgcaacttctacttctacagcaacctgcttgcttcttgtatctgtagtcataattgcctctgctgcctgtgttcctgcttctaatgaatcatcaagcattggagcaagcttttcaattcctgcacatattctgtcaacaggaagctgcattccgataacacctgttgaaccgataagtactgcattctccggtacattaagaacctttgcaactgcctttgcttcttctgcacatgcgttatctccttcaacgcctgtacatgcgttggcaacaccgctgtttacaactacagcctgtgcaaagtcttcattatatacaatgtttctgtcccatttaacaggagctgcaaatactttgttagttgtaaatgttcctgctgtaacacatggcttctcactgtatacaagtgccatatctttctttccgttcttatatttaatctgtgcttcacatccggcagccttgaatcctttagctgctgtaacaccgcctttaattatattcataacatcctcctattgtaccatcacatatactctgtcattgtgcatatttcgtcgtgtaaattctgaatttacgctacatttattatggaaacattggtgcaagctgtaatccctcattctctggaagtccgaagagaaggttcatattctgtactgcctgacctgctgcacccttaacaagattatctaacgcacccatcattataagtctgttagttcttggctcaatcttaaatcctatatcaacaaagttgcttccctcaacccagcgtgtttcagggcatacatctttaggaagtactcttacgaaatattccttatcatagtacttgtcatatgctgccttaacatcttcatatgtaacatctttggcaaggttggcgtatgctgttacaagaattcctctgttcattggaaccaaatgtggtgtgaagataagctttaaatcatctcttccacatgcataacctaactgttcctcaatctcaggtgtatgtctgtgagttcctacgccatatgccttcatgctttcattaacttcgcagaaaagattggcaaccttagcgccacgtcctgcacctgaagttccactcttagcatcaattataattgtatccggattgattattccttccttaaccattgggtaaagtgtaagaattgatgttgttgtataacagcccgggttagcaatgattcttgtgtctttgcttaccttatctctgttaatctcacataagccataaacagcttcatcaatatactgtggtgctttatgctcaagcttataccactgctcatatacattaacatttttaagtctgaaatctgcactcaaatcaataatcttagtctttgaaagtatctcatcattaacaagtgacgcacataagccctgtggtgttgctgtaaatataacatcaacctcgttagcaagctgctccatattgtcgtccatacattttgcatctacaagcttaaacatgtttctatatacatctgaataattctgatctatgtaacttctcgaaccgagccatacaatctctgcatccttatgtcctaataataatctgacaagctcgttacctgcgtaacctgtcgcaccgataatgcctactttaatcataactcctccttgttttgcgaagcaaaatgcatatattcaacatttatgcataaaataacgcaaaatgtaaattgataacctacattatagcaactttttttcttatgtaaaggatattttaaagaaaattcatatttatacatttttgttgcatattaatgtataatatgcataatttgttgttgcatttttaaataaagtagtttattataatctgcaggtgcatagcatatgtgttttactatgtaaacttaataatatacggaggaatatataatgaaagaaaaagttattcttgcttattctggcggacttgacacaactgccatcatcccttggttaaaggaaacatacaactatgatgttgtctgcgtatgtgcagactgtggtcaagaggaattggacggacttgagcagagagctctctcatgtggtgctgccaagttatatatagaagatatcactgatgaattctgcgacaactacatcgttccatgtgttcaggcacacgctgtttatgaaaataaatatttacttggtacttcaatggcaagacctcttattgctaagagacttgttgagattgcccgtaaggaaggtgctgttgctatctgccacggtgctactggtaagggtaatgaccagatcagattcgagcttacaatcaaggctttagctccagatatcaagattatcgctccttggagagattctaactggaagcttcagtctcgtgaggatgagattgaatactgcagacagcatggtattcatcttccattcagcacagactgcagctacagccgtgaccgtaacatctggcatatcagccatgaaggtcttgagcttgaagatccagctaatgagcctaactacaagcatttattagttcttggatgcactcctgaggaagctccggatgaaccagaatatgttactatgacatttgaaaaaggtgttccaaagtcagttaatggcaaggctatgaaggtttctgatattatcagagagcttaacagacttggtgccaagcatggtatcggtatcattgatatcgttgagaaccgtgttgttggtatgaagtcccgtggtgtatatgagactcctggtggaacaattctttacgaagctcatcagcagcttgaggaattagttctcgacagagatacaacaacattcaagatggatgttggaaacaagtttgcacaggttgtttacgaaggaaagtgggagacacctcttcgtgaagcacttcaggcattcgttgagaagactcaggaatatgtaacaggtgaagttaagttcagactttacaagggtaacatcatcaaggctggaacaacatctccatattcactttacaatgagtcaattgcatcattcaagacaggtgatatgtatgaccatcatgacgctgacggattcatcaacctctttggtctttcacttaaggtaagagctatgaagaagcttgagaatgagaagaagaacaataagtaattaaagaatataaaaaaacagcatccccggcatggttaataaccatgccggggatgttgcttatttattcttaattatattctcttcttttggacttcaacttgtctttccactgctctaacgtccaattccgcgtgatggcaagcgactggattattttccaattacgacacttacataagccaatacaatgctaatactatcaagtagaaaataacaaatacaaaaaacacaatactcagaaccagataaatagtcggttcatttcccatcactgcattcttgggatttattttactaacatatatcgtataaacctcccctcttgtatgaagcggtgaaaatatattcatacttacccagccaacataattataccctttatcgtcacggataaggaactcagaaaagtaatgattgctattaccatatgcgataccttcagttttatagaattgagtttttatgtataaatatctagccaaaaatatcatatccagcataatataaataattatatattctccatgcattattgcatcccccttaatgaatcacatctaatataaataattgttctcatttcctacaccacatatttcatgttattcgacagagttaaatgcgatgtgttcacatgctttgtcatgtttactcttttagtatatattaaatttcaccatttgtaaaatacctgttcgttgcatggagttcaatttcttgaaattcaaaacatgaattatatgaattaacattaatccattgtaacttcctatcaattcataaaaaatccaccacttatatgtaaatttcacagtttttcttattcaatcttatatagaaaaccattttttgactgaatattcctatagtgctactgatttttctgactttataggttaatttattaactatcattatagtctcatgtgttttcgacctataagactttcaaatattcgactacctataggtatcatgttttccagattaattatatatcatgataatctggctgattggactttttctctgctttctcatatgctaatgtccaataactcattgactacaaggcggattggacactacaagcagcttattcagcaaaaagtccaatctttccagatttcacaacaattctggaccttttacctcattctcttgcttgtaaggtccaatcctccacactttctcactcaatttggacttccacatgcctcttcaccactccagcgtccaatccgccaccacagctccaccgcatattacactccacctgccaatccaccgcacaaaagtcttccgtgagaatgaagtcaggcgactatacaactcgttttcaaaccgttgcgaagacgccggcacttaataagctgggacagttggcttaacgccaacgaatcccagcgaacttagtaccgctgcgtcgtagaacgagcgcaagcgtgtttgaaaacgagttgtatagccgcctgacttccatttccggaaggcatcaccccttaaactttcctttatcaatctccttctcttccactttcctattcacatatgtccgaagcagcgcataacacactgagctgattggaataaatgtaagcatccccattataccaaacagattgccaccgattgtaacagcaacaagcacccacattcccggcagtccaactgaacttccgacaacatgaggatatataagatttccttcaatctgctgtaatataaggaatactcccacgaatataagtgcctttaacgggcttgtcatcattataagaatcacaccgactatacatccgataaatgcaccaacaatcggaataagtgcagtaaccgcaataataattcctataagaagtgcataaggcattctcaatatagacaatgtaataacaaacatcgttccaagaatacatgcttcaagacactgtcctgacaggaaattagagaatgtagtgttggtaagtcttaacacttcaataattttatctgccctgttctcagacatgcacacatacataagcttcttgcattgcgctgtaagcctctctttctgaaacagcacatacacagaaaagacaaatccaataaagaaattagtgactcctgagaaaaatccgcttattgcaccaattcctccattgataattcctttagttcctattgaaaggaaattcataacatttgaaagaacagaatcccagttgattgatatgctgcttaacttttcctcatactcaggatatgcagacagcttgacctgcagccagttgataagattattaaccgctgtcggcacctgtcttataaggtcagctattgtgtttaccagttcaggcacaaccacaaaaagtacacctgcaataatagccagtatcaaaatcagtgtaagcatataagcaagcactcttataagtctgggatgcttcttcttacaacgcttgtcaaacagcctgttaagtcctttttcaattgctttcataggtacattgaatacaaatgcgatgactgcgccaattataaatggcattacaagtcctgcaagatatgatatagaatcaagaattccagtcacattgttaagggcaagatatattacaattagcactgcaccaatcgtaattcccttaacaacctgactgtctttaaaatgtcctttgttcatacaacccctccactctttaaagttacttctaatatactatacagaagtccgggattcaaacatattatataaatttaagaattgtaaaatgttagttatactgtgcatcaaccatactcatcatcattcgcatattgaatgctcccataaattttactgatggaagatatacaaaatgcttcttctggattacacagtcatcctcatattcatcatcatacacttcaagtctcataacttcattaacaaactgtcccttacccggttcaacattgaatgcaccctcaataaatggtgcataacagtctctgtcaccactctggtcaggatcatatgcaataaatgtatgaatcatactttcatatttagtaataaacagtccattatctgcaccgctttcctttagtgcatttctgtaattgtccatctcttcttcatacactgctgactgtttgttaataatctcttctaactcacccgcagtcataggaatattttctgcaaagaaaaatgcgagtggctggatgcttccatataataaaaagcagctcatatccgaattaagagtctgtgatacctcaagcttatcagtatcccccatatacataagaactgcaaaattgcccttcgcagtaaactccttaagcatattaatagctgcctttaattctgttctcgaaaaatgtctcataatttctaattccttttcatttaaactatcgttgattatatcacctatgactgatattttcacttccaaattttacttttcataatttcatacaatcttcattcagatatatggacttcaatatgccaccacttctcaaaaagaaaggggcacgaaagcttttcactttcgtgcccctttgcacttcgacactaactatagtcccaagtgcgtgaaattgcaacaataaaaatatgcgttttttccttaattcataaggtgattttctaaaaatttctttattcgtaaagtgggtacttatctgtaagtcccttaacaagctccattgccttagcctggttagcatctacatcatcaacaagcatagcaattgcttctgcaacaacatccatatcagcctcattgaagcctcttgttgtaacggctgctgtaccaagtctgataccacttgttacgaatggagaagctgggtcattaggaattgtattcttgttacatgtaatgttagctgcatccaaaagcttctcaacttccttaccagtctttcccttgcttaagaggttaacaagcataaggtggttatctgtaccaccagatacgatatcaaaacctctgttcataagtccgttagcaagtgctgatgcattcttaacaacattttcagcatataccttaaagcttgggtcaagcgcttcctttaagcacactgccttaccagcaataacatgcataagaggtccgccctggattccagggaatacagccttgttaagcttgaacttctctgctgcctctgctgaagcaagaatcatacctcctcttggtccacggagtgtcttatgtgttgttgttgttgtaacatctgcatatggaattgggcttgggtgtgcaccaccggctacaagacctgcaatatgtgccatatctaccataagtaaagcgccaacttcatcacagatttctctgaacttcttgaagtcgattgttcttgcataagcagaagctcctgcaataatcatcttaggcttgcattccttggcaattcttaatacttcatcataatcaataaatccgtctgctgtaacaccataaggaacgatgttaaagtattttccagaaatattaactggtgaaccgtgtgataaatgtccaccacagtcaaggctcatacccataactgtatctccaggattaacaagtgcgaagaatacagctaagttagcctgtgctcctgaatgtggctgtacatttgcatattcacagccaaaaagcttctttgctctttcaattgcaagtgtctcaacaacatcgacatactcacagccgccgtaatatctctttccaggatatccttctgcatacttattagtaagagggcttcccatagcagccataactgccttacttacaaggttctcagaagcgataagctcgatgtggcttctctgtcttccaagttcatcatccatagccttagcaaggtctggatcatagtttaatacttcatcaaatgaatacat

SEQ ID NO: 954 - DNA, 9718 bp, unidentified
  source 1..9718: mol_type = unassigned DNA
atggcaaagaaagttgtattagcaggtgcttgtcgtaccgcaatcggaacaatgggtggtggattaagcacagtaccagctgcagatttaggaagcatcgtaattaaagaagcgttaaagagaactaacgtacctgctgatcaggtagacgaagtattaatgggatgtgttatccaggctggtcttggacagaacgttgctcgtcaggcttctattaatgcaggcttaccaatcgaagtacctgctgtaacaattaacgtagtttgtggttccggtcttaactgtgttaaccttgctgctacaaagattttagcaggtgaggctgatatcgttatcgctggtggtatggaaaacatgtcattagctccattctgcttagacaaagctcgttttggatacagaatgaacaatggcgtattaaaagactgtatggttaacgatgcattaacagatgctttcaatcagtaccatatgggtattacagctgaaaacgttgcagaacagtggcatttaacaagagaagagttagatgagttctccgctaattcacagcagaaagctacagcagctatcgaagctggtaagttcaaagatgagattgttcctgtagaagttaaacttaaaaagaaaacagttgttgtagatacagatgagggaccacgtcctggaacaacagcagaaagtatttctaaattacgtcctgctttcaagaaagatggtatcgtaacagctgccaactcttcaggtattaacgatggtgctgcttgtgttgttgttatgagcgaagaaaaagctaaagaattaggtgtaactccaatggctacatggatagcaggagcattaggcggagttgatccttctatcatgggtgttggaccagttgcttctactaagaaagttcttgcaaaaacaggcatgagcattgatgactttgacttaatcgaagctaacgaagctttcgcagctcagtcattagcagtaggaagagaattaggaatcaacccagagaagttaaatgttaatggtggagctattgctcttggacatccagtaggagcatcaggatgccgtatcctcgttacattattacatgagatgcagaaacgtgatgctaagaaaggtcttgctacactgtgtatcggtggtggtatgggctgctcaacaatcgttgaaagagactaatcacgtatagaatgattacatatatccgggttcagttttcgaatccggttatatcaattacatagtttgtaactatttaattatctagattgaatagttagctaatgtaatctgaaaggagatacatacaatgggatttatcgattatgaagtagatggccaggttggtattatcaccatcaatcgtccaaaggctttaaatgctttaaacagtgaagtattaaaagatttagatgcaactattgatgcagtagatttagacgcaatcagatgtcttatcattactggtgctggagagaaatctttcgtagcaggtgctgatatcggagagatgagtacacttacaaaagcagaaggcgaagctttcggtaaagctggtaatgatgtattcagaaagattgaaacacttccaatccctgttatcgcagcaatcaacggattcgctttaggcggtggctgtgagatttctatgagctgtgacatcagactttgctctgagaatgcagtgtttggacagccagaagttggtcttggaatcacacctggttttggtggaacacagagacttgctcgtatcgtaggacctggaaaagcaaaacagttaatctatactgctcgcaatattaaagcagcagaagcttacagaatcggtctggttaacgaagtttatccactcgaagagttaatgcctcaggctaagaagatggcaaagggtattgcaaagaacgcacctatcgcagttcgtgcatgtaagaaagctatcaacgaaggtttagaagtaggaatggatgaagctatcgtaatcgaagagaagttatttggcagctgcttcgagacagaagaccagaaatacggaatggcattcttccttgacaaaaacaaagaaaaagtaaaagagccatttaaaaactgctaattaatcaattatacatattgtattattaattatcggaatacattacattttataggaggtttcaaacaatgaaagttggagttattggcgcaggtacaatgggatcaggtattgctcaggcattcgcacagacagaaggatacgaagtatatttatgtgatatcaacgatgaatttgctgcaaatggtaaaaagaaaatcgctaaaggatttgaaaagagagtagcaagaggaaaaatggatcaggctaaagctgatgcaatccttgctaagattactactggtacaaaagatatctgtacagatgctgatttagtagtagaagcagctcttgaagttatggaagttaaacagcagacatttaaagaattacaggatatcgttcctgcaacatgtatgtttgcaacaaatacatcttctttatctattacacagattggtgcaggacttgacagaccagttatcggaatgcatttcttcaacccagctccagttatgaaattaattgaagttatcgctggtcttaatacaccagatgaaatggttgaaaagattaaagctatctccgtagaaatcggcaaaacacctgtacaggtagaagaagctgcaggattcgtagttaacagaattttaatcccaatgattaacgaagcagttggcatttatgctgatggtgttgcttctgttgaaggtatcgacacagctatgaagttaggtgctaaccatccaatgggacctctcgctttaggagatttagttggtcttgatatctgccttgcaatcatggaagtattatataatgaaacaggagatcctaagtatcgtccacatccattattaagaaagatggttcgtggtggaaaattaggtcagaagactggtattggattctacgattacagcaaataattaaaaaagtgaatacggccgtggggactatgctctgcgtctccacggcttttaaggtggttctccaccccaataaccaatttattatggaggaatgaaaatggatttcacattaagcaaaaagcatgaaatggctagacagctctttaaagagttcgctgaaaacgaagttaaacctcttgctcaggaggttgacgagacagaacattttccagaagaaaccgttgcaaaaatgcaaaaattaggtttcatgggaattcctgtgccaaaagaatatggcggacagggttgtgatcctttaacatacattatgtgtgttgaagagttatctaaagtttgtggtacaacaggtgttattgtatccgcacatacatcattgtgtgcagatccaattcttacttacggtactgaagaacagaaacagaaatatcttgttccacttgcaaagggtgaaaagttaggtgctttcggtcttacagagccaggtgctggtactgacgctcagggtgttcagacaaaggctgttttagatggtgacgaatgggtattaaacggatctaaatgtttcatcactaacggttcttatgctgattactatattatcatcgctatcacaagtgttgatacagatgcaagaggaagaaagaaaaagaaattctccgcatttatcgtagaaaaaggaactccaggatttacatttggtacaaaagaaaagaaaatgggtatccgtggttcagctacatatgaattgattttccaggattgtcgtattcctaaagaaaatcttcttggacctatgggcaaaggtttcgcaatcgctatgcacacattagatggtggacgtatcggtattgcagctcaggctcttggtatcgcagaaggtgctttagatgctacaattgcttatgttaaagaaagaaaacagtttggcagagcaattgctgcacagcagaatacacagttccagcttgctaatatggctacacaggtagaagctgctaagttacttgtttataaagcagcaatggcaaaagcaacacagagagtatactccgtagaagcagcaaaagctaaattatttgcagcagaaacagctatggatgtaacaactaagtgtgttcagttacttggtggttatggttacatcagagagtacgacgtagaacgtatgatgcgtgacgctaagatcacagaaatctacgaaggaacatcagaagttcagcgtatggttatttctggtaacttattgaaataaggagggaaaatactgtgaaaatcgtagtatgtgttaaacaggtacctgatacaaaaggtggagttaagtttaaaccagacggaactcttgatagagcagctatgcttactatcatgaatccagatgataaggcaggtcttgaagctgcccttagaataaaagatgaaacaggcgcagaagtaacagtagttactatgggtcttccaaaagcagaagaagttctgcgtgaagctatggcaatgggtgctgacaagggtatccttgtaacagaccgtgttttaggtggagctgatacatgggcaacatctacaacaatcgctggagcacttagaaatattgattatgatttaatcatcacaggccgtcaggctatcgatggtgatactgctcaggtaggacctcagattgctgaacacttagatcttcctttaatttcctatgctcaggatatcaaagttgaaggtgacagtgtaatcgttcagagacagtatgacgacagatatcatgttttaaaagctaaaatgccatgtgttatcacagcactttccgaattaaatgagccacgttatatgactccaggcggaatctttgatgcatatgatgcagaaattactacatggggaagaaaagaccttaaagatgttgatgacagcaacttaggtcttgcaggttctccaactcagatcgcaaaagcttctgataaggtacgtaaaggtaaaggtgtcatgatgacagctgaaacagcagaagaaggcgttgagtacatcatggacaaactgttaacaaagcatgttatctaattgtaaaggaaatgtggtgaatagaatgaatttagaacaatataaaggtgtatttatctatgctcagcaggttgacaataagattgatgccattgctttagaattacttggaaaagcaaatgaccttgctgcagatttaggaacagacgtaacagcagttttaatcggttctggcgtaaaaggcttagttgatgaacttgctgaatacggcgcagataaagttatcgtagttgatgaccctgaattaaaagaatacagaacagagccatatacacatgcactggcatctgttatcaacgaatacaaaccggacattcttctggttggagcaacagcaattggtcgtgacttaggacctcgtgtttctgcaagagttgcaacaggtcttacagcagactgtactgttcttgaaattggtgaattcaaagctcgtggagataaagaacctcgtcagggtcagttattaatgactcgtcctgcattcggtggtaacacaatcgctacaatcgcttgtcctaaccatcgtccacagatggctacagttcgtcctggtgttatgcagaagaaagagcctgttgcaggtgcaaaggcagaagttattgagtacaatccaggatttactccaaatgacaaatatgttgagattcttgacattgtaaaatctgttacagaaacagttgatatccaggctgctaagattcttgtatctggcggacgtggagttggctctgctgaaaactttgcattattagacgatttagcagaggcacttggcggaacagtttcctgctcccgtgcagttgtagataacggatggaaaccaaaagatttacaggttggtcagactggtaagacagttcgtcctaatgtttattttgcaatcggtatttccggagctatccagcacgtagctggtatggaagaatctgatatcatcattgctatcaataaagacccagatgcacctatctttgatgtagctgattacggtattgttggcgatgcattaaagattgttcctaagttaacagaggcgatcaaagctcaggttaaataatttcaaatcatatcagactcattagattatgtgagttactgattgaggattgaaacttagattttttgtggaagtctagtatatgcattctcagatgttttgtgtattgacgattcattattaaaagaagcatataggagatttgtgctgaattctataaaatgtatttatgcagggaatctttttgaagattccctgttaaagtgagatagtaggactacagtttataactgtggtcctttttactttcattcagttggcatagcccgctacgccgtcttcattcaggaaaaattctccacaaattttaacgcacatcttgcaaaagcatttttcaaacacgctctagtatagtatccattcagtgtttatgaataattatttgatagttcacaataaaagatgcacgaagtaaattagaaaaactatatccaataatattttagaaattagatagatgctatactagagcgtgtttgaaaaatcattcctacaatctgcacgccccaatttgcggtatattttgccttcattcagttgacgtagcccgctacgccgccctcattcaggtaaaatctcccacaaattttaacgcacatcttgcagaaagcatttttcaaacacgctctagtaaaatacgtcatttttattttatatataataaaaagtaaacataataaagaagtacttatcacaaaataaacataatttgtcaaaaatagtggaaattaattccaaatatgttataatactcttgcagcagttaaccgagatatgagaggaggcatttatggcacaaattattgcttcaacaaaagaaatatctaataagagagagtcactgatagtattgagtaattccttaaagaataagatttcgcttttagaaactttggggaacagtcttaattctatgtgggaaggcgctgcaaaagagaagtatgtaaagcaacttaagacagacatttcaaagatgcggaacttacttaagacaattttggaatttatattgatactagagaagattattgcaatctataataaagcggagaagaagaatgaggcgacagcggtaagctaggagggggatttatggcagatttaattaatgtaactccagagaagttaaaggcgacagcaagttctttccaacaggcaggaaaggacgttaagaaaactacctctgatatgcttcagttagtgaggggaattagtagttccatctggagtggagaggcgagtagtatatatcttggtaagtttaatggattggatgccgatatcgccaagatgtgcaagatgatagaggaagaatcacagcatttgacaacaattgcacaggaataccagttagcagaagaacagaataaacaggttgcggcaacattaaagaataatgtaattgcttagattgtatagacagatgaatagattatgctgtcagttatgattttttgtcacgacaaaagagaaggagatttgattggaaagatatgtaatcagtgtgtagcgcttatagataaagaatttttacgtaattttatcataagcgatgaagaatatcatcaggtgaatatagagggaatacagccgccagatttacttgtagtagaaatcacaggtatagaggatttatgcagagcgaaacgaataagggggattttcccaagaggacgattgctagttgtaagtactaatcagatttcagcagagtactatttaattccggaagtttcaccggatatgcttttactgaaaccatatgtatatgcgaaagcttgtaggattatataccgaagtcttacatggtgttgtaaggataagtgtagaaagaaaaaacaagaagatatattaaagattcggacaggaggggagatttattgttttcattatgaagagattcagtatttagaagcaagagataagaagattatcttgcatgtaaataagtatgagatttctttttatagttccttgcaaaagttggagaagagcctgccagattattttattcgttgccatcgtagttatattgtgaattttatgtttattcaaaaagcagatttgataaatggtgaattttatttgaataaaaagacagttattccaatttctcagaaatataaggccaaattagcaaaaatgttgtaaaaatataaggattcaaggttcgatttaggttgaccgagttatacaacggtggtagaatatactcatgatatttttttaacaagagcagaagttgttaggaggagaagcatgagtttcattaaagaatatgcacagaaacttgttacagcagaagaagcggttaaggtagtaaaatctcatgattgggtagattatggttggacaaccggtactccagttgcattggatgcagcattagcagccagagcagatgaattagaagatgttaagattcgtggtggtatcttattaagagaaccagagattttcaaggtaaataatgtagcagatcattttacatggaattcctggcatatgggtggtttggagagaaaggcaatcagtaaaggatttgcatactattctccattaaaatattcagaacttccacgttattacagagagaatatcaagcatttgaatgttgcgatgttccaggttgctccaatggataaacatggattctttaactttggaccaaatgcatcccatatgatggcagtttgtgaagctgcagatgtaattatcgtagaggttaatgagaatatgcctcgctgtttgggtggatttgaagaaggcattcatgtttctcgcgtagattacatcgtagaaggcgagaatccagctattggtgagttaggagctggcgcaccaccaacagaagtagacaaagccgtagcacagcttatcgtagaagagattccagatggagcatgtttacagcttggtatcggtggaatgcctaatacagtaggttccatgattgctgaatctgatttaaaggacttaggtgtacatacagagatgtacgttgatgcgtttgttgacattgcaaaggcaggaaagattacaggcttaaagaagaatatcgacagaggacgtcaggtatatgcattcggtgcaggtactaagaagatgtatgattatctggatgataacccagaatgtatgagtgcaccagttgattatacgaatagcgctaagacaatagcacagattgataactttatttctatcaataatgcagttgatattgacttatatggtcaggttaatgcagagagtgcaggtataaaacagattagtggtgcaggtggacagcttgatttcgttcagggtgcatacttatctaagggtggtaagagttttatctgttgttcttctacatttacatccaaagatggtgtaaagcatacaagaatcagacctactttagcagaaggatctacagtaacagatactcgtcctaatacacattatgtggtaacagaatttggtaaggtatgccttaaaggtatgtctacatgggaaagagcagaagcattaattaatattgctcatccagatttcagagatgaattaattaaagaagcagaaaagatgcatatttggagaagaagtaacaaataa

SEQ ID NO: 955 - DNA, 20791 bp, unidentified
  source 1..20791: mol_type = unassigned DNA
gaagatagttagctggaaacggcttgtgaaaataggtagtcgccgacttgaacaggaagctctgagagaaatctcagggcttttttgttgcgtctgtagaataacggagaaattctttgtggaaagtgctgcgggcgggatgcttgacagaacgatcgcatcggcatacattgagagtgtgatagacgggaaaggcaggatgggtggcgtatgaataaatcggaaaggaaacggatgctttgtgtctcgcttgcggcgggcgcgatacttctatgtggtgtgctactcgttctgctgatgcgttatcagcacacttctgcagtccgcccacaagaccaatatgtggggcagatcccggcttcttacagcacggtggatgcagacggcgatggtgtggatgaccagacagatgtgctcgacaatgcgctggcctatgtggatacccgtccaaaatacaagagccgttattatcagaccggatatccggacgatggctatggcgtgtgtaccgatgtggtggcttttgcgctgaaaaatgccggatatgatctgcaggcgctggtggacgccgatatccggaagcatccgcaatggtatgacattcagcagccggatgccaacattgattttcgccgggtgagaaacctgaaggtgttcttttcacacacagcggttgccctgaccacagaggtctcggaaacagaagaatggcagggcggcgatctggtgatctttgaaaaccatatcggcatcgtgtccgaccggagaaataaaaacggagtgccctacatcattcaccacaatgacccctggcaggcggcttacgaacaggacattctggagaaacgtaccgacatcgtgggccattaccggatctcggaataatacgccaaaagcggccccgccgcgttgtggatgcaacgtgacggggccgctttgcgatataataatggagaagaaaccgaagaaaattccgattattccagaccggccatctgcttgatggccttcatggcgaaggtcagggtgcggcccatggcaacaccggccatcaggcagggatagttgttggcgaagaaactgccggacatatcaccagtgatgtagaggcctgccatgggctggttgttggtgtccagggcctggcccttttcgttgatggcaatgccctgctcggtggtcagcagcgatgcgcccagccagcagccatagaagggagcggtgcggatggcgctcagacggtaagcaggcttgccgaagtcctcgtcgttctgcttgtcgtacagctcgttatagcgctccacggtagccaggaaggtgtccttggcatcgccggtaaagcccatcttgtcagccagctcgtccagcgtatcgcacttgaacatcagacctgcttcgatgtgcttctccatggtagaagtgaccatctgaggcatattacgagacatggcagagcagccgatggtgtggaagcgctcaatgtcctcggcaaagtttgcgtcgtggatctgcgcatagacgcggcccggctggtgagaagcggcatagacgatgtcgttgtaggggcagctctcgttggcgaagcgctcaccgttgcggttgaccttcaggaacggctgggtgccggtgttgtactggctgacggtgccggggaaagccttgccgccaaaggcactctcgctgtccacataaccggcatccacgccgggagccacgatgccgcggtcaaacagcatgggagcggattccttgtccaggttggcaccggcccacacagcagcgcggatgccgtagcctttggtggcgggggagtaggagcaggcggtggtgacgctggtgcccagcggatccagctgctgcatcatgtacgggttgccggcgtagccgccgcaggccagcagaacgcccttggctgcgttgtagcggatgaagtggtcgtcgtccatgttctgagcgatgacgccggtgatgcggccggagtcgtctttctccagcttggccaggctgaccttgaagtccacatcgtagcccagctcgcggatgtagtccagcagcagctcgttgcggggcttgccggactggttctcgctggccatgtagttgtgctcttccacggggaagaggtagtcggtgttgtgctcggcgttctcggcgggccaggcagcctcggaaccggaagtgaagtcgcactcccagccgtacttgtcctccaggatgctgcgcatgaagtcgtgcatggcggcggactcattgatccaggtgcggacaacgcgctggtcgcacttgccggaagcgtagcgggagatctcgctcagcagcttggcgcggtcgaagggctcctcaccagcagccttggctgcggcggagtcgatggcgccgtaccagtggcgggtgtcctgcacgttgccgttctgctcgatgatgcggaagttcaggccgttggcggctgcataggcagcggcaaacatgccgccgttgccggcgcccacgatgaggatgtcggtgtccaccgtctcggtgatggcagcctcgtcgatgtcgggctcggtgcccagccagtcgttctcatcgccggtgggcagctgaacggaggacacaacggcctcgcccttggcctgtgcatagcagctcttggcagccttcatgacggcctcggaagtgatggtggagccggacacgccgtcgatctcggcagaaccggcagccagcagctgatcgcgcagctcgtcggcagcagcagcaccgatggaagcggtctcgccggaggtgtccacgaccacgtcggtcacggcgctgtcggagaaggtcatggtgaccttgacggtggaggaaatgccctcggcagtgccctcataggtgccggggatgtaggtgccggttgcaccggaagcggcagcgctgccggaagcagcggtggaggtggagccggaggctgcattgcaggcagccagagcaccggcggtgacaccgctcatggcggcggcagcggcgatcttcagaaagcctttgcgggagatcttgttcatagtggtttccttctctttctcttcttgtgtctctttgtgatttttggccctgctctgtggaaaaatctacacagaaccaacaaaaacagtttagcatacctgtgaaaagtatgtcaatcaatttgggggcacggaacgccttaaactttgttaaacatttggcgcaggtatggcccggtcaatggagaaaaatgcaggctctgcggggatttttgccaaaaacaatgcacggaaacattgcgcaggtgttgcggttatgttacaattgagttgcacacagaagccggccagccacgaccggcagaacggcagcaaacgctgtcacggaaagggagattttggtatgaaggtggcaatgatcgggcacaaggacttcccgtcccgttcgggcggcgtggaggtcatggtcggcgggctggcaaccagcctggtccggcgcggttatgaggtcacggtgtacaaccgcggcctgcagaaggggcacaatgtttacacgaccgagggcgtgcaggcccgccgcatctttacctttcagaaggcgtcgctgaatgccatggtctattcgttcctggccacctttgacgccctgacgcgggactgcgatgtgatccactaccacgccatcggcccatcggtgccgctggtgatcgccaagctgttcggcaagcacacggtgtgcaccgtgcacgggctgaactggaaggtggacaagtggggcggctttgccagcgcctacctgaggctgggcgagcgggtggccgcaaagtatgcggatgatctggtggtgctgtcggagagcgagtggaactattttcaggagaagtacgatcgtaccgccatcctcatccccaatgcggtgcagatgcgccagccgctgccctgcaacctgattcgcgaaaaatacgggctggaagccgggagctacattctgtatgtgggccgcatctcgccggaaaagggcccgctggacctggtggagggctatctgaaagcccacacggacaaaaaactggtgctggccggcccctttgcggagaccgagtactgcaccacggtgcaggagaagatcgcgggcaaccccaacatcatcacgacgggctatgtggtgggcgacgcgctgctggagctgtacagcaactgcgccctgttcgtgctgcccagccacaccgagggcctttcgctttcgctgctggaggcactgtcgctgggggtgaagtgcctcgtgagcgacatcccggagaacaccacggtgaccgccgactacggcaccgagttccgcaccgaggacaccgacagtctggcccgggcactggagcgggacaccgcccggcccctcacgccggaacagcgtgaggcacaggtggactatgtgcgcaccaactttgattatgatgtcatgctggatcggtacgaggaagtgtatcaccatgtgatcggtgacccgctcaaggagataccttcgcaggccaaggcacaccgcaaggccgcagccgcccagggaggcgcagcatgataaaggaagaacagaacccggtcgggccggtgctgaccgcggccgaaagccgccgccgggtgctgcacaacatgtgttcgtcgctgttgtacaacctgtcggtgatcctgttcggcctgctgctgccgcggctgtacctcaccagcttcggttcggagctcaacggtctggacagcaccatcaagcagatcttttcctgtctgactctgctggaagcgggcgtgggcctggcctcgcagcaggcctattaccttccggtggccgtgggcgacgggaaagccatcaacggcattttttcggccacgcatcactattaccgccgcaccggtatcgtgtatctgctggtcacggtggtgtttgcgctgctgtaccccctgtgcatcaacacagtgctgtcctacggtaccgtgagcctgatcgtggtgttctacggcatcccgggcatcgtgagctatctggtgcagggcaaataccgctcctttatggaagtggaaggcaaaaactatgtgatcacctacatcaccacggccaccatggcggcgggcaacctgctgcgcatgctggcgctgctgtttacccgcagcatcctgttagtgcaggtgacctactgcgtgccttcggtgttccaggtgctggtgcttacggcctatatgcgcaaaaactatccgtggctcaacgcgcacgatacccccaatctggaggcgctggcccagcgcggctcggtgctggtgcatcagctcacgggcatcgtgttcaacaacaccgacacgatcctgatctccagcctgtgcggtctggcgtcggccagtgtgtacaccatttatatgctgtttttctccaacatcgaaaagctgttctactcgatcgtcaacagcatcagttttcggctggggcagctgttctatgtggagccggaaaagttcaagcggctgtaccggctgtacgatgccctttacctttccgcggcctttgcactgttcacgaccgtggctgtgttcctgatgcccatcatcgcgctgtatacgtccggtgtgaccgatgccgagtacctcgacacccgcctgctggtgctgttcacggcggtggagcttctgtccagcgccaagcagccgttggggatgctgctgaacatcagcggccgctttgaagagacccggcagcaggccctgatcgagatgggcatcaacctgctggtgtcggtgatgtcggtgctgcggttcggcatcgcgggctgcctgttcggcacactggcggcgcacctgtaccgctatacggcgttgatcctttttacccggaccaaagtgctgggagagtcgccggtgggcgattttgtgcggctgggcgtcaacgggctgctctgcgttgtgctgctgtacctgctgggatttgaccgctgctatggcggcggctacctgatggtgtgcctgaagggtgcgttgttcgggctgtgggtgctgccgctgttccttgtggtgaacgcggtgctggactggcgcaatgtggacaccctgcgcgggctgctgcacacgcttacgatcaaaaaaggagcgacggaggaaaaacacgatgcggaatgaagaagcgatgtgcgagggcctgctctcggtcgtgatcccggtgtacaacatccgggactatgtggagcgctgtgtccgctcggtgctggcgcagccggatgtgccgctggaagtgctcatcgtggatgacggcagcaccgatgacagcggcgcggtgtgtgacgcactggcggcggaggacagccgggtcacagtgatccataagcccaacggcggcctgtcggacgcccgcaattacgggctgtgccatgcacagggcgagtatatcctgttcatggacggtgatgactggctggcagagaacgtttgccccggcctgctgcagatggcgctgcaggaccgggccgatgtggtcatcggcaaggtgcattttctgcgcgaggaaccggtgatgacccgctgggaagaagcggtggaaaaaaacttcacctttcacacagtttacaccggtaaggagtatcttttgaaatgcctgcagaccggtggcctgcgggtggaagtggggcggcacctgtaccgcaccggctttttgcgggcgaacggcctgcagttctgcaagggcatcctgcacgaggacgaagagttcacgccgcgggtgctgctgcaggcgcagcgggtggtgctgaccgggcaggagatctactattacgataactgccgcgccggttccatcacgcacgcggaaggattgagcacccgccgtgttcaggaccggctgcgcatctacgacagtctggcggagatctaccgtacggtgaccccgcgggcgctgcgccgccgcctgcaggatgacctgtgctggaagtatctggactgcgcggcgcggttcgattgcaggaccctgccgggctaccgcccgcagcggctgcggatgctgcagtttgcctgcacgccccgccgccgggccaaggcagcgctgtttgccctctcgccggagctgttccggcgggtgatgaatcattgacccattgacgaggaaaggcagaagagcatggcgcaacatgcaagaataaaacgaacgcccccgccggacggcgcacgccgccgatggtggcagaaccggctgctgcagctgctggcggcttttgtgctgctgtgcggcgtggcagctgccggactgaaactgtacacggattatacgaatagtcattttcaggtgaccttttaccgggtgacctccagccatgtgtcggaaaagttgcgggtcctgtttttgtcggacctgcacctgcgggaatacggcgagcacaacgaggagctgatccagactgtgcaggagctggacccggacctgatcctgctgggcggtgaccttgtcaccttcccgaacccggagtatgagaatatgctttcgctgtgccgcagccttgccgatgtggccccgctgtacggggtgctgggcaaccacgaaagcgagatgatctacggcggggtggatgaccagctggccgaaaaattttcggaggccggggtgcagctgctgcgcaatgagacccgcaccatccagatcggggaaaacaacgtggagctcatcgggctggaaggggccctgaaggacttttacaaatacggtgccagcgactgtgtggagagcctgagccgccagtacgacaccttccgcatctgcatcaaccatgtgcccatggcctttgtggactacatgcaggatgcgccctttgacctggcgctggccgggcacacccacggcggcctgatccgcctgccggtgctggggcggctgtacaccgcagaggaggggctgttcccggagtatgcgggcggcatataccagctggacagcggggcacccctcatcgtgggctgcggcctgggcgactccaaccagatcccccgcgtatacaatccgccggagctggttctggtggatgtgaactggtactgagatgaacgaacttgaaaggaggcccggagacgtggtgacaaagatcaagcagatcttcaaacaggctgtgctgcgcttctggagcctgcgggtgccgttgatcgtggtgtgcatcctgctcgcggcactgcggtgcaccgcacaatatcaggacagcagccgggtggcctcggcccagatgaccctgaactactccgaggcatcgcaggggctcaaccccaaccgcacccggtttacgactaccgacctgacctccgacgaggtgctgcagagcaccctgtacaacgccggactggaaggtcagatgacggtggaacagctgcgcaaggccattacggtggaacccaccgatgtgaccaacgtgagcagctcggaaaactacatcaccaccagctgcagcatcagcctgcagctggaagaaccctgccagcacctgaccgcagccacgctgctccggatcttctgcggcagttacaaggattatttcatggagcactacggcgagaaccagagcgtgttctcctgcaccatgccggattactttgacaccgagccgtatctgcgcctcaagagcctgacgctgcgggccaaccagctggaccgctacctcacggcccgtgtcagcgagaacaagagctatcaggacgccaccaccggcaacaccttcctgagcctgtccaagcagatccagaacgtgatcaactacgagatcccgcgcatccaggcctatatcctgcggggtggcctgtcggcggatgtttcttccctgacggccatgctgcaatacaagctgcagatcgagcagctggactatcaggagcagatggcctactacagctccgacaatctgggcattggcctgtacgatgagagcatgagcgccatcgtcatgatccccacgctggacgagaacagcgagttctatatgtcccgcaccaaaacggcgctggacaccatggccagcgacgccgacggtgccctggtggaggcgacctcccatcaggatgtgatcaccaccacccagtatgtggtgcagcaaatgcagaccatgagcgacccggcgggtctgaccacggtgaacgccatgctgcaggaactggaaaccaccatggatcagatccagcaggcactgcgggtgacggatgcctcctatatcatctataagacccagaactacctggtgttcaactatgcggccggctcctttgtgcagcagatcggcctcaagcgggtgatcgtggaaatggcagtctttgtggtgctgtgcttcggcctgtgcatggtgcgcaccgcccggcagatccggaaggaggaacagcgttgaaaaagtttgatatcctgcgctacctccggcggttctttgcactggtgctggccgtgaccatggcgggcacagtggtggtgtactggtactgcaagaacaaccagacctacaccgccagtgtgaacatcaagtacctgcacgacggcatcaaggacggctttgccccggacggcaccgccatgaacgtggacgagatctattcttccaaggtcatctcgcaggccatggagagccttgggctgcaaagcggcatcaaccttgtgcgctcccactgcacggtggaagagctgatcccggacgaccagaaggccctgcaggaagctctcatcgacaagggggaagagtcgacctacttcccggacgaatacaaggtgacgctggtggtggacggcagcctgggtgcgagctacgcccgccgggtgctggatgccatcgtcagcagctattccaccatctacacggaggaatatgtggagctgcctctgaccatgaacccctccagcggcctgctgaacagcggctacgactattacgagtgcgtggacgcgctgtcggccgacaccaccgaagtgctgaactatctggaggataaaaagacaaactatcccaacttccgctcttcggtcacgggttattcctacgaggacctgtacgacatctataagatgctgtacgactacgagatcccgtcgctgtacgcgaatgtgatgaccgggccgcaggtgcgcaacgccgacaagctgtgccgcagcctgacccagagcatcgagagcagcgtgcagaacgagcaggtgtatcaggagcgggaagcctacctcagcggcctgatccagaactattcggagaagaaccgcgacctgatcaactaccattaccacaacgacgccaatgacagcggcaccgactacatcctgaagaacgtagaggcctacgatgacaaccagagcaagcagatcacctacgattcgctgattttggagtatgtggagatcgacaagaccctgcgcagcagcgccatccgccgggcctacacccagcagctgttggacaccttccaggcagccggcggggtgggcggcgatgaggcctcccatgccgcgatcgagtcggagatcaacaagtacgagcagacgctggtggactactaccagatcgtgaaccagaccagcatggagcacaaccgctccctgagcgcggactatctgcagaccaccagctccaccagagtgtggcccagcatcaacaccaagctgtatctggccatcggctttgtattcttcttcctcgtgggctgcgcactggccgttgtggtgggccgttcccgcgactttgtggaatactttatgtatgtggacaaaaagaccggtctgcccaaccgcgaccgtgtggatgccatgatggcacggctggaaaagcagggcttgctgcccagccactttacctgcatgtgcttccagtttaccagcctgaaccatctctcgcgggagtatggttactcggtgggcaaccatgtcctgcgggacttcgccgggctggtggcggcccttggcaccgaggagagtttcatcggttccaacggtgcgggccagatcgtgggcttcttccgggaatgcaacgccgtcaaggcggaggccattctggaagtgctggacgagcagatccaggagtacaacagcctgaacccggattacgccatcgagtacagggcagccagtgccacctcggatgacgaaaaggaattcaacatccgggatctgctgcgctgcgcattcaagaagctgcgggatgccaataagccgcagccggagaccgcacacgagacggtgtaaaaaagataaggaggcggcagtcatgctacagaatcaacgggcctgccagctcgtccgttccaaaaccggctgtgagccgctggcacttgccgtggcgtggggtgcccgcacggcgggccgctgtgccgccggggtgctgggagccgtgaagcatcagcgcttttccgaccagcagctggagacctttgccgcccgcgcgccgggcatctgcccgaagccggtgtgcgatgccggggagccctgcccgctgccgccgcaggacgatgcggtggatgtgtcggtgatcgtgccggtgcacaacggggagcgctttttgcgcgcctgtctggacagcatcctgcaccagaacaccactcgccgcctgcaggtgctggcggtggaggacggctccaccgacggcagcggggccattctggccgagtacgcccggcagggaggggtcaccgtgctgcacccggagcagggcggcagcgcggcccgcgcccgcaacaccggtctggcccgggcggtgggccgctgggtcctgtttgtggattgcgatgactgcctgctgccggacgcagtggagacgctgctgacggcacaggcgcgtaccggggcggatatcgtgcagggcggctggcagtattgcgacgaagccgacacccgtggtgcggtgcagcagtacgcagaagcgtgctacaccggcccccggcggctggatgtggtggagctgcccggcactccctggggcaagctgtaccgccggaccctgtttgaacgggtacggttcccctccggatacacctgttttgaggatgccatgatccatttctgggtctttccgcgggcgaagtgcattgcttcgacaaaacctgtggtatatttgtggcgcaaaaatacaatggggctcaccgcgacctcccagaatacggccaaagcattgcaggcctactgggtggctgaagaaatgctggacggtgcggtgcgtctgggcctgccgcaggatgcgctgtttgcctgcaacctgatcctgcagctggccaattactgctatgtgtgtgtggccggtctgccggaggcggaccggcagacggcctttgcctgctgctgcctgctgtaccgccggtgggcaacgaagctgccggacccccggacgctgccctatgccgtgcggctggcgcagcgggcgctggaacaggcggactatgggctatggcagctgcagggcagactgttccagctgatcaactgaccggtttacaccggcacggaaagcgaggtggactgcgtgcaggatgtttccaagatcctgacccggaaatattacggcaaaaaagacccgttccgcagccgggagttccgccagccccgctggatggaactgctggcggtgctgctgttcaccgtgtccgggctgggcgaaggcaaaagcatcaatgtggtgctgggcggtctgcccaaggcggtgacgctggcctttgtggggctggccgggctggaatttttcatccggggtgattttgaccggttgaaaaaactggccgggccgtccgggctgtacatcctgtatctggcggtgcttgccgcctggtccatgttcatctgggtgcgcaacttcacggcctttgcctccatcacccgcggcgtggaaaagatcctgtatcagagcatcgccacggtggtggccatctgctgcgtgtacctgtacgggcggttcagcatcgacctgttcaccatcggcatctgctgcgcaaacctcttcatcctgttcagcgaggtgcccgcctatggtgtgggcgagagcgtgagctccctgctcaccagcatcctgtcgctgggcaacaacacctatggctatgccgagcggctggagatccacgaggtgacctttctggagggcatctttgtgctgtactacctgttcttttcgccaaaagaaaccaagcagcagcgcacccgcaactgggtgctggcgggctgctccttcttttttgtactggcgggcatgaagcgcatcctgctgccggcgctggtggtctcggccttttacatctgggtgctgcgccgcagccatgccaaggaaaagctgatcatgctcaccggcgtggcctgggtgaccctgttctgggtgtatctgtatctggtgcacaccggggccatctcccggctgctgaacgctgtgggcatcaacatgatgggccgcgattacatctggagcctggccaaaccctattatcagttctcgcctaccttcatcgggctggggttcgaggcggtggacgccatggtcacccgcttttatgagatcggcctcattgatgtggcctacccgctgcataacgatatcctcaaggtgttcgtggaactgggctttccggggctgtgcttctggtgcgcgttcctgtacctgatcctgccctggttctggatcaaacgctacgggcccgaggccggcatcctgtattttgccatcctcaacccgctgtccatgacctacctcaccgacaacacggccttttatttctggtgcaccatgggtctgcgcatgatcccgctggcggtctgctgctttgcaaagccgacgaaggaccctgccgcccaaaaacagacatggcagccgccctcggcgcaggaggtgcagcggcgcatccgggcacagtaccgggagaaaggaagttcttcatgatccatatcctgcagtcggtcagcaacatggaccggggcggcatcgagtcgatgctgatgaactattaccggcatctggaccgcacgcgattccagttcgattttctggtcaacaagaaaaagcccggcttttttgatgacgagatccgcgcactgggcgggcgcatcttccagagcccgggcgtagccccgcagagctacccggcctatctgcgctctatgcagcggctgctggtccagcacccggagatcaaggtgctgcacgcccacaacgaggccatgcagctttttgcgctggaaggcgctaaaaaggcgggcctgccggtgcgcatcgcccacgcccacaacacctgtctgcccaaggacgccaagctgccgatcaaatggttctgcaaacagttcattcccggcgcggccaccgattactgggcctgcgggcgggaggccggcatctactactttggacagagcgcgtgggatgcccggggcgtgaccctgcgcaacgccatcgacctggaccgctttggctaccggccggaggtgcgggcaaagctgcgggcagaatatggcctgaacgataagctggtggtgggctgtgtggcccgcctgatggcgcagaagaaccacacccgcctgctggacatctttgcggccctgaaaaaggtgcggccggacagctgcctgctgctggtgggcgagggcgagctgcgggccgagctggaagccaaagccgcccggctgggcattgcgcaggatgtgaagttcctgggcgtgcagagcgacacctccgtctggtatcaggccatggatgtgttcgtgatgccctcgctgtttgagggcctgcccgtggtgggcatggaagcgcaggcgtccggtctgccctgcgtgttctccaccggcgtcaccgaggaagtcctgctgcggccggacagctgccgcatttcgctggaacagccggacgaagcatgggccgcagtgctgaaggatgcggaccgcaatctgcccgaccgtgcgcaggcggcggcacaggtgcgggctgctgggtacgacatccggcaggagaccctgcgcctgcagcagctgtacaccggcctgatcgccaaaaggggtgccgcacatgcctgagatcagtattattgttccggtttataacgtagagcaatatcttccggcggcactggactctctgcgggcccagacctgcccggactgggaagccattctggtggacgacggctccccggacggctgcggggcgctgtgtgatgcggccgcccggcaggatgcccgcttccgggtgatccaccagaagaacgccggggtcggcgcggcccgcaatgccgggttggctgcagcccgcggcacctatgtgcagtttctggacagtgatgacgcactggagccccagatggtggaggtgctgtgccgcacggcccggcagacggacgccgacctgattttgttcggcggctatgaggagcactacgcggccgacggcacccgtaccggctgcaccgacattgccccggttctggaaggggtataccggggcgacccctgcccgcaattgttcccgcagctgtcggccatgtcgctggtcacgcggcagctgttccgccgccgctgcatcgaggaaggccgctgtcgctttaccgatcataagatcgcggaggacgccctgtttttcgtgtccttttaccggcagcacctgcactgtgtggtgggcatcccggaaaagctctaccgctataagctgcgtgcctcggggtcggcctcccagagctaccacccggagcggctggccgataacttttacctctcggatgcggtggaggctgtggcaaagagctggggattagaaaacgaccccgcctgccgccgggccgtaaaccacagccgggtgctggacctgcagctgggcatcaagaatgtctgtctggggccgctgagcttccggcagcgcaccgcatggctgcggcaggcgttgcgcatcccggcggtgcgggctgccgtgggggagatgcccctgcaggatgcccgcagctgcaacgaccgcatcaaactggcgctgctcaaagcccggctgtgcgcggtggtcattgccctgtccagctggaacaaccgccgctgaaaagacgaaacaacaaaagcgcccctgtgcaccggatgggtcccgtgcacaggggcgctgtattttataagaggaaagcgtgggctcaatcgtcgtcgctgtccagcttgagcacggcggtaaaggcctcgctgggcagggaaacgctgcccagctggcgcatcttctttttgccttccttctgcttttccagcagcttcttcttgcgggtgatatcgccgccgtagcacttggccagcacgtccttgcgcatggccttgaccgtttcgcgggcgatgattttgccgccgatggcggcctgcaccgggatctcgaacaggttgcgggggatgttgtcccgcagcttttcgcagatgcggcggcccttggcgtaggcgttatcccggaacacgatcatggacagcgcgtccacggggtcgccgttgagcaggaagtccagcttgaccagatcgctctcgcggtactccttgaactcatagtcgtagctggcgtaaccgcggctgcggctcttgatggcatcaaagaagtcgtacacgatctcgcccagcggcatggcataatgcaggtctacgcgcacatcgtccagatacttcatgtcgatgagggtaccgcgcttgttctggcacagatccatcaggccgcccacatagtcgttgggggtgtacaggtgcacgtccacaaaaggctcttcctgcttgacgatgttggagggatccgggtagctggaggggttgtcgatcatctccacggtgccgtcggtcagggtcaggcggtagcgcacgctgggcgtggtggtgatgatgtccagatcgaactcgcgttccagacgctcggtgatgatctccatgtgcagcaggcccaggaagccgcagcggaagccgaagcccagagccgcactggtctccagatcaaaggtcagggaggcgtcgttcagctgcagcttttccagggcgtccttcaggtcggggtaacgggcgccgtcggcggggtagatgccgcagaacaccatgggcttgacctgccggtagccgggcagggcctcggcggtggggcgggaagccagcgtgacggtgtcgcccacgcgggtgtcctgcacagtcttgatgctggcggtcaggtagccgacttcgccggcctgcagctgggcgcagggggtcaggttggtggcacccatgtggcccacttccaccagcgtgaattcagccccggtggccatcatgcggatggtgtcgccgggcttgacggtgccctcgaacacgcggatatagacgatgacgcccttgtagctgtcgtagatgctgtcaaagatcagggccttgaggggggcgtccgggtcaccggtgggggcggggatgtcggtgaccacccgttccagcacctgatccacgttcaggccggtcttggcggagacgcggggcgcgtccaggcagggcagaccgatcacatcctccacctcctgtgccacctcgtccgggtgggcgctgggcaggtcgatcttgttcaggatgggcaccagctccagatcatgctccagtgccatgtaggtgttggccagggtctgggcctccacgccctgggtggcgtccaccaccagaatggcaccctcgcaggcagccagactgcggctcacctcgtaggcaaagtccacatggcccggggtgtcgatgaggttgaattcgtaggtcttgccgtccttggcggtgtaattcatggtcacggcgcgggccttgatggtgatgccgcgctcacgttcgatgtccatgttgtcgaggatctggtcctccatggtgcgctcgtccacgctcttggtcagctccaggatgcggtccgacagggtggacttgccgtggtcgatgtgggcgatgatgcagaagttgcggatattgtctcttgccatgtagttcctccggttgggatttatgcttccaggatccagtcctctacagccacgatctgtccgtggtcgcggtagacgcggggcacgcggcgggacacgccgcacaggacttcataggaaatggtgtcggttttgcgggcgatggtctcggcggtgtcgctcacggtgccgccccacaggatggcttcgtcgtcctcgcgtacctccggcacatcggtcacgtccaccatcatctggtccatgcacacccggcccagcaccgggcaggctacgccgtggatctccacgacgcccttgccgcagctcagttggcgggggtagccgtcggcgtagccggtgcacagggtggccaccttggtgggtttttcggcggtgaaacggcggccgtagctggcacactggccgggctgcatctctttgatcatgctcaccacggtcttgagggtcatcaccgggcggaaacagccaaagcgcacctcatcgctggggtcgtagccgtacaggatgatgccggggcgcgccatgcagcgctcccggggcaggccctcgggccagtccgggtgcagcatgactccggcggagttgtcgcagtgcaccagctgcggttcctgcccggcggctttcagggcgtggaaggcctgcacgaacaggcggtgctgctcggcggtgtaagcaatgttgtcctcgctgacgtcatcggccactgagaagtgctggaacaggccggtcatctccagcccgggcagggcacaggcggtgagcatgtcccggatggcggcgtcaaaatcggtgcgcagggcaaagccgatgcggcccatgccggtgtcggccttcaggtggatctgcacccggccgcctgcggccacggcagcatcgctcagggccttggcctgcgctgccgagtagcaggccaccgtgatatgattctggatcagggccgccgcgtagccgggctgcacatggcccagcaccagaatgggcagggtcagcccgcccttgcgcagctgcacggcctcagtcaggcagctcacggccagccaggcggcaccctcttccgcaaaaacgcgggcgcactgcacggcgccgtggccgtagctgtcggccttgaccactgcgcacagcggcagggcaccggcacgggccttgaccacgcggaaattatggcgaagggcttcgaggtcgatctcggcccagacatgtttttcaaagggttgggtctgcatcatgattcatccttctttgctgtttgtataaagctgccgcgcccggtgtgaacgggccgccagccgtcgatgccgctttcctgcagggcgtgcagggtcttttgccggaaggcgtggtcggtgcggcagcgttcccggacgaactctttggtctgctcgcgcacggtcacgccgtcagcggggcagcggctcttgacgatgggcaggctctcctcccgcacggcacactgcacctcgtattcggtggccagcagcatggggcggatgagggtcaggtcccgctgggacaggtaggtgaccggcgaaaagcagccgatgcggccctcccgccagagattcatgtaaaaggtctccacagcatcgtccagatggtgccccagcgccaccttgttgcagcccagctcctgcgcggcggtgtgcagggcaccccggcgcagcttggcgcagagggaacaggggttcttttcctgccggtactcgaacaccaccgggccgatctcggtgcggcggatctcgtagggcacgccgtaccgggcaaacagggcctccagggcggtgtagtccatgggctggtggtcaaactgaggatccagcgtgacggccaccacctcgtagtcaaagccgatgtactgccgcagcagggccagacccaccgtcagggccacactgtccttgccgccggacacgcccaccatcacccggtcgccaggggccagcatctcgtaatcctgtacggctttgcgcatcaggccgcagagccgctgcatggcacgctgctcgctcatgacaggctcacgctttccaccagattgacgatgtcgttgatggaggccagcttggtcagggccgaaacatagaccacatcgccgctgtcgtaggtgatggtggccagcacggcataataggtctggatatcgcagcgcacggcagtgacctcggccccttccaccgtgatgttggcggtgcggggcttgatgatgccgtaagcctgcttcaggtccttctcagaatcgtcgatgaagtccgggtaggtgtcggcggtgccgcgctgcagcagtacggcctgataatcctccgcgccgtcggccgagtcggccgtcgccagctccagcacggttccaagggtggcgtcctcggtcatctggcagaccttccagatgctgctgtcgtaatacaccgaaactccgttggtgccggtgtagtgggtgtcggggttggcgggggtctgccggttgaccagcagggtgaggatgatgtaagccacgatgcccagacagatgaagatggccatggcggccagcagcttggaggtgcggcgctgggcggcggtgttgtggtcgatgtcgtgtggcatgaaaagttctccttttgtaagcggtgcagcgcaaagctgcccatatcctttatagtataacacaaccgcaggcaaaattgtagcgggcaggtgcggaaaatatccacgcaccggcaaaaacttttttgaaaaatcgaaaatttgaattcgtgaggattcaagagaaaatgagagattttgagagaacagaaaattttcactgaaaaaatcaaaaaatgctgttgacaggcacctttttatgatgtatactgacactcgcgccccacaagggtgcctgaaatgtacaaagagtttatcaggaggaaatagatatgagcactactctcgtaaagcccgctgaagtcgag

SEQ ID NO: 956 - DNA, 10840 bp, unidentified
  source 1..10840: mol_type = unassigned DNA
tcacagcaccgccacggcgaggaaccgcacaacgagcgcggcaagccatgccacaacgcactggtttacgaccataacggtggcccagcggccgcccatctcccgcttgaccgatgccacagcggcgatgcagggagtatagagcaggcagaacaccagcaggggagccgctgccgccgggctgagcgccgcgcccagtgcggcagaggagccatacaggatggtaagggtggagacaacgctctcctttgccataaagccggtgatcagcgccgtggacacccgccagtcgccaaagcccagcggtgcaaacaacggcgcgatgccgctggcgatccaggccaggatgctctcctgcgggtctgcggtcaggctgagctggaagtcaaagttctgcaggaaccagatgatgatggttgccaggaaaatgaccgtaaaggcacgctcgaggaaatcccgggccttttcccagagcagctgggccacatttttcaggccgggcaggcggtagttgggcagctccatgacaaagggcacggcctcgcccttgaacagcgttcccttgagcagaaaggccattccgatgcccacaaggatgcccaggaaatacaggcccaccatgaccagtgcggcgtactccgggaagaaggtcaccgcaaacaggctgtagatcgggagcttggccgagcagctcataaagggcgtgagcaggatggtcattttccggtcccgctccgagggcagcgtgcggcttgccatcacgccggggaccgtgcagccaaagccgatgagcatgggcacgatgctgcggcccgaaagaccgatacgccgcagcagcttgtccatcacaaaggccacgcgggccatatagccggtatcctccagcagggaaaggaagaagaacagggtcacgatgatgggcaggaagctcagcacactgcccacaccggtaaagatgccgtcgatcaccagcgaatgcactgcatcgttgacgttccatgccgtcagggcattgtccacaaggatcgtcaggttctcaatgcccagttccagcaggccttgcagccccgcgccgatcacgccaaaggtcagatagaacaccagcgccataatgcccacgaatgccggaatcgccgtgtactttccggtgaggaagcggtcgatccttgcgctgcgcagctgctccttgctctggtggggctttaccacggtctgattcaccagctgatggataaagtggaaccgcatatctgcaatggcggcggcgcggtccagaccgcgttcctgctccatctgcaggatgatatgttcgatcatctctttttcgttctgatccagcttcagggcctcctcaatgcgggggtcgccttccaccagctttgtggcggcaaagcgcaccgggatccccgccgcccgggcgtggtcctcgatgaggtggatgatgccgtggatgcagcggtgaaccgcaccgccgtggtcatcctcgccgcagaagtccatccggcccgggcgctcctgatactttgccacatggatggcgtgatccaccagctcatccacgccctcgttcttggcggcggaaatggggaccaccgggatgcccagcatcgcttccatctcgttgatgttgatggtgccgccgttgccgcgcacctcatccatcatattcagtgccagcaccatgggggtgtccagctccatcagctgcatcgttaagtacagattgcgctcgatgttggtggcatccacgatgttgatgatgcccgtgggcttttcgccaatgatgaactggcgggtcacgatctcctcgctggaatagggcgacatggagtagatgccgggcaggtcggtgacttcggtatcagggtgctcccggatggcaccgctcttgcggtccaccgtcacgcccggaaagttgcccacatgctggttggagccggtgagctggttgaacagggtcgttttgccgcagttctgatttccggccagcgcaaatgtcagcaccgttccatccggcagcgggtgttcgccctttttggtgtggtagcggccgccctcacccaggcccgggtgctccaccatccggccggccttccgtgccggggccgctgcgggtgcttccgccggggtgatctcgatccgtgccgcatcgtccagccgcagggtcagctcatagccgtggatctgcagctccatggggtcccccatgggcgcgaatttcaccagcgtgaccttctcgccggggatcagccccatatccagaaaatgctggcggagttctcccgttccgcccactgtatcgatcacggcactttcgccgatcttcagttcctttaatgtcatggcagatgcctttccttcgacaaaatgttagtgtatgtgaacagtcttaatataagctaactcaaaggcattgtcaaggcaggaagcggcaaaaattctcgcctgtccccgctgttttttgtggaaatccttctcctgttccggcaggtttccgggcaaaaagaaaacgcacccctgaattttcacgttcaaaggtgcgttttgagaacaattctgtttacttcacggtgtggtagccatcggggttgttcttctgccagttccagctgtcggcacacatctcctcgatgccgtactcagccacccagcccagctcattcttggccttggtgggatcggcatagcactcggcgatatcgccggggcggcggggatcgatcacataggggagcttcttgccgcaggccttctcaaaggcatggatgacatccagcacgctgtagccgtggccggtgcccaggttgcagatgaacaggccgcagttggtctgcagcttcttgatggcgcagacatggccccgggccaagtcaaccacatggatgtaatcgcgcacgccggtgccatcgggggtggggtagtcgttgccaaagacgtgcaccttttccagcttgcccacggccaccttggcgatgtagggcatcaggttgttggggatgccgttggggtcctcgccgatcaggccggacttgtgggcaccgatggggttgaagtaacggagcagggccacattcagggtggggtcagccttgcagacatcggtcaggatgcgctcggtaaaggccttggtggtgccgtaggggttggtggtggcacccacggggaagtcctcggtgatgggcacgctggcggggtcaccgtagacagtggcggaggagctgaacacgaagttgcggcagttgtggcggcgcatcacgtccagaatgaccagcgtacagttgaggttgttatagtagtactcgatgggcttggagacgctctcgcccacagccttataggcggcaaactggatgacagcatcgatatcagggcactcggtgaagatcttctccacgtcctcgtgctttgtcatatcggcctgatagaaccggaagtccttgccggtgatctgcttgacccgatccagcaccacgggggaagcgttgtaatagttatctgccaccacgatgtcaaagccagcgttcagcagttcgatacaggtgtggctgccgatataaccggcaccgccggaaaccaaaattgccataaaagtacctctcttctcgtcaccaaaattgcttgcgcggggcaggcccgccttctgccacaaggatacaacgttttggccgcagaatcaagtaacgagaattttataaggatggatttttgtttccaattatttttccgcgcattgatttacaagcgttttttgtgttttgcacatggagtgatggaaccctttgtgcaaatcagagaaaaaggccctctcattcaaagccatcaggctttgaatgagagggctgcattttacagtttcccgcactgtttgccggtgaagaaccgcagggtggtgttggcacggaacactttcccggcccgcagggcggtagaggggaactccgggtgggaggggctgcaggggaagtgctgggtctccagcgcaaagccgccgtatttctgcatcggcacgccgcccttgccgggggcagggcagtcctgcaggaaattgccggtgtagagctgcacgccgggctgggtggtatagaccttcatgctgatgccggtcttatcgctggaagcccaggcgcacaggctctggctggccccgcggcccctgtcgatgacaaagcagtggtcatagccgccgcccaccatggtggtctgggaaaagccggtgtcgatatcccggccaatgggcttgcccgcccggaaatccatcggcgtgcctgccacgggcaggatattgccggtggggcaggtctcgttgttgccctccagatagcgggacgcatagatgcgcagcttctggcccagcacatcgccgccgccatccagattgaagtaggtgtggttggtcaggttgatgatggtgtcggcatcagaggagacacggtaatccatccgcagggcgttgtcctcggtgaggatataccgcaccgagatcttcagatttcccgggaaaccatcctctccatcggggctttcggcctccagaagcagggtatcgccaaaggtctttacctcatacagcttgcgcgggaaggtgccgtgcaggtggtttttgccgttgttggcttccagctggtaggtcttgccgcccacattgaacacggcattctcgatgcggttggcgtaccggcccacgaacgcgccgcagcaggtactgccggacgattcaaagtccttgacgtagtcggcgtaggtgtcgtggcccagcaccacatccaccggcccgctcttggtgggcacccagatattcttgatgatacagccgtagttcagcacactgaccgccagcccgccggggttcgagatgatgtattcattgatcttttcgccgtttggagtcatgccaaagggcttggagagaaactgtgccatagggctcgcctccttttgtgttttttcaggatagcacactctctgttttatcctttattgttttgattatatcacaattttccccttctgtgttggcattttttaagggaatctatccaatatttcgagagattttttgtaaattctgccccataggcagaaaaaagccccggagggccaggggtaggcgctccggggcttgtatggtcagattagatattactgctgggtatactctttataacccttcaggtcaatcttattctgaatttcttcaggaatctcattgatccatttattaactttcagggttgtagtcttaccagaaacagtttccacaatgtatgccagtttatcgccgttgaagcaataaacaacctgctgtccatcaactacaacagactcagcatacatggtttcaccagttgcttcaatcttatattcaggaataaccttgatgctctttacaatgtctgcagaaggaactgtgactttacctgcactcacaacatctgccggtgcctccatcttccgatattgtccctggcttaaaatatagcatgcgttatctttaataacgatatcatatgctgtgccagtgttaacgaacatcttctcaccatcaacagcaaacttcacagttgcaggagttgctcccgtgtcatatacgacaacttcggaataaacctttccggtcttctgatttgcttccacaatcttctgcagacggtaagaaggtgcgctgtcctcgccgcaagcggtcagcatcagagttgccattgccacagccatgatagctgctgcgattttcttgagcattttcatttgtagaacctccaatgtaaaatgatattttaccacacagaaagcatacccctacaccttctgcattgtgacctcattttacatctacccccccccctgtcaatattttttattgaatcccctcaatttttagagactgtgccaaagctgcggcaaattttttagcagattgacaaaaagcacccctcacatggctgtgaagggtgctttggggaaggtttcttatgcagaacacggttcggtaattgcttcccgcacctgttctaacgaaagttcggtggtcttggcgatcttatccagatcatgctctccgttcttccagagattgagcgcaatgcgctttccctttgccacctcggcatcttctcgttcccgatcaacgatcacctgcattgtcttgcacatagctgccactccttccgtttcttctttaaagtattttactcttgcccttattttggggttttggatatcccgatagtcatcacagcggaaatcctgcatcagcgcgccgacctcatccgttcctcgatatgcgccgttcacatatacaatatgtgcacggtcgtggaacagcttcccggtttcctgaatcgtccgttcaatattgtaaaccggcagaccatctcccaaaacatcatttgccgtaataaatatgatatatgtctcaggcaggtcagaatatttttcgccagaagtcgtcaggcgagaatcaaacatcgcactgttcagccgcgcccgttccggagcggctcccttatcttcctgctgtacttcgatatcatactgcctgcctgcatcatccgttgcataaatgtccagccgtacagaacggccaaacagattgccgatcgtaagctgtgttgcagaccttgcgacggtcaggtcctttcgtttcaggatgatgcgaagcagctcctgtgtgctctctttatctcctgaaaacacctgtgtcataaaggtgtcatccatcagggtgaatttacggatagcattcatgcgttcttcattcttctcatccaactgtacgaaccgcatttccgccatcctttcgtttcagaaaaagagtacttttctacgtttatattttatcatcattttatctatactgcaagtatcaaaaaagcacccctcacatggctgtgaagggtgctttggggaagttttcttactccggctgagcggtgttctgggcgatatactcggcggcatcatcggggatgtcgtcaaggttctcatcgccgatatccacgttcagcggcggcttcttgaagaggatgtcatacatcaggggcacaacgtacagggtcatcagggtggcgtaagtcaggccgaagatgatgacgatggccataccgctcatcagctggctggccatatcaccgctgaacaccagctggagcatggccagaacggtggtcagggtggtcatcaggatggggcgcattcgtgttttgccggtggcgatcagggccgcgcggcgctccatgccgccgatgcgcagctggttggcgtaatccacgaacacgatgccgttgttgacgaccgtgcccatcaggacgatgaagcccatcagggagatcatggtcagctgctggccggtgagcagcaggcccagcaggccgccggtaaaggccagcggaatggtgaacagaacaatgaagggggagagcaggctctggaactgggccaccataacaaggtagacgaagggcagcgccaggaacatccactggcccatctgatccaccaccatgccgttgatctcagagccgccgcccatatagaagctgcagccctcgggcatttcatcggatgcggcaaactcgttcagcttcttttccagcgcacgggtctcggtggtggtattggttccctccaccgcgtccgccgtcacgctgatatagcgggtctggttcttgctggtgatggagtccggggcggagccggtgacccaggtggccatatcgcccagcgtgcaggtgccggtctcggtggtgccgtcggcggccatgacggaggtcgtaaaggtcatatccatcatgttttccttggtcatggggtccagattgttgctgatctggacgttcatggtggagccatcgatggcaacaggggtctgggccgtggtggtggtggtcagcttggcggcgatctgctggtagacctgcgccacggtcaggccgtaggaacggaccttatcccggtcgatctgcaggttgatggtggcatcgccgctgcccagaccgttggtggcattggtaaagccgtccatctcgttgaccatatccaccaccttctcggagagggcagtcatggtatcaatgtcgttgccggagacctggacggtcaggcccatatccagctggctggtcagctcctgcattccgctgatctcaacggtggcggtgcagttctccacgccgttcacagcttcctccagcgcctcgcgggcctgttcgatctgccgggaggagaggctcttgtccagcatcacgttgatctggtaagtgccgtagctgttggcggctttcagcaggtcggtgatggtctggggcagacccagctggccgacatccattccggccacgcggctgtcggtggtaacgcccacctcttccacgttgtccacagccagcagggcatcaatgacattctcagccacagcataggattcttccttggtcagatccttctcggtggagagggtgacgatggcctcgttgctggtgatggtgggcagcatctcaacgcccatggacatcacgcgccagccgcagaacaccagcagcaccactgccgcgcccaacggtgcccagcggtgctggaagcaccattccaggctcttgacgtacttttcctgcaccttatcgaaccacttgagctctttgggcttggagtttttcagcagggtagaggaggccgccggggcaaccgtcagggccacgatgagggaagcagccagacagtagccgatgcacatggacatgggctgcagcaggctcttgatgacaccggaggtgaagataacgggcaggaacacgcagacagaggtgagggtggaagccatgatggccatgcccacctgcttggtgccctgaaccgccgcgcgggcagcgggcacgccgcggctgcgcagacggtagatgttctcgatgacgacgatggagttatccaccagcataccaatgccgagggacaggcccgccagcgtcataatgttcatatccaggccggtgaagtacatgagcaccacggcaaacagcaccgacagcgggatactgatgccgaccaccagcgtgggcttgatatccttgaggaagatggccagcacgatgatggcaagggccgcaccgatgagcatactgctcaggatactgctaacgatgatgctgatgtaattgccctggttggacagcacgaccacatgcaggccatcgtatttctgttccagctccttgaaggcggccttgcagttgccggaaacttcaccggcgctggaggagttgctcttgaagatcttcagcaccacggagcgctcgccattcaggcgggtaaagctgtcctcggcgttgtcaatgatctgcacatcggccacgtcagacaggcggacatcgccaaagccgtccacatggagcagcagggcaccggagatatcctcgatgctgtcgtactcctcgccgaccttcagcagccaggacttgttgctggaatccttgacataaccggcgggcatggagaagttctgggcatagatcagctgtgccagcgtgtcgatatccagcatcttggccacgtcggagttctccatggccttctgcttggcatcctcatactgctgcttggcatctgccagctgctgctcgtaatcgttcagcatctcgcgggcctcggtgaacttgatataggcctgcagctgctgctgggaatagctgcccacgatctgggtgaactgatccatcaggccgggcacgtcgtccatggccttgatggtgctctccagcgtgttataaatgttgctcaggctctgctgcacctgcagatcatcgaccagctccccggccgttgtgccggcggtgtcgccctgcgcgttcaggcgctgctgcagatcctgcaaagcggtggtcagcttatcggtgatatcgcgcagctccgccacgatctcgatcagagaatcgatatcctgcattccggtctcgttgaacttgtccacgacccgctgcaggccgtcccgcacatcgatcagggcctgctggatctcaggctcgttgaccacggcaatgagctggttgacgctctccagaagggcctgtgcctgcttcttgaccagcatgaaggaatcctgcagctcgccggagtactggctgttgatggtatcgctgaccagcttgtcgtaattggccagctgggtctcgtactcctttctgcctgcctcgatctgggcctcggcatcatccagctgggcctttgcatcggccagctgcacgtcaatgacctccagcagcttttcgttgatggcatcgatcttttcctgatcgagctgcacctgcaccatccgggtgaccaggccgttggcggaaatattggaaacgccgccctgacgctcaatataggggaccatggtgtcgttgacgaaatcggccagctcataggaatcgctgccctcgcggctgacggccacggtcataaaggcgttcatgttcagggtatattcaatgatggagggggtcatacaggtgcttggcaggctggcggtggtctgatccaccttgttggacaccttgaccacggcactgttcatgtccgtatcgtcctcaaactccatcagcagcagactgtagttttctgccgaggtggcggtgacgtttttcacgcccgagatggtgcccagcgcgctctccatcacgtcggagacctcgttctccacacgctccgggctggcaccgggatagaccgtgaccaccatcaggtacggtgtgttcacgtttggcagcaggttggtctgcatgttctgcacggacacaaggcccagcatgatgaccatgatgactgcaaccagaacggtgaacggttttttgacgctgaatttttccat

SEQ ID NO: 957 - DNA, 15321 bp, unidentified
  source 1..15321: mol_type = unassigned DNA
ggagtgaacagtaaccaatcctgacatccagttgccgtgtcatttgttgaatacttttttacgaacagtctgcggatggacgttccctctttttcaatataccgaacaagaacttacttattcttgtacatttcctcgtagtatttctggtaattgccgctggtgatgtgctccatccactcctcgtgctcgagataccagtcgatggtcaggacgatgcccttctcgaacggggtctcggggtaccagcccagatcgttcttgatcttggtggggtcgatgccgtagcggcggtcgtggcccagacggtcggcaacgtgcttgatcagatcctcgctgatgccgtcatccttcaggcggtcgtgcagctgctcgatgatggtcttgacgatgaagatgttggggcgctcgttgtggccgcccacattgtagacctcgccgatcttgccgccgttgcagaccatatcgatggccttgcagtgatcctcaacgtacagccagtcacggatctgcataccgtcaccgtaaacaggcagctgcttgtggtgcttgacgttgttgatcatcagggggatcagcttctcggggaactgataggggccgtagttgttggagcagcgggtaatgttgatgggcataccgtaggtatcgtggaatgccataacgaacatatcagcgctggccttggaggaggagtaggggctgtgggggcacagcggggtggtctccatgaagtaaccctcggcacccagagcgccgtagacctcatcggtggagacctgcaggtacttcttgccttccttccaggtcttggcatcggcatcgtaccaggcttcctttgcacgctgcagcaggttcacggtgcccatgacgttgctctggacaaagatctcggggttcttgatggaacggtccacatggctctcagcggcaaagttgatgacataatcgaaatcatactttgcaaacaggctctccaccagctccttgtcgcagatatcgccctgcacgaacacatggcgggggtcgccctccacatccttcaggttctccagattgcccgcgtaggtcagcttatccaggttgaccagcaggatctcggggtacttcttgagcatatagtggacaaagttagagccgataaaaccggcgcagccggtgatcagatattttttcataggtttattctacctcaattttcaggttttatcttcttggggaagctttccccttatttcatcccattctcgccgtcccagtgggcgaagaagcaggccagggcctctttccagtcccgcacatcgttgcccacggtgcagcggagcatccggttgtccagtgcgctccacttggggcggtcggcgctttcggggtgcttggccttgtactcctcgctggtgcagggggccacagaggcatccacaccagacaggcggatgatctcggaagcaaaatcgtaccaggagcagatgccctcaccagtgcagtgatacaggccgtactcatgggtcacgcagagctgcagcagctcatgggccaggtcaaccgcgttggtggggttgccgcactggtcgttgaccacctccagcttgccgaatttccggccggcgttgacgatggtcttgacgaagttcttgccgtagtagctgtacagccatgccgtgcggacgatgaagtggcggtggcagaactgctccacatacttttcgcccatgagcttggtggagccgtaggcgctgatggggccgggaatggtggcctcgtcctgtgcaatgccgccgttctcacggccggagaacacatagtccgtggagacatgcaccaggcgggcaccggtcttttcggcggcctgtgccagattgcgggggcccagagcatttgccttgaaggctgcgtcgtggttcacctcgcagccgtccacgttggtgtaggcggcgcagttgatgatgacatccgggcgctggcggcggatgaagtcatccaccatcttatagttggagatgtccagctccggcaggtccaccgggatcacggtggcattcatcagcttttcgggaatggggccgatctcgctgcggccctcccgcagctgcttgatgatctcagtgccaagctggcccttgcagccggtgacgatgattttcatgggtgattcccctcctgcatcaatatctcagttttccatcggccacgttcttgaggtgctggccgtaggggctcttaccataacgggaagcgctctccagcagggtctcgcggtcgatccagccatacttgaaggcgatctcttcgggggcgctgatcttgatgccctgacgtttctcgaccatgcggacaaagtcggcggcatccaccaggctctccatcgtgccggtatccagccatgcaaaaccgcggcccagcagctgaacatccagctcgtccttcttcaggtacatatcgttcagggtcgtgatctccagctcaccgcgggcagagggcttgacctgctttgccatctggaccacttccttgttgtagaagtacaggccggtgatggcgtaattgctcttcgggtgctcgggcttttcttccacgctcagcaccttgccgttctggtcaaattccacgatgccgaaacgctcggggtcctgcacatagtagccgaacacagtgcagcggcccttggtctctgcattggcggcggcagtcttgaggatcttggagaagccgttgccgtagaagatgttgtcgcccaggatcatggcgcagcagtcgtcgccgatgaactcttcgcccagaataaaagcctgtgccagaccatcgggagagggctggaccttatattgcagatggatgccatactggctgccatcgcccagcagcgcctcaaagcgcggcgtatcagtgggggtggagatgatcaggatatcctgaatgcccgccagcatgagggtggacagaggatagtagatcatgggcttatcgtagacaggcagcagctgcttgctggtgaccatcgtcaacggataaagccgggtgccggcaccgccggccagaataatgcctttcataatttgtgcactcctttatttgtattgaaaaagttgtgcagctatacgggatgaaacgctcacctcgtaatattcaaagcggagctgcgtccgctgtcaacaaagttacagggtaaaagttctggccgcgcggggcggcatcagatagttttacaccttattctactctcaaatcgaaaaaaaagcaagaaaaaacggcctgttccagaattttttccggaacaggccgtcaaacagaaccgttcagccgcccatggcggcagcacatcgcgatggtggagcgtttcttaccacttgaagccccacttatggaaatacttcagcaggtttcccgtctgccagagggcgggcttgagatcccggtgggcagcgcggtgccaggcgtggatggcggtatactggggcaccagatacaccttgccccgggtgcgcatcttctgggtgaggtccgcatcctccacatacatgaagtagctctcgtcaaagccgcccaccgccttgaaggtgctggtgcgcacaccggaaaagctgccggtgcagaactcgatctcgatgggtctggtcaggtcctcatccagcatcaggtagtggtcgttctggcctttccagaagctgagccggggcagctggcggtagagcatgggccgcagggcgcaccggcgcaggggcagctgctggggcttgccgtccgggaacaccagcgagggccgggccattacggcatccgggtgagcagccatccagtcggccagatcactcagggtatcagcggtcagctggatatccggattgaggataaaatggaaatcgctgtccagctcgggcaggatcatattgtggccggtgccaaagccgccgttctcggtgcggcagtgcaccaccacatgctggcccgggcctgctgccagcaggccgtccgccacggcctgctccagctttttgccgctgccgtccgggctggcattgtccaccagatacagggtcaccgggtagcggcgcgtgcagtgcagcaccgtctgcgccgccttcagcgcctcgtcatagccgttgtaaacaacaatacaagcagagagtttcatcaattcactccaaaggcaggatcttcagcgtgaagtcctcacgctggatatcaaagttggggttggtgcagggatcgcccgcggccagcaggtctccccagcgggcctggaagcggagcacctcgccctggaagcgcttctgcttttcggggttgtcctcggtgccgcggctcttgctctcgtagtggtagagctgggcaaagggggtaaacacgttggtgtagcctgcctcccgcacacggacacagaaatccacatcgttgaaggccacggcatagctctcgtccaggccgttcatctcatcatagatctctctgcggatgagcaggcaggcggcggtatcgccgtaaacatcctgcacatagttcagccgccccatgtagccatcggatgccgccgggaaatacttgtgcaggtggcccgccacgccgccgatgccaaagccgatgccggcgtgctgaatggtgtcatcggggtagagtagctttgcacccacacagcccacccgcttctgctgggcgtacatgaccatctcttccagccagttgggggtgatgacctcggtatcgttgttgagcagcagcagatattcgccggtggcatactgctcgccaaagttgttcagggcgctgtaattgaagcccttgccctcccaggtcacgaccttgaggttgtccgggtgttccttctgcatccgctcgtaggcgcggaaagtctcgggctgcttgctgttgttctcgatgaggatgagttcaaaatccgggtaggtggtgcgggcatagatggaatccacgcagagctccagatcccggatgtggtcgcaggtggggatgaggatgctcacccggcccgggtgctcgatggtgtaatcggtcttgtaatagcccggagtgccggggatgagggcaacatcgtccacagcgatcccgcagcgggcatagtgggccttgagggccgcaatgcctgcgtcgatgcagtaggtcttggcggagatatccgccgccgtgctgccggggctggagcgccagtaatacagggcatggggaatgtgaacgatcttctcagcctgttctgtcaggcggaggaacagctcgtaatcctggctgccgttgtactccatccgctcgccgccgccggcccgctccatcagggcgcggctgaacacggtcaggtggcagatgtagttgttggagcggaggttgtccagcatgaagtcgggcttgaagtggtagagcaccacatgctccggcttcccctcaaaggtcgcctcgtcggtgtagacaaagtcggccttctgctcggcaatggccctggccgcgtaccacagggcgcaggggtgcagcaggtcatcgtggtccagcagggcgatatactcaccggtggccatctcaaagcccttgttggtgttgccggggatcagctcattcttttccagcttctgataccggatgcgtgcatcggccttcgcacgggcctgcacatgctggcctacggcctcgtccttaccggcatccacgcagcagagctcccagttcttgtaggtctggttcaccacggaatccagcatctcgtccaggaaatccagcggggtgttgtacagaggcaccacgatgctgatcttgggaccggcaggctgatcgtttgcctgcctgaccagcagctccaccggggcaaagcggtcggcccgcaggaggttccccgggaagagggcggcatactcccgcctggcgcgggcgtgctcccgcactcccgagatgccgtcccggcgcagctcccccagcaggacgaaaagcgggaaggtgtgccaaatctggcggctcttgctgacaacataccgcatgggccaggtcagcttccagaaggtagagccggtcacctcgttcagggtcttttccaggttcttggcatggctgcggctcagggaaagatcgctgcggagccgctcaatgagggcggcttcctcgttgcaggtgcgctcggcacgcaccatccggtcacgcaggagatccagctccttctcatagcccgcgatcatctcggcggtggcaggctggaccgtgcagtacagagccgactgctgagcacggccccggctgcgccagcggaaatcccggtagtagccccggcgggccagttcctcggcccatccctcagccacgttgctgccggtaaacaccagcagcacctgtccgggcagctgcgcgggcatctccacccaggcggggtcctccaccaccagcaggtctgcctgccgggcggccactgtaaaggggttggcatccacgcccgcccggtgcagggccttttccagtgccggggtctcggcgttcagcaccgcagctgttgccggggccagctcctccgcaatgcgctgtgccagcaggcggcagcgctccatgtcctgctttgtttcctttgctttctccaactgcattccgacttctccacttcactgggccattccgccgcccagacgcatttttacaaactataatagtataccagatttcgtcccgtttgagaagcgcttttccgcatttcctgcgctttccggtgcaaaatttattacagccccagcaggctccacagccagccgaacaggcctccgttcgagctgccgctgcccaccgtgccaaaggacacgccggtatagtagtggcgcaggatgtcccggtagcccatgccctgctcctgcgcatagcccaccatgccgcactggctcatgcccacaccgtggccgaagccatagtagttcatgcagggggttccgttctcgtccgcgctgaaatcaaagcaataacgggaggaaacgaactggccgatgtagcggtagctctttccgttcgagacaaaggtattgtactggacaaagccgcccagatccttatgggtggtgtcggcgctctcgtagggctggccggtcttgctgtcgttatactcgatgtagcggtaatccttgccgatgatccggcgcatcaggttgtgatactgctcctcgtaggggctttccacgctctgcagatagggcacatcggtgccccaggcatccagaccggagcaggtgccgtacacaccggtctgggtgttgtaccccgcgctggccgaccacactgcatcgatgacgctgccgttgcaggtcagcacctcgtccttgacctcagagactgccctgcggatggcgctgcgggcagaggaagggatctgatccacgggggtgtacaccagcgcgttggccgaagagccgtatttcttgtggtattccagataggagtggatggccaccgcctgcgctttccacgcctgctgtgcagccgcgtcactgacatagctgccgatggagcccagctcggtgtaggtgatgcccaccagacaatcctcaagatccagggtcacgttccggcgcagaccctgccccttgacgttcaggtagggcatggtgatggtatcgccggagccgaagagccagctcaggcagttttcctcctcgtccgggatcagagtagtgttggcaccgcccatggtggtggcaccggcgggcagggtgtccccttccgctgcaaaggcggcaggcactgccatgcagagcagcaccaccgccagcatcagcgccgcacaccggcgcgcaaacttcgacatccgtttcaagttccttgtcctcctgcgttctgtattttattcagtttagcacagtgcagggccgcgggcaaggacttgaatcaagaaaacgccgccgggcagagccaaaaagctccacccggcggcgtttcactgtttctatcttatgcttcctgtcagcggctctccccgcgctgtgcaaggcgggagaagcgcttatccttttcgtcgtccttctcggcatcctcagccggggcggcgggggtcaggcgcacctccgtcacgcggcgcttggcggtgcgggtaacaacaccatcgtactcgcccagggtaaagcggtcgcctaccttgggcagatggcaggtcttttcctgcaccagaccgttgacggtattggaatcgatgtcctcttcctccggcaggtcgagctcctcatacagatcatcgacgctggcagagccggacaccagccagctgccgtccgactgcttgcggaagtcctcagtgacctcgtcgtgctcatcccagatctcacccaccagctcctccaggatatcctccagcgtgatgatgccctcggtgccgccgtattcgtccacaacaacggccaggtggtggtgctgctcccggagggtgcgcagcagctgggagatctgcgtggagcccgtggtatacagggtgggcaccaccagatcatcgatcttggtcgcctttttcaggcgggcgatatagaaatccttttcatgtaccacaccaatgatgttatcaatggtgccgtggtagacaggcagacgggagtaaccggactccgcaaaggtctgggccagctcctccagcgggatatcatcctccacagccaccacatccacgcggggggtcaggatctcctccacctccacgtcatcgaactcgatggcgctgcggatgagctcgctttcccggtcggtcagttcgccgtcattttcagcctcgctgaccatggtcatcagctcaccctctgtgatggtatcggcctcgccgctgtggacaaagtggcccagcagctttttccactgggtgaacagccaggtcagcggggtcatcagggccatcaggagcacaaggaagggcgagactgccgtggccaccttttccggcatctccttggccaggctcttgggggtcacttcgccaaagatcagcacgatgatcgtcagcacaatggtagacatcgttgcgccccgctcggcacccagcatctgggtaaacaggatggtgccgatggaagcggcggcgatgttcacgatattgttgccgatgaggatggtggaaagcagcttatcgtattgctccgccatggccagcacccgggcggcagaggaatcgccgtcctcggcgcggcttttcaggcggatctgattcagggaggaaaatgcggtctcggatgcggagaaaaaggcggagaaacccaccaggatcaccagcgctacccagagcgtcatactgccatcgtccataataaaggaaaatcacactcaactttctgttttttatgaaagaacggactccctcagtctgcttcgcagccagctccctcaaagagggagccttgccgcacggtcagcctccctcaccgagggaggtggcatcgcgcagcgatgacggaaggagttctttcctagggatacaaaaatgtgctttccaccgtggctgttccgcgatgaaaagcacatcaatgttacttgttataatatcatattccgcacccccatgcaagcattacagccggcacagaggtacaaaactggtaaaactgtggaaaatcatttcagcacaagggcatttccgtcgtaatccacggtcagggtgctgccctcggcatagcggccctgaatgatcgccttggcgatcagggtctccacccggctctggatgaaccgtttgatggggcgggcaccatagacgctgtcgtaggcagaatcgatgatgtagtccttggcggcggtggtcacgtccagattcagatgcttgccctcgtccatgcggctgcgcaggtctgccagctgcagatccacgatcttgcgcatctcgtccttggtcaggctcttgtagtagacaatctcgtccagacggttcaggaactcggggcggaacttgctcctcagcagcaggtcgatctgatgctttgcctcgtcgctgagttcgttggtgccctgtgcccggcgctgctccagatcgttcagaatgatgtcactgcccagattcgaggtcaggatgatcaccgtgttcttgaagtccacggtacggccctggctgtcggtgatgcggccatcgtccagcacctgcagcaggatgttgaacacatcggggtgggccttttccacctcatcgaacagcaccacgctgtagggtttgcggcggacagcctcggtcagctgaccaccctcctcataacccacgtatcccggaggcgcgccgatcaggcggctgacgctgaacttctccatatactccgtcatatcgatacgcaccatgttgcgctcatcgtcaaacagagcctgtgccagcgccttggccagctcggtcttgcccacaccggtggggccgaggaagaggaagctgccgatggggcggttggggttggcgatcccggcgcggctgcgcaggatggcctcgctcaccttggtcacggcctcgtcctgaccgatgactctcttgtggagcacatcgtccaggtgcagcagcttctcgcgctcgccctccaccagcttctccaccgggatgccggtccagcgggccacaatgcgggcgatctcctcgtcggtcacacggtcacgcaggaggctgtcctccttcttctcgttggccagcttttcctccgcttccagctgtttctgcagctcgggcagcctgccgtatttcagctcagcggccttgttcaggtcatactcacgctgggctttctcaatggcggcattggtctgctcgatctgctcacgcagggtctgcaccttgccaatggcgttcttctcgttttcccactttgccttcatgctgcggaacttatcctgcagctcggccagttccttttccagctcatgcaggcggctctggctcagggcatcggtctcctttttcaggctgacctgctcgatctgcagctgggtgatgcggtgggccagatcatccatctcgctgggcatgctgtccatttcggtcttgatcatggcgcaggcctcatccaccaggtcgatagccttatccggcaggaaacggtcggtgatgtagcggtccgacagggtggcagcggcgatcagggcgctgtcgttgatcttcacgccgtggaacacctcgtaccgctccttcaggccgcgcaggatggaaatggtgtcctccacggtgggctcatccacctgcaccggctggaaccggcgctccagagcggggtctttttcgatatactggcggtattcgtccagcgtggtcgcaccgatgcagtgcagctcgccccgggccagcatgggcttgagcaggttgcctgcatccatggcaccgtcggtcttgcccgcacccacgatggtgtgcagctcatcaatgaagaggatgatcttgccctcgctcttcttgacctcattcaggacgctcttcaggcgctcctcaaactcgccgcggtactttgcaccggccaccagcgcacccatgtccaggctgaacacggtgcggttcttcaggttctcgggcacatcgccgcgcacgatccgctgggccaggccctcagcgatggcggtcttgccaacgccgggctcaccgatcaggcaggggttgttcttggtcttacgggacaggatacggatcacgttgcggatctcctgatcacggccgatcacggggtccagcttctgcttccgggccagatcgaccagatcctggccatatttctgcagagcgttgtaggtatcctcggggttgtcgttggtcacgcgctggttgccgcgcacggcagtcagctgctgcaggaacgcatccttcttgatgttgaaggcgcggaacagctccgtggtgttctgggtcggctcatccagcaggcccaggaacacatgctcaacactgacgtattcgtccttcatggccttggcttcccgggcggcggcgctcaggactttatccgttgcctgcgagatatagaccttgtccgggtcacggccggagccggacacccggggcagggccgacagcttttcggccacagcagcggcaaagctgcccgggtccacgttcagcttctgcagaagctgcgggatcaggccctgctcctgcgaagccagggcgtgcagcagatgttccggctccaaagcgttgtgctggtactccacagccagctgctgggcagcctgcagagcttccagcgttttctgcgtatattgattggtattcatagaatcgacctccattcgtaccggaagtgttatttcagcagtctttcagatcgattgccatttcatttttagcactctatctgtttgactgctaaaactatactccaaacaccccactttgtcaatagggttttcgatggtacggcaacaattcacaaattgtttgcaaacaagacaaaaatgccgccccggcagacccgaagcggcacaagttctcttgatatgggggcaggacactcagctcaccactgcgctttccgtcagcgcatcggtgacggcatccatcagggcgaccatggtgcagtaattctcaccgtaggtgccggtgtaggaggaataggtatcgatctgctcctgggtgggcacgatgtccagtgtctcggccactgcctgatagagcagagcctccttggagtaggtggtgatgctgtcgctcatcccctccagcagggcatcggcgttctcatagccagcggcggtctgcacaaagctgtccagatcgtagccgtagtagttggccatggtgtagtagtagttcaggcactggttcacctgataatcggtgacctccttgggcagctccttgaaggtggagtttgccagcaggtcgtccatgatggcgttctgcaggttggtgttgtagagcatcttctggtagagcgccttcagctcctccacggtgtgaacatcatcgctctcgccgtagttctcggccacccacgcgtcggtcagctcgggcaggaccttctcgctgatgtagttcagggtaacggagaacacagcctttttgccgctcaggacaacggtgttgccctcggaatcggtagaatcgctgtatccctccgggaaggtcacggtgacatcaaaggtcccgccgggggtgtggcctacaatctgatcctcaaagccatcgatgaaagtaccgctgcccagggtcaggctgtagccgctgtaagtgccgccgctgaacgcaacgccatccacggaaccggcatagtcgatgttgacggtatcaccgtccgctgcggcacggtccgtcacctgcttctcggtggtgtggtcgctgagcaggctgtcgatctcgctctggatctcctcctcggtgggctcgatctcagaacgcttgaaggtaaggcttgcaaagttctcgggcagggtgacatagtcaagcgccttcacaccctcccagtagccgttctcgtccagaccgctgctgtaggagaagttctcgtaatcgtaatcttccgcgctgccgtaaacagcggcggctgtgctggaagcggcagaagaagaatcagcggacttggagcagcctgctgcgcccagcaccagcgcaccggcgcagagcaggcagaccgcctttgtgatgatctttttcaaaataaagttcctcctgttggaacgccggcatcccgccgggttcagattcgggtcgcatagtacagaccttattataaagggcaaaagtgaaaaagaaaagaattttgcagaaattccacaaatagagcgccgggtttgtccgacttttgcggggcaccggccgaaaaagcggcttttccggtggaaatgcccgcccggttctgttaaaataaaagagatacgagaaaccccggccgctcccttccgcgggaagcgcccgatacaaacggaggaacaccccatggattacaacaaagccgcccttgaaatgcacgagacccaccacggcaaggtgggcattaccagcaaggtggaggtcaagacccgtgatgacctgtctaccgcctacacccccggcgttgccgagccctgccgcaagatcaaggaaaaccccgacgatgtttataagtacaccttcaagggcaatatggtggccgttgtctccaacggcaccgccgtgctgggcctgggtgacatcggccccgaggccggtctgcctgtgatggagggcaaagccgtgctgttcaaggagttcggcggcgtggatgccttccccatctgcatcaatgcccacgatgccgccagtgtgatcgcagcctgcaaggccattgcccccacctttggcggtatcaatctggaggatatcaagagccccgagtgctttgagatcgaagagacgctggagcgggagctggatatccccgtgttccacgatgaccagcacggcaccgccatcgtggtgaccgctgccctcatcaacgccctgcgcgtggtgggcaaaaagatggaggacgtgcacatcgtcctgaacggccccggcgctgccggtactgccatcatcaagatgctgatgaccgccggtgccaaggacatcgtggccgtggaccagttcggcaccctgtacaagggctgcaacagcgccgaggcccacaagaactggctgggcgaggtgaccaacccccgccagatcaagggcggcctgaaggaagccatcgagggagctgacgtattcatcggcgtgtcccgccccggcatcctgaccacagagctgtgcaagaccatgaacaaggatgccatcgtctttgccatggccaaccccacccccgagatcatgccggacgaagccaaggcaggcggcgtgcgcgtgatggccaccggccgcagcgacttccccaaccaggtcaacaatgtgctctgcttcccgggcctgttcaagggagctttgagcgtccgcgcccgcgatatcaacgaccagatgaagctggccgcagcctatgccatcgctgacctgattaccgatgccgaccgcagcgaggagaacatcatccccggcgcgttcgacccccgtgtggccgaggccgtggctgctgccgtggcaaagactgcccgcgagaccggcgttgcccgcctgtaaagggaggaacacgagatgagaaacatctccgcacaagccatcaccgataccgtagcccggctctgcatcgaggccaacacccgcctgccgcaggatgtgcaggcggcgctggacaaggcccggcaggaagagccctggccgctggcaaagaataccctggacctgctgtggtccaacctgagcgccgccagagaaaaagacctgcccatctgccaggacaccggcatggcctgcgtgttcgtggagctgggcaccgatgtccacatcgacggcagctttgaagccgccatccacgagggcgtgcgccgcggctacaccgacggcta

SEQ ID NO: 958 - DNA, 13796 bp, unidentified
  source 1..13796: mol_type = unassigned DNA
caagggctgaagcgttccgaagtgcctccgtttctcggtttgaagcgctctgaccacagcaacgatatgcctgcctaaaggttcgactgctgctgacaatgctccaccatacagtttgtacccgaacccgattctttgcgaaaaagggttcgggtacttttttgtttcacaagatgttctctatgccgagagtatgcagaacggtaaacaggaacgaacaaaggcaggatatcatcatggcgatggtatcctgccttttatatacgatatggtattgggggcgatcgctgcgcacaaagcgccttaagcccctgtgtttgcttcggtcagcacaaaggtcagctccgctgtggcagcgcacttgccatccacataagcggatgccttcccgatgcccaccgggccgcgctgttccaccagctcacaatggagcgtaagaacatcccccggggtgacctgtttgcggaagcgggcattcttgatgccgccgaagagggccagcttgcctttgttttcgggaacgctcagcgccgccacggctccggtctgggccagtgcttccaagattagcacccctggcatgaccggttggcctgggaagtgaccgcagaagaattcttcattgcgggatacgcacttgcggccaatggcccactgacccggctcgtagtccaggatgcggtccacgagggcaaaggggtagcggtggggcagaagggctgcgatctgctcactgttcagggcgtttgcgttctcccgcacggtgcgcggttctgccatggctcagccctcccatctgcgcagggcgatgcaggcgttgtgcccgccaaagcccagactgttgctcagtgcgtaggtcatggcctgtgcacggcctgcattgggcacatagtccagatcgcattccggatcaggctgctcgtagtggatggtgggcggagcaaactggtctcgcagggccagtgccgtgaacacggcctcgatgccgcccgcaccgcccagcagatggccggtcatgctcttggtgctgaccacggtcagctgctttgcgtgttcaccgaacacggcatggatggcagccgtctcgcaggcatcgttcatgtgggtgccggtgccgtgggcgttgatgtgatccacctgctccggggcaatgccggcatcggccagtgtcagcttcatgcagtcgatggcacctgtgccgccgggagccggtgcggtaaagtggtaggcatcgcagttggcaccatagcccaccacctcggcgtagatatgcgcaccgcgtgcccgggcgtgctccagctcttccagaaccagcacaccgctgccctcgcccatcacaaagccgccgcgacgggcatcaaagggcaggctggcagcgtccgggtcggtggcggtggaaagcgccttcatgctggtaaagccgccgatgcccagcgggctgatgcagctttcggcaccgccgcagaccatggcagtctcgtaaccgtcccggatgcggtggaaggcatcgcccacagcattggtgccgccggcgcaggccgtgaccgggcaggtgcacatgcccttcaggccaaagcggatggccacctgtgccgccgccatgttggcaatggacataggcacaaagtaggggctgaccttctccatgcctttttcttccccgcgggtgtgctgctcctcgatggtgggcaggccgccaatgccgctggaaaggaccacaccgatgtttttagcctctgcttccgtgttcaggccgctgtcagcaatggcctcggctgcagcagccagtgccagcagggtgaagcgggccatcttgcgggcttcctttttgtccacaacggtctcggggtcaaagtttttcacttcaccggccagcttgcacttgaaatcggtggtgtcaaactgggtgatggggccaatgccgcaccggcctgcctttgcggcagcccagctgtcggcagcagtgttgcccagcgggttcacggtgcccagaccggtgatcacgactctgcgtttttccatagagaatttctccttttacattgccatgccgccgtccacacagagcacctgcccggtgagatagctgctttgttctgcggcaaaaaacgccaccgcgtttgccacgtcctccggctggcctgcgcggcctgccgggatgtcctttgccatttcggtgcggacagcctccggcagggcggcggtcatatcggtttcaataaagccgggcgcaacagcgtttactgtcacattgcggctggccagctcccgggccaggcttttggtcaggccgatgagcccggccttgctggcggcgtaattcgtctggcctgcattgccccgcagggcaacgacgctgctcagattgatgatccggccccagcgctggcgcaccatccgacgggccgcttccttgcagcaaaggaatgcacccttgaggtttgcgtccagcacagcatcaaagtctgcttcggacatgcgcaggatcaggttgtcccgggtgatgcctgcattgttcacaaggatatccacccggccaaaggcgttcaccgcctcctcaaagagctttttgcagccctcggcggtggaaacatcggcctgcacggccacagcctgcgcgccctcggctctgcagagagacacggtctcagcggcggccgcttcgccgtggcagtagttgaccaccacatggcagccctgccgggcaagctgtacgcacactgcccggccgattccccggcttccgccggtcacaacggcggtacggatgatggtttcttcgttcattgttcttccttccatgcgttcagaacggtgtccagctgcgccggggtctccaccgacacacaagtcacaccgggcagggtctttttcacaaagccggagagcgcattgccggggccgacctccagaatgtgatccacacccagctcgcccagacggtgcagggtgtcctccatgtagacactgctctgtacctgccggaccagcagggccgggatgctgtcgctctcggctttttcgcggcccaggcagttaaacagcaccggaacactcatttcgccaaagggttcggcggtaaagcgctttgccagggcatccccggcgggagccatcaaacgggtgtggaacggtccgctcaccttgagcgggatgcaccggcgggcaccggcctgctttgcaagctccgcggccttgtccactgcggccttttcgccgccaatgaccagctggcccgggcaattgtagttgcagatctgcacacagcccagcgcggatgcctgctcacagcattctgcaagggggacccggtcgaggttcagcactgcggtcatgccgcagtcgatgccgctggccgcatcggccatggctttgccgcggtaggctgccagctcaatggcctgcttggcggtgaatacaccggcggcttccagcgcggaatattcgcccagagagagaccggccacataagcgggcttgaccccctgctcggccagaacggcggatacgccgcaggcaaaggccaccatgcagggctgggtgtattcggtctgattcagaacgccgtccgggtcgtcgaagcagacgcggtgcagatcaaacggaaggtctgcagcgtcgaacgcggcacggaaagcggaagatgcttcgtaaaattctttgcccatgccggggtgctgggcaccctggccggcatacaaaacagcaagcttcatcggttttgcctccattcggtcacaagttcatccatcagctcacggacagtgtacatccggtccagcctgcccacattggctccgcagaagaaaagtccttcctccaggttgcccttgaccgcttcgatcagtgcatgggtgatgcagtagggcaccttggctgggtcgcaggtcttcaggcagcgggcacagtgccggggcgggaagcgtctgccctccgccatggcctgcaccagcggcgtgttcagcgcccggcccggcattccgaccgggctgtggatgatgcgcacatcctcagaacctgcattcagcagaacgtccttgtacccctgggatgcatcgcactcgtaggtggtgataaagcgggtggcaagctgaacgcctgcggcacccagtctggtaaagtgagccagatcggccccggtgtacacgccgcccgccacaaacacggggatgctgtggccgaactgcgcctcatagggctttacctcggccagcacctccggcaggatctcatccagtgtctgacaggttccggagaacaggtcctgctccgcaaagccgagatgaccgcctgccttgcagccctcaatgaccacgaaatcggcggtgcggccgaactccttggcccagcggcgcaggatgagctttgccgcccgcccgctggaaacgatgggtgcgatggcgacctccatcgtgttcacaaggccgggcagctccagcggcagaccagcaccggacaccacagcgtccacgcccgcttccacagcggtgcggatggcggcggcatagtcctgcgtggccaccattgcattgatggccaccataccggcaccgtttgcaatctgctttgctttccggatctcagcggtcagggcgcggtggttggcgctggccgggtcacgggcaaagtctggctcccggtagcctgcatcggcggtggagatgcaccgcaggccgccacggcaccggccagcccgcccagagaaacgcccacgcccatgccgccctgcaggatgggcacagacagggttttctttccgagcgtcagcattcctcgctcagcgcgtggatacgctgcctcccgccgttccacagatcatccagaatgtccgccacagggcgcacctcgtggagcattccggccacctgaccggccatcagactgccggtggaggtgtcgccttcaaacacggcccggcgcagactgcccagggtgtacttttccagctccatcttatcggcaccggccttttcctgccggacatattcacggctcatccggtttttcagcacccggaccggggaaccgccgatgcgtccggtcacgatggtgtcgctgtccttggcattgagcagggcagccttgtagttttcgtggatggggcactcctcgctcaccagcaggcaggtgcccacctgcacgccgcaggcacccagcgccagggctgctgccagctgacggccatcggcaatgccgcccgctgcaatgacgggcagatccactgcgtccaccacctgcggcaccagcgccatggtggccatttcgcccacatggccgccgctctcggtcccttcggcgatcacggcatcgatgcccagcttctccagatgctttgccagcacggcggcagccaccacgggaatcaccttgatgcccgccgctttccacatgggaacatatttgcccgggttgcctgcgccggtggtgaccacctgcacgccttcttccacaacgatctgggcaaactcatctgcctgcgggtgcatcagcatgatgttcacgccaaagggcttgtctgtgagctgcttgcaccggcggatattttcgcgcagggtgtcggcattcatgccgcccgcaccgatgatgcccagtgcacctgcattggagcaggctgcggcaaactcaccggtggcaatgtttgccatgccgccctggatgatggggtatttcgttcctaagatctcgttcagtaatttcatatgatgtttccagtcaacgggccggggcttctctgtgggttggccgttgggatggcccgttttgagaaagctgccggaacgctgacgcattcactctttgtattgcaggatcgcgccgccccaggtcaggccgccgccaaagccgatgcaggccagcggtctgcccggggtcagctgcccgctctcggccagctcgttgagggcgaccggaatgctggcggcgctggtgttgccgtggcgatccatgttcttataaaattttgccgggtcggcctgcagggccttgatgcagtggtcgatgatgcggctgttggcctgatggcagaccacccacgacagatcctcgagggtcagccgggtctcgtccagcaccgtgtgcaggcacttgggcagggcatccacggcaaagcggaacaccgccttgccgtccatggtgatgggggcagagccttcccggctcggcccgcccgcatggaggacatcactgccgcgtgcccccagcgtcaacgcaaagggagtatctgccagccggaaaatggcggctccggccccgtcgccgaacagcacgcaggtggagcggtcggtggggtccatcaggcgggaaagcgcttcgcacccgatgacgagggcatactgcccgcccagagtcgtcagcattccccgcgccacggccatgccatagagaaaaccggaacaggccgcgttgatgtccagcgcgggccggttttcgggcaggcccagcgccgcctgtacctgacaggccacgctgggggtggcatccggggcagaaagggtcgcgcagacacagcaggcaatgtccgccggggcaaggccgctgcggtcaagggcctgccgcgcggccgcaatggccagcgtggcggcagattcgtcctcggtgcaccagtgccgggtgcggatgccggtgcggctggtgatccatgcgtcactggtgtccaccatgcggctcagcgcgtcattggtgatcgtccgtccgggaagtgccccgccggtggcgatcagctgtaaaccattcatgcgttcctcgtttctccgatctggcggtactttttatagcgctgatcggccagctgccggtcgctcatgcggcacaattctttcaggtgggcgcgcagagcggcatccatgcgctcaaacagggccgcgtggcagcgctgggcaccgcccaccggctccgggatcacttcttccacgatgccgccgcggtacagatcctgcgccgtcagcttcatcatctcacaggcctcgccgctgcgggaggagtccttccacaggatgctggcaaatccctcggggctcagcactgagtagaccgcgttttccagcatgaggatgtggttggccacacccagtgccagcgcgccgccggaggagccctcgccggtgaccacggcgatgaccggtaccgtcaggccgctcatctccatcagattccgggcaatggcctcgccctgcccccgctcctcggcatccttgccggggtaagcgcccggcgtgtcgataaaggtgatgatgggacggccgaatttttcagcctgcttcatcaggcgcagagccttgcggtaaccctccggccccggcattccaaagttgcaggccagattttcctccagcgtggagcccttgcggtggccgatgaccgtcaccggcatcccgtggaaacgggccacgccgcccagaatggccgcgtcctccttgcactgccggtcgccgcgctgttcgaagaaatctgtgaacagggcagagatcgtctcgtcgatgtgcggacgctccgggtgacgggccagaaagacccgatcctcggcagtcagcggaccgcaggagcgcaggatctcgtcctcttccaccgccagctctgccagttcggacgcatgggcggtgatggcctccatgtcactgccgctgcccttcagcgcggcgatctgtgcgtccagcggggccagctgctccaaaatatcttttatcattcgtgtttccctccggcatgaagctgcaggacctggatcagcgtatcccgcagctgactgcggggcaccacctgatccacaaagccgtgttccatctggaattcgctgcgctggaacccggcgggcagtttttcaccgatggtctgctcaatgacacgggggccggcaaagccgatgagtgcccccggttcggccagcatgatatcgcccaggcttgcaaagctggcggtcacgccgccggtggtggggtgggtcagcacgctgacgtacagcccgccctttgccgaaaagcgctggatagcggcgctggtcttggccatctgcatcaggctgaaaatgccctcctgcatccgcgcgccgccgctggccgaaaagatgaccagaggcaggcgcttggcagtggcgtactccacggcgcgggtgatcttctcgcccacagccgtgctcatgctgcccataaagaaccggctgtccagcacggctgccacacaggccacgccgccaatgcggccgacggcagtaacggcagcttcgtgcaggccggtcttgttctgagcggcggcaagcttttccccgtatccggggaagttcagcacatcctgcggatcaaggtcagcgtccagttcccggaagctgccgtgatccagcaccagactgagccggtaatacccgccaatgggcatgtgatagccacagttggggcagacatacaggcttttgccccacagggtgcgggcagcacggcggccgcactgcttgcactccacaaactgcggctcgtgccagacagctccggcatcccgcttggccttcaactggaaagtgcgctcccgcatccggttggggagcagatctcggatatcattcatcgcatgtttcctcagatatgtgcggtgatgtagttgtagatgtcacccacggtcttgagctttgccagctcctcgtccgggatggacacaccgcaggcatcctccagcgccatgttcagctccacggcatccaggctgtcggcctccagatcctcggtcaggctggcctccatggtcaccttgtcctcctcgcagttcagggtgtcaacaacgatcttcttcatttcttcaaacgtcatggtaatattctcctttgattggtttgtatttttattatctaaaaagtttgaggtttcttgcgaacacgaccattatatctgaatcgtcggataagtcaagaataatagctaaaatattttatcttttacaattctgacacacttttctccacaggggcagttcctcttttccattgccctttttccccaaacgtgctaatatgggttcagcactcagacaagaaggaacgaaaggatggatcccatgaaattcagcgaaatgagttatacccgcccggacattgatgccctgctgggccagtgcaaggcgctggccaccaaggccgccggggcagccagcggcgaggagctggtgaatgtttactacgagcagagccgcgcctttgccgattacagcaccgccgcacagctggcaagcatccactacacctgcgacacccgtgacgcttattggaaggccgagcaggacttctttgatgccaacggtcccgccgtggagaacgcacgggtggagatcagccgggcatttctggccaacgcccatgtggacgcgctgactgaagcctttggcaccacctgcgtggctggcatgaagaatgccgtgctgggcatggatgaccgcaccgtggagctgcagaaggagtacaacgcccttgtcagccagtaccagcaggtgtacggcggcgcgctggtcgagtttgacggcaagcagctgaccattccccagctgggcccctataaggagaacctggaccctgccgtccgccgcgccgcctacgaggccgaggccgcgtattttgatgcccaccgtgacgagctggatggcctgtacaccaaaatcgtcaagaacctgaacgcacaggcgcagatcctgggctaccacgattacagcgagctttcctatgtacggatgaaccgcatcggttacggccctgccgagatccggaagttccgcgaccaggtggccagcgatgtggtgcccgagctgaaaaaggtgatcgagctgcgctgcaagcgcaccggcatctcccacctgaccttctccgacctgcctgtggcgtttcaggacggcaacccctctcccatccccggctacgatgcccggatggctgccgcccgcaccatgtaccacgagctgagccccgagaccgcagaattcattgacttcatgcaggacaatgagctgttcgacgtggagagccgccccggcaagatgtccggcggctatatgaccagcctgcccacctacaaggccccctttatctttgccaactggaacaacacctctgctgacgtggacgtgctgacccacgagtgcggccacgcctttgagggctatgtggccgagcgtgaccccaaggtccccgcagacctcgagtgccccggcatggagagcgccgagatccactccatggccatggagttcctgacggctccctggcaccatctgctctttggcaaggacactgagaaatacgccctgctccacgccgaggacagcttcctcttcctggcctatggctgcatcgtggacgagttccagcacaggatgtaccagaaccccgacctcaccccggacgagcgcaacgccgtctggctggagctggagcacaagtaccgcccctggatcgatttcgacaacctgcccttctatggccgcggtgccggctggcagcgtcagctccacatctatgagtgccccttctactatattgattactgcctgtccaccatggccgcgctgcagttcttcctgctgagcctcaaggaccacaaggatgcctgggagcgctacctcaagctggtgcgccgcgccggtctggccagctacacggagctgatgcagaccgccgggctgaaggttccctttgaggatggttcgatcaaggccatcgcccagcagatgggccagtggatcgcagagcatcaggtgtaagcctcccggacctacggagattttttcttgcaaaatccgctcttttctatgaaaaagcacagcgcccccgttcactgtaagatcgcagtgagcgggggcgctttcttgtgaataggaggtggattttatcgcaaatacagactatggggatatacggagcggcacaaactccataaccggaaagaaaaatttccataaaacgccaaaaagccctcggataagtcatacctatacaagaaagtttgaacttttcgtgaattttctgtgtttcgaccatggacaggtgggaacagttctgctacaatgggagctgttctttccgccggttcccacgcggcggtttttgtttttactataacacaggaggaactttcatgttagaaaagatctttcacctgaaagaaaaccacaccgatgtcaagaccgaactcatggcgggtgtcaccacctttatgacgatggcctacatccttgcggtcaaccccagcatcctgtccgcttcgggcatggatgccaatgcggtcctgatcgccacctcgctggcatcgttcgttggcactgccctgatggctctgctggccaactatccgttcgctctggctcccggcatgggcctgaacgcctacttctcctacacggtcgtcctgaccatgggttacagctggcagctggccttgatggccgtttttgtggagggcgtcatcttcattgtgctgagcctgaccaatgtgcgtgaggccatcttcaacgccatccccatgaccctgaagagcgctgtcagcgtgggcatcggtctgttcgttgcattcgtcggcctgcagaacgcaaagctgatcgtgaacagcgattccacccttgttacctatcagcacttcaagggcgagaccttccacagcatcggcgtgggtgcgatcctcgctctggtgggcgtgctcatcaccgccatcctgctggtcaaaaaggtcaagggcggcatcctgtacggcatcctcatcacctgggtgctgggcatcctctgcgagctgactggcatctacatccccaaccccgatgccggcatgtacagtgtcatccccaccagcttcatcagcttcgatttctctgcactgggcaagacctttggtcaggtgttcaagaccgatttctccggcgtgggcatcctgaacttcttcgccgtgatgttctccttcctcttcgttgacctgtttgataccctgggcaccctgatcggtgttgcttccaaggctgacatgctggatgaggagggcaagctgcccaacatcaagggcgcgctgatggccgactccatcgccacctgcgccggtgccgtgctgggcacctccaccaccaccaccttcgtcgagagcgcttccggcgtgaccgagggcggccgcaccggcctgacctccatgaccaccggtgtgctgttcctgctggccgtggtgttcagccccctgttcctgaccatccccagctttgcaaccgctccggccctgatcatcgttggcttctacatgatgggttctgccctgaagatcgagttcgatgatcctgctgagggcatccccgcattcctgaccatcctggcaatgcccactgcatacagcatctctgagggcatcgccatcggtgtcatctcctggaccctgctgaatgtcatcaccggcaaggccaaggagaagaagatcagccccctgatgtatgtgctgaccgttctgttcatcctgaaatacgtcctgctgtaacaggcatttgcagcaaacagaaagccccggctccggccggggctttcgtgcgtttattggttcctgtgcgggtggggcgggcaggcttcagccgccgaacagcccgaaaaagctggtgtgtgtcatgcccagcaccagaaacagaagaatgagggcaaacagcaccccaatgatgatgtccatctggtggaccgtgagggggaatttatcgtagagcttttccttggggttgacgaaattcgggtcgttgttgtccagcagagtcttttttttcttagcgctctgggctttggcggcggcaagttctgcctgctccttttccagctgggcctcccgctgggcaagcagtgcctcacggcgggccagctcttcctcccgctgggcctggttcatttctgccatggtggtatcctccggcgttttttctaccagtataccatagaattgtgacagaaaaaactcctcccgcaaaaagcggccttattccgccagcagatcctccaccacatccatcagctgagacggatcgagctggcacgcggtacagcgcgcggccaggcgaaggacccgcaccgggtcaacggagacatctgagatgaaccgcagttttcggtgtcgtccgtgagatgtagaatgcgcggcgatgccaaaggatgtatacgcaccacacgcgggatgataaagtcgttccataacacaatgataccaaaacacaccaatcacctctctatcaaaattgtcacgccgctttgaaacggctgcgtgaatgcaggttcgctgcctacaaaatgttctgacaaaatttatataccatctcttggcttcaaaataaacagccaaaatttcaaaatttggcggcgtgttttgcatgtccggtgaaaccggtagtgcagtaaaaatacgaaccggaaaatggaaatgaatatttttacggaatatcgtagaaaatttaaaaaaaatcaacttcacgcagcaacagatgaaagaatgttccacagaaagtcgaaagcataaaagaaaaatctttgccgcagcttaaccactttttggcggaaaaagttgcgaaatcggtcgtaagatcgagttttctggtatatcacttgttcgctgtgcggataaggttgctcattctgctttgcctccgcatcgtctgccgcagaccccggcactgcccttgtctgaaatgctttcactccggatgcaaaccagatgaaaaatccgacgggccgtgtcacttgactttccccttgcaggggagtatactccggggcagtgaaatattcggctatgacgagaaagagtacccggaaagaatgctgcaga

SEQ ID NO: 959 - DNA, 9282 bp, unidentified
  source 1..9282: mol_type = unassigned DNA
ccaccactgatatcgagtatgccttcccgttcaccgactggggcgagctgtggggcattgcagaccgcaccaactacgacctgagccgtcatcaggaagcctccggcaagagcctcgagtacttcgacagcgagaccaacgagcactacatcccctatgtcatcgagccgtctctgggctgtgaccgtgtggctctggccttcctgtgcgaagcctacgacgaggagcacctgaccgacagcaagggcaaggaggatgtccgcaccgtgctgcacctgcatccggctctggctccctacaagtgcgccgtgctgcccctgagcaagaagctgggcgaaaaggccatggagatccgcaacgagctgagcaagtacttcatggtggactacgacgataccggttccatcggcaagcgttaccgccgcgaggatgaaatcggcaccccgtactgcatcaccgtggactttgacaccgtgggcgacgaggccaagggcatcgcggccgacaactgcgtcaccgtccgtaaccgcgacaccatggagcaggtccgtatgcccatcagcgagttgaagagctacattgagagcaagatcgagttctgatccgttttttgaaagaactgtgcgcccgtccgcatgccggaacttccggaagcgggcgggcgcttttgttttgaagatgctgcactccctattttgcgtcactttgcgtcacacggcagcccgcctgtccggcccggacaggcaaaaagccgggaggaacgtccatttttccaaaattttccgatgcctggacaaacgacaacaagtttgacgcagccatgcaaaaaatagtataatggccccaggacggaccatagaaaagaagggagacaccggggtgcaggacaaggacggaaagacggtacagggcgggtcaatgacccggcagcaggccgaacaggaaatggagcagctgcgcaaggtgttcccctcggtgcgcatgctcactgcagagcaggtgcaggccggggaggcagtgggagatgctgcccggcaggcgctggaagaaaagaccacccacagccggatggagtaccgcgggcaggagctgtacgaggtgacggccctttttgcgcaggtggaaggcacgccctgcgtgctggagctggagcgcaggctggaccggatcatgctgctggaccccgaagaaagcgaacagttgttcaacaaccttgcggagtaccgtggaaaactgtaccgcgatgcggtgaccggcgcgtacaatgagcgctattaccaggaaaaataccgcagccgcatcctcacggctggtgtggcggtgctgcgggtggacgacttcaaggcggccaacgacgtatatggccgttacgccggaaacagcgtgctggaaaccgtggccggggtgctgcgccggaatctgggcgagaaggaccgccttatccgccgcggcgaggaccggctgctgctgcttctgccggaggtggggcagagcgacttcggccagaagctggagcatctgcggctgcagctggcggcggccggtgttccgggctactcccatctgcacatctcggtgagcatcggcggtgtgtggatccgggacggggaagtatcggcggcggtggagcacgcagagcggctggctacctatgcccagatgcagaagaacaccgtgatcaccgagcagcagccggagcgcacggccgccgcgccggtgcatcgccgccagagcgtgctcatcgtggatgactctgagctgaaccgcaaaatgctggggcagatgctgggcagccggttcgacatcgccgaggcggccagcggcgaggcctgcctgcagctgctggaacagaacgccaccggcatttccatcgtgctgctggacatccatatgcccggcatcgacggttttacggtgctggaagagatgaaccagaaaaacctgctggaacagatcccggtgatcatgatctccagcgaggacaccgtggacgcggtgcggcgggcctttgacctgggagcctcggattacatcagccgcccgttcgacgccaaggtggtctatcagcgcatcatcaacaccatccagctgtacgccaagcagcgccgcctgagcgccatggcggcggatcttgcttttgaaaaggaacgcgccagccggatgatgatcggcatcctgagccaggtggtggaaaagcgcaacggtgaaagccgcgaccatgtgcagcgggtggcacagctcacctccatgctgctggccgggctggcccaaaagaccgaccgttacccgctcacacgggagatgcgccgcaccattgccacggcggcggccctgcatgacattggcaaaatggagatctgcgaggacttgctgcacaaggaaggcccactgaccgaggccgagcgccgtaccctgcaaagccacaccctgctgggagcacagatgctggaagaacagcccgaatgccgggacgacgcctttgcccgcacggcgtacaacatctgccgctggcaccatgagcggtacgacggcggcggctatccggacggcctgcagggggagcagatccccatcgaagcacaggtggtgggcctggcggacgtgtacgagcggctggtgagccgcccggtggacggccacgcccgtacccacagcgaagtggtgcagatgatctgtaccggggtgtgcggggctttcaatccgctgctgctggactgcctgcaggacatggaagccgagatcgcgcgtgccatgcaggacacgccggaagaaacctgaaaacatcacaccaaccgggaagtgcacgggaaaccagcgcacttcccggctttttgtgtgcataaaacagaaatccggtccttgcccgcagacacaggctgtgttaaactaaaggaaaacagatcgcattatgaggaggaatggttcgtgaaacaactgcaaaggtttgtgcgccgcgctgcggcgctggtgctggcggcggtgctttgcctgtgtactccggcagcactggcagcggacgatgctgccgtgtccggcggtgcggtgaccatgggcggtgccaacaccaccctgatcccggcggaagaggaaaactgcctgagctggctcttcggctccggcgacaccatcaccctgccgtacctgaacatccgggggcagggcctgaagaaaaacgtcacactgaacctggtggactgcctggtgggtatcacctacaacgagctggggtccatcggcagctatgtcagcgccagtgcggcccagcaggcctggaaggcacaggccgtggcggtccactcctatctggaatatcacaagcagtacggttcttcggccaatgcactggtctacaccccggtggatcagatcccctccgctgcccgggaagccatccgcaaggcggtggagccggtgaaggatgagatcctcacctacaacggcagtgtctgcgacgcggtgtggtcggccagcgcgggctacaacacccagaccggcgtgtacggcacctgctccagccgcgatgcctggggcaccgaggtgccctatctgcagagcgtggaaagcccctatgaggagcagtatcacaacctgctgcgccgctccatcggcaaggattatacctatgtggagtacaacgacagccgcaccggggagccttataccgatgcggacaccacccacaagagcctgggcggctatgtgcagtacaacacctttgtgtccaacgggcgcagctaccgctacatcgggcagttcgtctcgtcccgctactgctttgactttggcacggacgaaaacggtaccccctgcatgacctactacggctttggccacggtgtgggcatgagccagtgcggcgcggtgggctatgccgcagagcggaacatgggctataaggccatcctccggcattattacaagggtgccagcatcacgagccagggcagcagcggcggtctgttcggctggctgcgcagcctgtttggctgacaaaatgcgccccgcggccatggtacacggcctgagcggccttctggtgtcacattggcggcaaaaaagaacctccaaaattctggcaagggcttctcaagtgcggcgcaatttggtatactatcgcagggacgaaaggtttctgtgatacaaaacaacgcatctgcgtgatacacgttggcggcttgtccgcatcagacgtttggaaaataaaagtgtttgccaaggaatggagaaggaagcatggagttggatcaggaaaaattgacccggaatgaatcggagcgcagccgggagctggcacagcgcatccggcgggagctcggcccctgcagcgtacaggtgctgggcggcgtcggcgcactggaaagtgcactggaagcgaccggtgccgtgcagcctgccgagggtgctctgccggaacttctggtggtggtggacccggagtgggtcaccctgccgcagcagctggccgaccgggtgctgctggtgtgcagcgaagaaacgatgctggccgcctgcgcaaagcagctggcacagcagggcctgtaccgcgatttttcgtggcagagccggggccgcgctttgcagacggctctgttttgccgcacggacgccccggatgcagccgggcagctggccggatatgaggaagaactggacatcctgcgggagcgcatggagctggccgagcgcaccggcgaagagcagggccgccagctggagcgcctgcgcagcgacctttcgctgagccgcagccacgagcaggacctggaaaaaacgctgaacagcgtggtccagtcccagttctggaagctcacctggcccatgcggtatctggtgagcaagtgccgccagctgtggcacaccttcccgctgttcgtctttctggcaacgctgcgccgggtgggcatctccggcgtgatggcccaggcgaaggccaagcgggagtacaaaaagctgttcccgggcaaagccatgcccgccgaccgttttgccaccccggagctgctggtaaagcaggcggccaaccagccggcaggcccgctcatcagcatcgtggtgccgctgtacaacaccccgcagcagttcctggtggagctgctggactcggtgcagaaccagagctaccgcaactgggagctgtgcatagtggacgccgggcaggatgagacggtgggccagaccgtgaaggctcgcgccgcctccgacccccgcatccgttatcggaagctggacaagaacgacggcattgccggcaacaccaatcagggctttgctatggtcaagggcgactatgtggccctgctggaccacgacgacatcctgcatccgtgcgctctgtggtatgtggcacaggccatcgccgagcagggagccgacttcgtgtatacggacgaggtcacctttgagggcgacatcgaccacctgacggtgtaccacttcaagccggattatatgctggacaacctccgctccaacaactacatctgccacctgagcgtgttcagtgccgcgctgctggccaaggtgggcggcgacgagcgggcggagttcaacggcagccaggattatgacctgtacctgcgcctgaccgagcaggcaaaaaaggtggtgcacatcccgcacctgctgtattactggcgctccagccccaccagcgtggcaagcaacatttcggccaagatgtactgtctggaagccgccatgaaggccctgcatgcccactacaagcgcgtgggcgtgccggtggatgacgtgaccatgatccccaacaccccgggcttctacaagaccgactacaccatcacaaagcccggcaaggtgagcatcctgatccccagctgcgaccatggggcagatctgcgcacctgcgtggattccatctaccgcaagaccacctatgcggactttgaggtcctcatcatcgagaacaacagcaaggaggacggcaccttccgcctctacgaacagctgcagaaggagcacccggacaacctgcgggtgctgtactggaagggcaccggcttcaactacagcgccctgaacaactttggcgccaaggaagcaaccggcgaatacctgctgctgctcaacaatgacaccgaggtgatcacccctcgctggctcgaggagatggtcatgtatgcccagcaggagcgcgtgggctgcgtgggcgtcaagctgctgtacccggacaacaccatccagcatgcaggcatcggctttggttacctgaccctggccgcccacatgcacaagaacttcccggtgggacaccccggctacatgggccgtctggtctatgcgcaggatgtctatgccgtgaccgctgcctgcctgatggtgcgcaagagtgtgtacgacgaggtgaacggcctggacgagagttttgctgtggccttcaacgatgtggacttctgcgtccgcgtgcgggaggccgggtatatcaatgtctttaccccctttgcccagctgtatcactacgagagcaagagccgcggcctggacgagagcccggccaagcgcaagcgctttgagtcggaagtgaagcggttccagcagcggtgggccaagcagctggccgccggggacccctgcctgaacccgaactttgacctgatgaaggaggacttcaccttcgacatcaagccgctggagtgaccctctcagtctgctgcgcagacagctcccccgaaagggggagctgtgttcggaaaactgattgaaaacgaaaagaggaactctggtggaactttcagcctgtatcgtagtttataacggcgcagaggaggccctgcgggcggcccagaccgtgctggactgcacccgccgccatccgctgacgctgtatctggtggacaatgccagcccggacggcagcggccagcgcctgacccgcgcggcagccgacggcaccctgcgcacggcaccgggccagcaggtgcaggtgctctgccggaccaaaaacggcggcttcggcaccggccacaataccgtgctttcgctgctgcacagccgggtgcacttcatcctgaacccggacatccagctcaccaccgacaccctgagcgacctggcagactggatggtgcagcaccccggtgtggtgatggcccgcccggccctgacctttccggacgggcagccccagcggctgccgctgcgccggtgcaatgtgcgggccatggtctaccgccagctgccctgcctgaagttctgggcaaagtacaacgaacgctacctcatggcggaccgggacctgacccagcccactgagatcgagttttgcaccggcagcttctcggcggtggacacggccgcattcaaagaggtgggcggttttgacgagggctacttcatgtatgtggaggatgccgacctcacccagaagatgcgtacaaagggcaaggcgtatttggtgccccagtacacggccatccatgcctggcaccgggccgcccaccgcagtctgaagccctttctgtggcagctgcgcagtctgctgcgttatttttccaagtggggctttgcgtggtaagataaaaaatctttgcaacggcttttccggaaattttgccggaagggccgttctttcttgctttttatgtgaattgatagtaaaataaagtgaactgttatctccttttgcaggagaggacagcgctgaacaagttgacagcggacgcagctccgctttgaatccatacgcagtctggccggtacgccgcccgggctgcgtacagctgcacaactttttacaaaagattaaaggagtgcacaagtatgaaaggtatcattcttgccggcggtgccggcacccggctttacccgctgaccatggtcaccagcaaacagctgctgccggtctacgacaagccgatgatctactaccccctgtccacgctgatgctggcaggcattcaggacatcctgatcatttccacccccaccgacacgccccgctttgaggcgctgctgggggacggcagccagtacggcatccatctgcagtacaaggtgcagccctccccggacggcctggcacaggccttcatcctgggtgaagagttcattggcgacgactgctgcgccatgatcctgggggataatatcttctacggcaacggcttctccaagatcctcaagaccgccgccgccaacgccgagaacaagggccgctgcaccgtgttcggctactatgtgcaggatcccgagcgctttggcatcgtggagttcgacaaggacggcaaggtgctgagcgtggaggaaaaaccccagcatcccaagagcaactacgccatcaccggcctgtacttctacaacaaggaagtggtgcagatggcaaagcaggtcaagccctctgcccgcggcgagctggagatcaccaccctgaacgacatgtacctgaagaaggacgagctggacgtccagctgctgggccgcggctttgcctggctggacaccggcacgatggagagcctggtggatgccgccgacttcgtgcgcatggtggaaaagcgtcagggcatcaagatcagcgccccggaggagatcgccttcaagtatggctggatcgaccgcgagaccctgctggccagcgccgagcgctacggcaagagcccctacggccagcacctgaagaatgtggccgacggcaaactgcgctactgagaagagaggcacattggtatgaagatcattgttactggatgcaggggccagctgggcaccgagatcctcaagcagctgcgggaaggccgcagcgagatcggccctatccccgaaaagctgctcaatgccaccgttctgccggtggacctgccggagctggatatttccaactaccggatggtggatgagttcatccgccgcaaccgcccggatgtcatcatcaactgcgccgcctacaccaacgtggacggctgcgaggtgaaccacgacgcagccttcaaggcaaacgcactgggcccccgcaacctggcgcaggctgccgaaaagaccggtgcccgcctggtgcatgtgtccaccgactatgtgttctccggtcgcgagaacggcggcatcccgcaggatgaagccaccatccccggccccatcagcgcctacggttccaccaaactcatgggcgaaaagtatgtggagcagttctgccaccgccacttcatcgtgcgcacggcatggctgtacagctactacggcaagaactttgtcaagaccatcgtcaatgccggcaagaaattcggcaagctggaggtggtcaacgaccagtgcggcaaccccaccaacgcg

SEQ ID NO: 960 - DNA, 39744 bp, unidentified
  source 1..39744: mol_type = unassigned DNA
attaggaggattatgtgatgaaaaagacaattgctgtgttatttgcagttatgatgatgttattgtcggcagttcccgcatttgctgccgaaagtccggaaccgagtacattcaaatataaggttgaagttattccgacagagggcggtgacggtgattataagttcacaacaggtattgacgaaaagggcgaacagcatgtatttattgagccgattccttatgacggttatgtttttgatcactgggaaatttcgggcggtcctttcagaaccgacagcaagtatacagatcctaatatgaatattattatttcaggtgaccttgtttgtactccttattaccgtaaggcaagcagcggcggcacaacaggtcctgttgctacagctacggcaaagaaagatgattcaacaacttcaccaaagacaggcgcaagcgatgttgtaccgtatgcaattttagttctttctcttgcggcttgcggtgcggctgtatttaagcttgtaaagagcaaataatccaaccttaactaaaaatcaagagacttctcgtaaggaagtctcttttttattcattagatgtttgaataatcaggttttgtattgcagatgcagaagtttgtaaattgtaataaaattttactaacaggtaatgattaattgacatactgacacaaaaatgatacaatataaccaattgggagtttttgatatgagcagaaaaagaaacaaatttcttatagctttgattattttgcttgtggctgcaattatcggcacacttgcgtacatagtcgttaaaaacttaaatgaaaataacgaacgaaaaagtcttgataacatcgcaggctcgtatgcgtcaggtattgaaaacggtacaacctctgcaacagaagtgacttcaccgtcaatcaatgtgaaaaaggtcgaaaatccgattgatttcaagtcgcttcaacagcagaacagcgacatttattcgtggatttacattccaaatacaaatgtaaattatcctgttttgcaaagtcatcttgacgataacttatatcttgaccacgatatttataaaaattacagcttttcgggcagtatctattcgcagatgtgcaacaagcgtgattattccgacagagtgactgtgctttacggtcataatatggcaaacggctcaatgtttgcaacgctccatcgcttttatgatgccgatttctttaacaagaacaggtacatctatgtttacactctcgacagaaagcttacatacgaaattgtgtcagcttttgaatatgataaccgacacattatgaattcgtttgatttttccgatgataatgtattttcggattatctcaatatgattaaaaatccacattctgtttctgtgaacaagagaaatacggagcttactaccgatgataaaattcttgttttaagcacatgcttaaacagcggtgacggaagatatcttgtgcagggagtgctgaagaaagatgaaccgacaaaatgaaagttcggctgaggcaacaactgaaaatatagaaaacaagcttgatccgaatacaccggaaattcttgaatcgaaaagagaaaagaacagtaaggagcatgtaagcaatccttcaaggttggatatagaaggttatattttcaaggacagcaagttaataaagaaaaagaaaaaagtatatacagatgtgtacggtgttgattccgacagcattgtcgtgaagagtaacaccacaaatcactataaaaagcatagatcaaagtcgcatcatcaccattcaaagcatcgaaagatgaaaacctggaaaaaggtgcttttgtcaatcgcctgcacattacttggtttaattatactcacagtaggcacggttgcgtatttgatttatcagggcggaaacgagctgtttaatacggatattcatgttaccgccccacagggcattgaaaccgaggaaaacggtaagtatgtcgtatacaacggtgaaacatatcagttcaatgaaaaggtgacgaatgttctgtgtatcggtgttgacaagcgcaaccttgacgaaaataataacagcaaagtcaaggcgagcggcggtcaggcggatgtgcttatgcttgtgtcaatcgacacttcaaacggtaaaataacgctcttcaacatttcgagagattcgatggttgatgtcacaatgtattcagcaggcggtgcgtatgcaggcacggaaaaacagcagatttgtctttcgtattcatacggtgacggtaaggaatcaagctgtgaaaatacggtaaattcagttcagaggctgttctacaacattccaattaatacatacttttcgcttgaccttgacggcatttccgctctcaacgacagcgtcggcggtgttgatgttgtgtcacccgaaacaatcggggagtttgttgagggagaaagctatcaccttgtcggacagcaggctgaaagctttgtcagaacccgtgatacaagcaagaccgattcaaacaatatgcgtatgcaaaggcagaaggtttacattcagtcttttatgaatacggttcttcagcagacaaaggaagatttaaccacgccgattgatttgttcaatgcgtccgctccgtattcatgtacgaatcttaacccgtcaaaggtgtcatatcttgctcagcaggctgtgcttggcggtatgaacggaattgatatggtttcagtccccggtcaggttacaatgggttcaaagtacgcagaattcaatgtcagcgaggcagaattttatcagctgtttttgagtatttattatacgaaaatagaataataatcaaacaaataaaatgcatcagattccaagtaaggttctgatgcatttttgttttatgtgcaatgcggttgttgaatcgtgcgaataataacaattctacgctcgggcataatatgttttaatatcgcaaactttattcacgaatagggaacggcggctcgccctaatttagagcgaataaccgcaatgttacgctcgggtgtaatatgttttgtattaaacaaactatcttcacgaatagggtacggcggctcgccgtaaaaaacagacagccgataattggctgtctgcattttgttcaatattcaatttgatgcggaggttgtttcttttgaagaagtaccgcctgtgaacaattcttcaaaaacaaagcttgcaaacttctttctctgttcttcaaggtctgaaattttgattgttgatgtgattgcaccgttccatgtttcggttttatcatcatagtaccaaagaccttcttcaggaacataatactgctctacatcataggaaagatatgtgagagcgtgagaaacaagtgctgtgatttcgtccttcttgaggtttgttgttacaaggggaccgacagagcttacaattgaaacaatctgaccgaggtccgcactcttcatacttgtaaacaaagtttcaagaagctttctctgtcttgaggttctgtcccagtcgtcaccgtcaagaccgatttcgttgccgtcctcgccctttttaagacctctgtttcgagcataccaaagagcctcctgaccgttgagatgaacagtacccggtgcgtctgtgatagttgttcttgtgtcagcctgattgttcttgtacatctgatagttgatgtagtcaatttcatcctgagtaacttccatatcaacaccgccgagggtgtcgataatcttcttaaagctgtcaaagtcaacaaccgcataacggtcaaccttgatgccgaagtttgcctcaattgtctgaattgaaagctttgctccgccgtagttataagatgcgttgagcttgtcatatccgtaaccggggatataaacataggtgtcacgctggaatgatgtcagtttaagctttttgtggttgttatcaatggtcatcataatcattgtatcacttctgccgtattcatcgccgtttgagttgtcctcaccaaagagcataacattaagctcttttgagttctgcagaagttcaccctctgaaagcgaaagatttgttgcgtcactctcaagcggtgcaaccgatgagttggtagctactgtgttgttggtgtttgtgtcatcaagctctttgaagttgagagtatcaaggaacgaatagtagtagagcattccgccgccgcccaacaggaagattattgaaaacacaaggcagagaattcttttaagtctgccttttttattatataattttttgacctgcttatttgagcttatgtcaataaaatcgcttttctgactgcttttttcgtaatttggcatattactcctccaatcgggtaaaaagcacacaatacataagtatagtttattataccatatgagaatttcttttaatgctaaattagaattaaaatctgccttttcgtaaagttttagcgaaaaatctgactgaaaatattgatttttttgtcggtaactgtcaatcctgttcatcaagtgacaaatagaaggacggaaggaactctttttcaaacacctcgttttcgggcatattcatgttgtgaattgaattttcggttgcctcttttgcctttgaaaactcgctgttgcccatttttatttcttcaatacattttatgagtgcggaaaacttgtccgccgcttttacatattttttaagttcatcgtcacctgcaccgttcattttgatgattttatccatatcgtccttaaaatcatccggaagcatcgacacaagtctgttgcctgccgttgtttcaatttccttgtaggcatttttgatttcggggttgaagtattttacgggagtcggcatatcgcccgttatgatttcggttgcatcgtgaaaaagtgcgagcaatgcggctctttcggcattgagattaccgccgaaacgcttgttgtgaatcaaaacaaggcaatgtgcaatcactgcaacatcaagactgtgttcgctgaggttttcacagcgtgtgttgttcataagtccccaacggttgatgtacctcattcttgaaagcattgcgtaaaaatgtgaaatattcataggtagtttctcctgttttttgctaaaaattagtgcaatttgtatcgcattatgttataatgtaatctaaatgcgagtgtcctctgttctctgcaagcaaagcagagcgttactccgaattgaatctattatgtaggtgtcttttgaataaatgacggtgaaggacatttatattactgattatactattcataatttaaaagtaaagaaattatcgaaaaaaagattttttcagactttttgctccgtggagggttttatgccgagcagaattttgcaaaaatatccaacacaaaaactatttggtttgcgtgtgtttcttatatcaattataactgcaacagcactttttctaccgtttatcataatggggggcggtgttttctattattacggtgatttcaatgttcaggaaattccgttttatcagcttgtgcatgacgccgtaagaaacggtgatacgggttggatgcacaatgttgacctcggaacggatatgctctcaagcttcagcttttatcttcttggcagtccgttcttttggctgacaattccgttcccgagtgaggctgtaccgtatcttatcggaccgttgctgattttaaaattcggctgtgcgtcactttccgcatatctctatttgaaaagatatgtggctgacaggaatttcgcccttgtaggcggattgctgtatgcattttcgggattttcaatctacaatgtgttctttttccactttcatgaaccgatgataatgtttccgctgttgcttgcggcacttgacgcattcatctatgacggaaaaagaatggtgttcacacttgcggtattctccgcctgtgttgtgaactactacttctttgtgggacaggttctgttcgtaatcatctattttcttatgattacgcttaccaaaacctacaaatttaaagttaaaaattttctcttgcttgcgcttgaggttatcataggattccttgcaacggcattcatactgctgccgtcagtgctcggcttaatgggaaacccaaggcttgccgagcttccgaacggctgggattcgcttgtctacagtcaaccgcaaaaatactggctgataattttaagcctgtttttccccgcagatatgcctgcgtttcctgtgttcacacccggctcaaattgcagatgggcgtctgttgcggcatggttgccgcttgtcggaatgacgggagttatcgcatattttcaggtttgccgaaaaagctggctcaaaaagcttcttgccgtgcttgctgtgtttgcgtgtgtgcctgttttgaacagtatgttccagcttatgaacagctcaatttactacgcaagatggttctatatgggcgtgcttatgcttgttcttgcaacaatcaaggcgtttgaaaacagaaaaaccgattggaacagggcgattcgttggtcggcaggaattacggtaggcgcaactctgctgataggtcttatgcctgtgagctatacggatgaggagagcggcgatattcaaaatacggttatcggcactcaggcaacatttgaacgctattggctctatgttcttatggctttgttaagtctgcttgcgttcgttctcatcatcaaaaaattcagacgaaacaaaaagagatttacggttatgctcactgtaggtatcctgagcgtttcgctttttacctcatattttataatcgccacaggctatttctcaagcagcagtacaaatgccatcaaagaagatatcataaacaggcgtggcggcatcacaattgccgatattgacaatgttcgcagtgatttttacgaatgtgttgacaacacggcaatgttctggcagattcagagcattaactgctttcagagttctgtttcaacatctataatgcagttttacgatgcactcggaattacaagggatgttgcgtcaagacctgaccttgatgtatatggacttcgcccgtttctgagttgtaagtatctttttgattaccgtggcgacggaaaatcgggaagtctgaattcattcgttgacgaaaacggcaacacaagaatgccgggttggaaatatctcagaacgcagaaccgttttgatatttaccgcaacgaatactacattcctatgggatacacctttgataagttcattgccgaagaagaatttgaccttgtgacgaacgcacacaagtccgaggctttgctctacgcaatggttcttccccgtgaccttatgaagaagtattccgatattacgggctacagcgatgaaaagtacaagcttttgtacggcaaacatccggaggattacgacagcattacggaaaagtttgattacagtaattcagattacaaaaaggtttgtaatctcagagccttgaacagttgtacttcatttgaatatacagataacggctttaaggctgtttacaataataaaaagggtgacgataacctgttgtttttcagcgttccttacagcgatggttttaccgcaactgtaaacggcaaggcggcagatgttgaaaaggttgactacggctttatggctgttaagattccaaagggcgaaaagtgtgacattgtgttcacctacgaaacaccaggattttcaacaggtgtcaaaatcagcctttgtgcattcggagcatttttaatctactgtgcggttattgtgaccgttaaaacagttaaaaaaagaaaaaataagaactgataaagatataatcagcatttaagtacggaggtatttattatgtttggaaacaaaatacttgacttcaaagacgaacttttaaaggatcttaacacacttctttcttttgaatcggttgacggtgaaaagaatgacgagtgcgataatgccttgaattttattcttaaaagagcagaagatttcggactgacaggggagagaacaaccgacaagagcggtcatataacccttggcgacagcggaaagctttgcggtgtgcttactcaccttgatgttgttcctgcgggaaacagctggagcgttccgccgtatgcgcttaccgaaaaggacggcagactttacggcagaggaattgcagacgacaagggtgcggctcttgttactctctattgtttgaaagcaatcaaggacagcggtgtaaagggcgtgaacactctgcgtgctatttacggcacgggtgaagaaacgggtatggaggatatggaaaattatttcaagaaaaatccacttcccgacatggcattcactcccgacagcgactacggcatctgttttgccgaaaagggtattcttcagcttgaaatcagcacacttttaaataatgcaacaacactcagccagttccatgcaggcagagcagttaatgcagttcccgacagagcgtatgtaatgcttgattcatcagactatgacgagcagactctcatgcgccttgcagacgcaagtgacggtgattttgaatttaattacactattgatggtcttatgataatcagccgtggcaaagcggctcatgcgtgtgaaccggacaagggctacaatgccgcagcggcacttgttgaccttatctcaaatgtttacacaacaaaggaaacaggttcaatctgttcatttattgactacgcaattaacaaggaaacaaacggcagatcactcggtcttaaaatgagcgacgctgtttcgggctcgctcaccgtaaacctcagcagcgtgaatattgagggacagaccgcaaaggctgtgtttgatatccgttatcccgttaccgtgagcgtaaacagagttctcaaacagttcaaaaaggttgcaaaaatcagcgacctcaaggttactgttctcaatcacgaagaaccgctttatgccgataaggacagcaagcttgtaaagcttctctctgacgcttatgaaagcgtaacaggtgaaaaggctgagctttattcaacaggcggcggaacatacgcaagaatgctcggaggtcacggtgttgcattcggtcctgcattcaaaaatgacgatgttcgtatgcacaatgcagacgaaagtatggataaggagaacttctttaaacacgctcagatttgccttgaggcaatgtacagaatgtttactgacggagaataatgcgtttcgttatgaacaaattcagatgaaaagggaatgctaatgaatacggaaaaaactgttagaaaacaggcaaaaaaggttcttgaggggaaccggtcggtaattatctcagagataatggtcgctgtgcttgcatttttgacagggctgtttgcgttcagccttgcaatgtctgtggcaggactttatgatgtaaaaaatccgaatcagactcagcagatgcttacaatgattttcgggcttgtattttttgcttttgttgttgtgtgtctgccgctcataaacggagtttacagaagtgtgtgtaatgtagtcaggggcagagagtgcagttctcttgatgttttttactattataaaaagccgaaattattttttaagtctgttattcttgatgtaatttcagtcggcttgttttttatcataagcggtctgctcaatgtgttcaattatcttagtgcggtttcggataaaataattgacaattcaccctcactcacggtggttgtggctgtattgcttgttttggcgtttatcgtcagcactgcggttgttgtggtgtgttacattatttttgttcattatacatttttggcttacggttttaacgaacatctgccgctcggaatttatcttccgagaatgatggctttttcaataaagaacttcatccccacaataaagctgtttatcggttttatcggctgggcggctttgtgcttttttgttgttccggcattttatgccgtaccttattttctgacaacctctgcaatgtctgcaaaatggttgttcgagcttgaagggagcagagatattatatgttagtttcactttgtatgatagcctataacgaatcgaatgctttgagcggacttttcagggatattgcacttcaggactatccgcatgataaaattgaggtggtatttgttgacagtatgtcaaccgatgatactaaagaaaaaatggaaaaattccgtgataccgactacggcttttggaatgtgtccgttgttcaatgcgtaaagcgtaatcaggcaacctcatggaatgccgctctgatgaccgcaaagggcgatgttatcataagagttgacgctcacgcaagaattccgagaaactttgtttcacgaaatgtttataacataaagcagggtgaaaatgttgtaggcggcggcagaccgaatatcacttcaaatgtttcaagctggaagcttaccttgcttgcggctgaggattctctgttcggcagttcggttgcttcgtacagacggccgcttgcgcaaaaggaatatcttgacagcctttttcatgcggcttaccgcagagaggttattgccaaggtcggcggatttaacgaaaatctcggcagaaccgaggataatgaatttcactaccgcattagaatggcgggctacaagatgtgctgttgccccgatattatttcgtatcagcattcacgaaatgaccttcacggaatgataaggcagaagtattcaaacggacggtggataggacttacactctcggaatgtcccggttgtctttcatactttcactttgcaccgtttctttttgtaatggcacttctcggctgttccgtgcttgcatttctcggacttccgctttttttgtacattcttttgataatctacggaatgtttgatattgtaaatgctgtcggatgttgcacaatgaaaaatgttcagcctcagtttgtgtttttgccgttcattttcccgttgctccatgttgcctacggaataggcacgattgttggtttgattcagattccgtcatggcggaagaaaatcaaaaacagcggtgcgaaagaacacattgaaaaggtaaaaagaaaaatcagggaaaatacacttcccggtcattcatacaaataattttttgggcggataatctccgcccgtatttgatatttacggagatacttatgactgaaaaagtagaacttacccccgaacttttgcgtgagttacagcttaaacagcttgatatgctcgtgtatttcagggacttttgcgaaaagaacaatctcacattctatctcatcggcggtgcgttaatcggtgcgctcagaaacggcggattcgttccgtgggatgatgatgttgatgttatgctgccacgagaggactacgaaaagctgtacaagctttggcatgaacagggcgcagacggaagattccgacttctcaaaaccgacagcgatatgttcacgggcaatatttttatgaccgtaaccgacacgaattacactatggtcaagacaaatcagaccgaggttgatattccacacgggcttgtgcttgatgtctttccgcttgatgtttgtcccgacagccgttttgcacgcaaaatgcagtatgtgtggacaatgctttattcgctgtttttggctcaggttgttcccgaaaagcacggcggaattgtgggagcaggcagtaaggctttgctttcaattttcagaggaaaaaagctccgagaaaagatttggagaactgccgaaaagcatatgattaagtacaggcttgataaaaacaagtgtgtaacggagctttgttcgggccctcattggatgaaaattgagtatccgaaacacatttattcgggtgttgattatgtcacatttgagggcataaaaatgccgtgtatgtcgggctatgacgagtatctcagaatggttttcggtgattatatgcagcttccgccggttgaggacagagtgccacaccacgatattgcatatcttgacctgaactcaccgtgtgaaatttatgacagcaaaagaaagaataagcaaaaataacggtgtattatggagcttgtaagagataattggactaaaaatgactatgatgattttgtagaggaacttcgttcatatgccgatgaaaagtacagaagctttcattcctcattgattcccgacaatgacaagggcttttttatcggagtaagaatgcctgttatgcgaaagctcggcaaggaaatttctaagggcaacggacgcagttttttagagcagacaaccgataatttttatgaagaaaaaacaatacgaggtattgtaatcggtttgctcaaaaccgaaagctatgaagaatttttgatgtactgcgatgattttgtacagcgtatagacagctgggcggtttgcgacggcttttgtgcaaatttaaagcagaccaaaaagtataaatccgaatttttccctcatgtttgtgaatacaccaaaagcgacaatccgtggataattcgtgcaggtcttgtgctgatgcttgactattatcttgaagatgagtacatagacacggtgcttgaatgttgcgacaatgcgaaaaatccgcattattatgtgagtatggcaagggcatggcttgttgcaactgcacttgcaaagtgtagagaacagactatgcggtacataaagtcaaattcgcttgataatgcaacctttaataaaatgattcggaaatgcgttgaaagtttcagaattgacgatgaaacgaaaaaatatctcaaaacactgaagagatattgacaaatccgaaattcggcatataatataatcaacagttgtcttcggggcggagtgaaattctccaccggtggttaaagtccactaacaggtgaaagcctgccgagtctgtgaaattcagacaccgacggttatagtccggatacgagaagatgcggcagaacaggcggttcgtctgttttattttggtacgcaatcccgttacatttgtagcgggttttttctttttcccgacaactcgaaataatttttcaggagtggtcgtaatgacaaaatcaaaagcaaaaacaatcaattcagacaacacggcaaagacaacaaagcttgccgtaaccgcaatgcttgcggcactttcggcagttcttatgttctttgaatttcctctcggattcatcgcaccttcattctatgagttcgatttttccgaagttcccgttcttgtcggaacattcagcatgggcccgattgccggtgcagtaattgaatttgtaaaaattctcgttaagttccttatcaaaggcacaagcacaggcggagtaggggagcttgcaaacttcctcatcggctgttcgtttatcctgccggcaggtttcatctacaagtacaaaaaaacaagagtcggtgcgattgtcggaatgcttacgggtacggttgcaatggcggctatcggtgtggttctcaacacattcgtgcttgttccgctctactcgtcatttatgccgcttacagaaattatcaaaatgggacaggcaattttccctgcaattgacggcacatttacattctgtctgtactgcgtaggtccgttcaacatcattaagggactcatcatttcggtagttgttttcataatctacaagccgctttcaagacttatcaacagcctcgatgcccttcttacaaagaagaaaaaagcaacggttcagtaaacccgaaattaatttttggttgacaaacagcaaattcaggcgtataatagtatacggtgtcggaaggcatctatcacagagtagaaatttgtgcgtgaagtgttttgcggacggggagttgccgcaagaacgaaaggtttatcctgcggtacagatttcgcatcccgctgttactttgggacatataattcagcgggcagagcaatctgtccgcttttttcttcctgaagcaacaacagagattcaggaggtaaaaaatatgtcacaactcaaaaaaattcaaagctctttgcttgaaatgaagagtatctacgctcttgcggcaattgcaatgctgcttgcacttcgtattgttctcggatttttcgcaaacagcacacttccgtttttcggaaacaatgtaaagctcagcgcagcgtttttgccgattgccgtaacaggtgtaatgttcggaccgattcctgccgcaattgtcggcgctttgggagatattctttcatttatcattgctccgacaggcgcatattttcccggctttacaatcaacggttttattactggttttatctacggtatgtttctttataagaacaatgtaactccgctcagagttgttcttgcatggtttacaaatatgctctgcgttgaaacattccttatagctttctggctttacacactctacggcggcggttcaacaccgtacacagtttatcttacagcaagatttatcagtgttgccgttaagtgcattcccgagattattcttgtgtttgctcttggtaagcttgcaggtaaaattcgtgttccgcacgcaataaagagaacctgatgaaaagctaatgcaaaattttaaggttggaaatcgactgctccccgcagtagtttccaaccttttttgtttttgtagcggcggatagtaacggtacaatatttgtaattcaacttgctttataaatacaacaatgtcattgttaaactgtagaggcgaacacggctcgccgctatgaataaaataaaagtcggaaagcaaatttaaaatctgctttccgactgaattttttgttataaaatttgactgcacgattaagcccacttgagggtatcgttgtagagattgatgtagtcctgagccgaacgatcccaactgttgtcgctcatcatagcacgccacataagctgatgccaaccctggtcgtcctgaatgccccacaatgctcgtcttacggcaagctgcatatctgcacattcatagtttttgaatgtaaatccattaccgtagttgtcggcactgtcgaaaacagagtctttaagaccgccaacctcacgaacaacaggaattgtaccgtaacggagtgcaatcatctgtgcaagaccgcaaggctcctgagcagaaggcataaggaaaatatctgcgcctgagtaaatctttcttgcaagttcgggaacaaagccgtgacagaagcaaagtctgcccggatacttcgcctgcatatagttgaagtagtcctcgtattccttgtcacctgaaccgagaattacaaactgcatattttctgtgtccataagctcctcaagacccattcttacaaggtcaagtcccttgtgtgcaacaagtcttgttaccataccgaccagcggaacatcccagcgctgttcaagacacaaacgctcctgcaaagcacgcttacattcgcccttgccgctcatatcgtcctttgaatagttgcgataaagctgatagtctgtttcgggattgtagctttctgtgtcaataccgttcttgataccgcaaagcttgtaatgacgaagattgagttcgtcatgaagtccccaactgaaccacgggtctttaatttcagccgcatagcttggagaaaccgttgaaacacgggtagctgtttcgatagcacccttcatcatattgagtttgccgttcatttcaagaatctttgtttcggatgcaggaatgccgacgcactctgtgttaacttcccagccgtattcaccctgatactggatgttgtgaatagtgaacagactcttaatgttatagtaccatggtctgtgtgaatagaacagatagtagtaaacaggaacaagagccgtctgccagtcattacaatgaatgatgtcgggatggaaatcaatgtaaggaagcatttcaagaattgcacgggagaagaaagcgaatctttcagcgtcgtcataatgaccgtagagagtgcctctcttgaaataatattcgttatcaataaaatagtatgtacagtcattccatcttgcccagaacaaaccgcaatactgatgacgccatgcaaccggcacggtaaagtttgtgatgaagttcatggagtttttaagttcctgcggaattgtgccgtaaagcggaacaacaattctgcaatcctgaccttttctgcaaagtgtgtgcggaagacttcctgctacatcagcaagtccgccgctaccgcagaaaggattagcctctgaagcacagtataaaattctcattgtaagattacctcctgtttaaacaactttatacaacagattttttagcaatataaatggggtacgaatcatatcccataagtgatcgaccatccttgatggtaacatccttatctatgataacatagttgaggttggtattgcaacctatttttgtgtcctgcattacaatacagttagaaagctttgcgccttcgccgacataaacaccctttgaaataacgcagttctcaacctcgccattgataacacaaccctgtgcaatgattgaatttttcacattgcttgtaagtccgtagcgtgacggagcgtcatctcttacctttgtatagataggtctttgcggattgaaaagctcatcccttacttcttttttcataagatccatattgaactcaaagtaatcgttgattgagctgattgccgcacagtaacccttattttcataagcataaatactgtatttgcccagactgctctgaagaagtcgctttacatcaagctgattaacgctgatggcgtttcggatttcactcataagaatgtctttcttgatgagaatagagccgtatgcgtggttgaatacctctttgtcaacaacaccgggctttacaaaaatctgatttaccttgccgtcattgtctacatcaagggtaatcggtctgtcatagccctgcggaattgcatgattcttatatataagtgtaatgtctgccttcttctttgaatggaagtcaaaaacatctgtgtaatcaatgttagtaattacattgccctgtgaaataagcacatactcctcacggcaatgctcaatgtagccgtgcatattgtagattgtttcaacaaagcttgaaaaagccttgccgtcatatggtgggagaattgaaagattgcttcttctctttgaaaggtcatatgcactgcccgaacccacatgatccataagtgactgaaagttgctttttgcaactatgcctacattgctgatacctgagtttgacatatttgaaaggtcaaagtcgataattctgtattttccgccgatcggaacgcttgcagttgttcttgaagatgcaagctcggggattttgtcgtcaagtgttgccgcaaagatgaaaccgagtacattattacttctcattgccgtccacctccgtgtcgctgtctatcatggtttttgctttgataacggtgttttctttgataacggtatttgcaccgacaacagtaattccccagtcgtcaatattttccgtttcttcggggttttgtccgacttttgcatttttgcctacaacggtgttttcggcaatgatagcaaactgaacctcggcaccgtcctcaattaccgcaccgggcatgatgattgaagaattaatcgtagcatttttaccgattgtaacacctgcaaagagaattgagaactcaaggttgccgtaaacattgcatccgtcggcaacgagtgaattttggattgacgcctcgtttgaaacatagtgcggaggcatcatcgggtttcttgagtagatatccttgaggtctaaagtaacctttggatcaagaagatccatattagcctcccaaaggctgtcgattgttcccacatccttccaatagccttcaaaaggatatgcaaacatacgctcacctgcgtcaagcatggcagggaggacatccttaccgaaatcgtggcttgaaccctctttgaattcatcctctgtaagatactttttaagttccttccagctgaaaatatagatgcccatagaagcgttagtgcttttcggatgagcaggcttctcttcaaattcgtagattgagccgtcctcatttgtgttgagaataccgaatcttgaggcttcttcaagcgaaacatcaattaccgcaatcgtacaagcggcattcttttccttatgatattcaagcatcttgttgtagtccattttgtagatatggtcgcccgaaaggatgaccacatattcaggattataacgctcaatgtagttgatattctgataaattgcattggctgttcccgaataccagtctgcaccgtcaacagcctgataagggctgagacagtttacaccagagtgcatactgtcaagatcccacggctgtccgtttcctatgtattcgttaagaacaagaggctgatactgtgtgagaatacctacagcgtcaatgcctgaatttacacagttagataacgggaaatcaataatacgatatttgccgccaaacggtacggcaggctttgcaagctttttggtaagcacgccaagacgagagccttgaccgccggcaagcagcatagccactacttccttttttggaaacatattaaaatacctccgatatttattttattatctttattaaacttattaattacagtcttgtgactgaaaatatcaattttatttctgagcttcatcgggttcaagttcttttgcacacctcagatagattacgctgagtggggggagagtgagcgaaaggccctgatcaaaaccgtgaattttcattacctcggttttgatattattaccgtttacaacaccgcttccgccgaaacgctcttcatcagagttgaaaacctcgtcataaagaccgtatttaggaacaccgatgcagtattcgtcacgcctgatgggctgaaaattacataccgaaacaatttcatcaccgtttttgtcggtgcgcttgaatgcaataacactgtttgtgtaatcgtcatggtgaatccagtcaaagcctttccagaccgtgtcaagttcgtagagcggcttgcagtcaagataaaatttgttaagctctttaaaaaatgttctgagctttttatgcttttcaaattcaagcaaatcccattgaattgcctcttcgtgattccactcgtcaaactgtccgatttcagtccccatgaacacgagtttcttgcccggatgagcgtacatatatgttatgaatgctctcacgcctgcaaactgctcatcatactttccgggcatctgctttatgagtgagcctttgccgtgagaaacctcgtcgtgtgaaatcggcagaagaaatttttctgaaaaagcataataaaagctgaaggtaagactgtcatgattgaacggccgccacatcggattgagtgacatatagtgcagcatatcgttcatccagcccatgttccacttgaagtcgaaaccaagaccgccgtcctctattttatgagtaagctttggccacgatgtgttttcttcagcaaacatcataacatcggggtggtacatatgaacagccgtgttgagtctttttacaaaatcaacagcgtcaagattttcttttccgccgaatttgttcggttcccattcgccctcggctttaccataatcgaggtagagcatagaggagagtgcgccgattctcaagccatcaatatgatatttgtcgagccagaacattgcgcatgaaacaagaaaacttgtaacctcgaatcttgcgtagttgaaaaggcaggttccccatgagtcacgcttgcttgtttttggatcgttgctttcataaagaggcgaaccgtcaaaccttgcaagtccgaaatcgtccgtcggaaaatttgacggaacccagtcaagaatcacaccaatgccttcaccgtgaagcttgtcaacaaaagccataaaatcagacggtgtgccatagcgtgaagtcggggcatagtagccggttgtctgaaaaccccagctgccgtcatagggatactccataatcggcataagctgaacatgggtgtagtgcatctcctttaggtaggggataagctcatcggcaagcttttgatagttaaaaaagttgccgtcaggatattttctccatgagcctgcatgtatttcataaatattcatcggtgacgatgaaatgttgttttctttgcgtttattaaaccattcgctgtcattccacgaatagctttctatatcatatacaacagaggcctgaccggggcgagtttgagcatgaaaagcatacggatctgctttcataagcctgtcgccgtattcgctttcaatgcagtatttgtatgtacaaaactgttttacaccctcgacaaacacttcccacacaccgtaaccgatgttatacatatagtttgcctcgttgttccaattattaaaatcgcctgcaaccgaaacgctccttgcggttggcgcccacacacggaacactactccgtttttgtcgttacggttcacgaggtgtgcgcccaaaaaatcatatgcacgcactgaatcgccggtgtgaaaaacttcaagagccggtcttgcctcgttaaagctgtaattcataagaattgctccttgtttaatatcttttgattgttgattgtttgctcacacttatataataccaaaattatatgtcaatttcaagcaaattcaaaaaatttaaaactaatttttcgtgtatattttataaactgcgactaaatgttacattttaaagcataattttacgaataaagaaaaataaggataaacatcttccgaaaaggaaaacaaaaagggctgtccaaaaaggacagcccaaagaataatctgtaaattcagattagccaagctcagcgaaatacttaattgttcttaccatctggcttgtgtatgagttctcgttgtcgtaccaagaaacaacctgaacctcataaagatcatcagcaatctttgataccattgtctgtgtagaatcgaagagtgaaccgaatctcataccgattacatctgaagaaacgatcggatcttcgttgtaaccgaatgactcagaagcagcagccttcatagcagcgttgataccttcaactgttacatcagaacccttaacaacagctgtaagaattgttgttgaacctgtcggaacaggaacacgctgtgcagaaccgatgagcttaccgttgagctcaggaattacaagaccgatagcctttgcagcacctgttgagttaggaacgatgttagcagcacctgctcttgctcttctcttgtcgccctttctgtgaggaccgtcaagaatcatctgatcgcctgtgtaagcgtggattgttgacatgataccgctctggatttctgcatacttgttaagtgtgtcagccataggagcgaggcagtttgttgtacatgaagcagctgaaatgattgtatcgtcagctgtaagagttttttcgtttacgctgtaaacgattgtcttgaggtcgttgcctgcaggagcagaaataacaaccttcttagcgccggcatcaatgtgagcctggctctttgcctttgatgtatagaaacctgtgcactcgagaactacatcaacaccgagttcgccccaaggaagctcagcagcgtttggcttagcgtagattgtgatctttttgccgtcaacgatgattgagccttcgccggcctcaactgtgtgaaggttttcaccaatcttaccgcagtagccgccctgtgctgtatcgtacttaagaaggtttgcgagcatagcaggatctgtaagatcgttgatagctactacttcgtaaccctcagcaccgaacatctgtctgaaagcaagacgaccgatacggccgaaaccgttaattgcaacttttactgacataaaaaaattcctcctaaaattctaaggtgcttctattatattacatttttttcatttcttcaatagcttgacaaaaatttaacgaaaaatttttgacttttttacaaatacggtaaaaaacacggtcacattttgcttttttaaggcaaatttaagctgtaaccgtcaaaaagctgtaatcttttttatttccgtaataattatctgcaaaattcccatgcttattcttgacaatttggttattttattataaaattgtatagtccgctgatgcggattttggcaaaagtacagtttttgacttttgcgacttttttaatcagactctttaaaagagccgttaaaagagccgttatatatagatattttttgtaatttttatggcgtttcgccttttgaaacgctctgtgcaacctgtacggtgttttgcggttgcgtatgtatatataatgtattaaaaatatttacaaagtaaaaatgaaaattgaatatctttttaacggcacctttaaagtctaattgattgggaactgtgaaatattaaaaaatcaaactaaggaggtgtccagattgccattgtggataagtattatctgcattgtcgccgcagttgttatcggtgccggtgcaggtattttccttggaattgccatccgcaaaaacacagccgagaaagaaatcggaagtgctgaggaggaggcaaagaagattgtggctgatgcaatcaaaacagccgaagcaaggaaaaaagaagtagtccttgagggtaaagacgaggttcatcgtttcagaaacgagagcgagaaagaaatttccgatcgacgcaaggaagttcagcgtcaggagagaagaatccagcaaaaggaagaaactcttgacaaaaagcttgacaatatggaacgcaaggaagaaaaggtcaacaaaaagcttcgtgatgcagatgcaaaactcgaagaagttgaaactctgaaaaagagccagtttgaaatgcttgaaaaaatttcgggctacacggcagaacaggctaaaagctatttgctttcacagcttgaaaatgagcttgctcatgagaagtcggttaagattatggaatataccgaacagctcaaagaggaagcagacgacaaggcaagaaacattatttcgcttgcaattcagcgacttgcagctgagcaggtttcagaggcaacaatttcggttgttcctctgcccaatgacgagatgaagggcagaatcatcggtagggaaggtcgtaacatcagagccatcgaaactcttacgggtgttgatcttattattgatgatacgccggaggctatcacgctctcatgctttgagcctgtaagaagagaaattgcaagaattgcacttgaaaagcttattgcagacggcagaatccatcccgcaagaattgaggagatggttgaaaaggcaagaagagaggttgaatccgaaatcaagcgtacaggtgagagagccgtgcttgacgcaggtgttcataacattcatccggagcttgtcaagcttctcggcagacttcgttaccgtacaagctacggtcagaatgtacttgatcactctcttgaagtttcatacattgcaggtatgatggcgagcgagcttggtcttgatcctacaattgctaagcgtgcgggtcttttgcacgatatcggtaaatccattgaccatgaggttgagggaacacatattcagattggtgtcgatcttgccaaaaagtataaggaaagcgacgctgttattcacgctattcacgctcaccacggtgatgttgaggcgagaacaattgttgcctgtcttgtacaggcggcagacgctatttcagccgcaagaccgggtgcaagaagagaaaatgttgaaaactacattaagcgactccagaagcttgaagaggttgcgtcttcttttgacggtgttgagcgtacctttgcaattcaggcaggccgtgaggttagagttatggttaagcctgaaattgtaaatgatgagcgtatgattccgcttgcaagagatatctgtaaaaaaatcgaagaagagcttgaatatcccggacagattaaggttaatattatccgtgaaagcagagcgtccgattttgcaaaataaaatatcttgattttaactacggttgacaggactatgttgaccgtagtttttattttgtagggacgatattatccgccggtacggcgagccgccgtacctgattcgtgtagataggttcattaaatgaaaaattgaaaattgaaaatggaaaattgcggtcgggaagatggtttgcaatataaaaaacatattatgcccgagcgtagtatagtagctgtttgcacaatttaatgtagcggcgaacgaggttcgccgctacaaacgctacaaagaatatgctgtaatcaaaaaataatttgcaagaaaattaaataaacttgcaaaaattaaatttgtgccgtagcttagatttttgacctgttattgtaaactgtaatttaaaaaacagcaaaaaactttaaaaaatattcaaaaaagtattgacaatcggttaatgaggctttataattcaagacagtaaggcaaaggtcttacgaagttttcggaaaactgaatataaaaaggacaaggaagttcactttggtttcttctgattttgcaacaaagtttttaaaacttgcaaaatcggataaaaacattgtgagctttatttttttgctttggcaaaaacggtttatgtggaggttaaaaatggattcaggaaatataggctttgtgctgctttgtgcggctttcgtatttgtaatgactccgggtcttgcaatgttctacggcggtcttgtacgaaagaaaaatgttgtaaatacaatgatgacatcaatttttattatcggtgtcggaattgttatgtgggtgcttttcggttattcgctttcgtttgctccttcgggaaatgcttttatcggtgatttccgttggctcggtcttgagggtgtttcactcacggagggctacacggatgatgcgtcaattccgaatatggtattctctgcgttccagatgatgtttgccgtaatcacccctgctcttattacgggtgcggttgcaggcagaatgaagtttaagtcaatttttgttttcacaattttctggtcgcttatcgtttattatccgctcgctcacatggtgtggggacagggaggacttttaggtgcagacggtatcggggctctcgactttgcaggcggcgatgttgtacatatcagttcgggtgtttcggcacttgtactttgcatactcctcggcaagcgtcacgattatgaacattcaatttacagaattcacaatatcccgacagttgtactcggtgcgtcgctccttatgttcggttggttcggctttaatgcgggttctgcacttgccgccgacggtcttgcggctcacgcatttatgacaacgggtgtttcagccgcagccgcaatgctctcgtggatgctctgcgatgttatcaagaacaaaaagcctacgcttatcggcgcaagcacgggtatggttgcaggtcttgtaggtatcacgcccggtgccggctttgttccgatgtgggcggcagttattatcggtttgacaacaagccccgtttgctatattatgatttcatacggcaagaaaaaattcggctttgacgatgcgcttgacgcattcagctgtcatggtacaggcggtatctggggcggacttctcacaggtgtgttctcatgcacggcaatcaacagcagtgcaggtaacggtcttgtgtacggtgagtttgcacagttcggtgctcaggcggcaggtatcggcatcacaattgtaattgcggttgtcggaacactcatctgctacggcatcacaagacttcttacaggcaaaatcagggttgacctcagagatgagcttatgggacttgatgtttcacagcacggtgaatctgcttatccgtcatttaacggtcttgacaactaacggaggttttaaagtatggaaaacaataacgatattcagcttataaaaatagaggccgttgttcgtgaagaaatgtttgtagatgtcaaaaaggctctcacggatatcggcgtaaacggaattacagcgtatcaggttgtaggctgcggaattcagcgaggtatgtcggagtatgtaagaggacagaaggttgatgttcaggttttgccgaaaatcaagtttgaaattgttgtttcttccgaagaatgggagagaaaaacaattgaggcaattagaaaaacagcctttacgggcaacccgggtgacggtaaaatatttacctactatcttaaacaggcggttaaaatccgtacgggagaaacaggctacgatgcaattcagactcccaactttgatgactgatattttcctattttcctatatcaaaaaagtgcgtaccgaatttcggtacgcactttttgcttgtaaaattgtttatcttcttattgtaatatcttccgggctgacagtattgtcacgaagtctgttgtaataatcgggatttgaatgctttatgcttatcggttttagctcgggagttgcaaaacagtgtgttgttctgcctgttgcagaaagttctccgtttttattgttgaagagtttatagtcaaaaatcattcttgaacccgtaaaaaatacaaggcttacttcaacggaatactcatcgccgaatttaagcggctttttgtaacgggcatatgcgtcaacatttggaatatacaatccttttgactgcatttcggcaacatcacaaccgatgtcgtgcatatactgaattcttgcatcttcaaaatatctgataaaatttgagtgatgaacaatgttcatacagtctgtttcatagtatgaaacctttgctttgtataatttctcggtcatattttctcctttacatatatatggaaaatccgtaattattttttaagcaacaaaccgtttttaaggtcctctgctgcctgtttttttattacaaaatgctgtttcttgcctgttgcagtctgcggaagatcgttgacaaaacggtagtatctcggagcctgatattttgaaatattcggtgagctgtcgcagaaattgataagctcggcaactgtaaggctttcgtcagcttttattacatatgccgcaacgcactcgcctcttgttgaatcgggaacacctgttacgatacattcctgaaccttcgggtgtgagttgagaatttcctcaattcttgcaggataaatattttcacccttgctgataatcatatcatcttttctgcctgcaactgtaacaaactgctcgctgttccaagtgccgatgtcgcctgtgtacatccaacccttgtagaacttgtcttttgtagccttttcgttatttacatagcagtaggtagttttgttcggacatttgatgatgatttctccctctgttttgttatcgcaggggactgtgtcatcgggctctgcttttctgtcgtcataaacatttacaagtcttacctcatcatctgtgcatgatctgcctgccgaacctgccatttcaggaaggtcatacggacgaagaaatgtattccagaaagattccgttgtgccgtagccgttaaaaatgttgggggagagaagttcctgatagcgaatgcaagcggctttttcaagcggactgcccatggtaataatgcccttgagcgaagaaaggtctttcggatgcttttcctgtcgggctgcaagcatttcaagagttgacggaacacctgtgatgaatgtaattccgtatctttcgataaactccatacaactcctcgggttgaatgttctcataatcacaagacacgcacctgcataaagggtaggtgtaggaccgcccgaatgaataccgccacggtgaaaccacggcgtcatattcatcgtaatatcaacgggtgagagcggaaagtgcataattacatcgtgagccgaaagaacttcgttgattgcgttaagcggaacgccctttggagtgcctgttgtacccgaggtctgaagtcttaaaacctcgtcataaatatgcggcgcatagtcaacaggcggattttcgtcactgctgtccttgatgtaatcgtcaaagaaaatgtgtccttcgggaagagttacttcttttttggaattattaacgcagagaatcaattttggcttatgctcgcagatttcaagagcctgtacggctgtttgcataatgtctgcatcataaacataaacaacaggcttgttgtgtcccataatttctgcggtttcgcccggtgataggttaaagttagcgggatttgagattgcaccgagtttctgcggcgcaatataaccgaacaaaaactgtggtgagttgtaaagctgcataaacacgatgtcgtttttcttgacgccgtcttttttcatagcgtttgcaaatctgttcgcatcggcattaagctctttgtagctccatgttctgccgctctgaggatcaattgcggcaggcttatccgaaaagcgtcttacatttctcataaagccgttaagccatgtaaattcactttcaaatgtttctctgaacatctgtgaatcatatgttaaattcataatatccccctgtcctattatgtatgggtgtacattattttatacacacatatgtgtgttgcttgtatgttgttttgtcggcagattatttgccgtatttgcctacgataatacttgagttctgaccgccgaatccgaatgcgtttgacatggcaaagttgatttcggctttctttgcggtatttgcaacaaagtcaatgccggcacattcgggatcaacctcgttgagattgattgtaggcggaactgtgcctgtttcaatagccttgacacaggtaattgtttctgtaataccgcctgcgcccatcatatgacctgttgcgccctttgttgagcttacataggggagagtgttgccgaaaaccttcttgattgaagatgtttcaactgtgtcacccttgtttgttgcagtaccgtgggcattgatgtagccgatgtcggaaggattgattcctgcctctgcaattgcctgtttcatacaagcgattgcacctcgtccttcgggatgtggagcagttacatggtaagcgtcatctgtgttgccgcaacctctgatttctgcataaatcttcgcacctcttgcaagagcgtgttcctctgtttcaagaacgagcgcaccgccgccttcacctattacaaaaccgtcacgggtaacatcaaacggacggcttgcagtgcttggcgaatcgtttcttcttgaaagagcttttgcgttggcaagcgaataaattacaagaggacagagaactgactctgctcctactgcgagcataatatcagccttgccgctctgcatacacatacaagctgtgttgattgcgtcaccgcctgacgaacaagctgtgcttaccgtaaagctcggtccctgaatattgtagtcgattgcgatatttgcggcggcaatgtttccgagaattttgggaataaaacgaggacctacctttttgtgtgatgcgcctgtgagtgcctcctgagtatatgcgattgttgcaatacctgccattgcagtacccataacaatacctgttctttcgggttcaatctcgattccgctctgtttcatggcttcctcagccgcaatataagcgtattgcataaacggatctgtttttctgattaaatcctttggaagatagtcggacggattaaagttctttacttcgccggcaatctgaacagcgagttcagacggatcaaaagtcttaattgtgtcaatgcccgatgcacctgctgtgatattattccagtagttttcaacaccgatgccgacaggtgttaccgcacccataccggttacaactattttcttcattcgttaagctccttgttttaaaataagttatttacattttgcatattattatgctatacttgaattgtaccaaatatggaaaaattattcaataccgttgattatgcaaaaatgacgatttggcagtcttaaatttacagttttgcataatattgaaaaaaaccgacaaaatactgtgggaaattgtcaaaacggaggttattatggatataaatcagctcaattgctttataactgtggctcagacgctcaacttttcagaggcggcaaggcggaactatgtttctcagtcaaccgtcagcagatatgtaagcgaccttgaaaaggagtttggggttcagctttttacacgctctcaccgtgatgttatcataacaagcgagggcaaggcgcttttgccctatgcgattgaaattgttgaaactttaaagaaagcaaaaaccgttatcaagcagatgcatgacggaggtcagggtaaaatcacgctcggctgtgatgttacctcgctttcgttcccgacaaaatgtatagccgactttgcggaaaaatatccgggaatcacaattgatgtgcgacagcttgacgaggctgaccgcacgcttgcaatcacaggcggtgaatacgacttctgctttatgccgagagatatggttcccgaaagctcaggtattgaatcaatcattacacataatgaaactttgtccgttgtaacagcgaaaaattcaaaattcagcggaagaaaaagcgttaagctttccgaattggctgacgaaagtattctggtactttcggaatctgttgctccgattgtgtatatggaaattatggatttgttccgtacatttcacataaccccgaaaattgaaaattcatttgacgatctcgtttctatatatgtatcgtcctcttcgggaatcggcgtgtctgtcgtaccaacctcggtcgccgcatatacttctgacgaatacaccgattcataccttattgatgatgcggacacaagcatagcctatgttatggcatgggaaaagaatatttcaaatcctgccgcaaagctttttatggaggctgttaagaaatatgccaagggagatgacaacatttacgggctgtaactgagcatatttctcaatataaattccaataaagaactatagtgaaaatttcacaaaataaacacacattattttcaaaaaaggtatttactttataaatcttcggtgttataattacggtagtcaaggagaagttgacaaaatatcctttcaggaggtaattaaaatgtacagatttactttaccgagagatctctatcatggtaaggatgctctctcaagtcttaaaaatttatccggcaaaaaggctgttgtagttgtcggcggcggttcaatgaagcgtttcggttttcttgacaaggctgttgactatcttaaagaagcaggtatggaggttaagcttatcgagggcgtagagcctgacccatctgttgaaacagttatgaagggcgccgctgttatgcgtgaatttgaacccgactggattgttgcaatgggcggcggttctccgattgatgccgcaaaggctatgtgggtattctatgagtatccaaacacaacctttgaggaaattattactccgttcagtttcccgacacttcgtacaaaggctaaattctgcgctatcccgtcaacatcgggtactgcaacagaagttacggctttctcagttatcacagactatgcaaagggtatcaaatatccgcttgctgactttaatatcacacctgatgttgctatcgttgatcctgcacttgccgaaacaatgccggctaaacttactgctcacacaggtatggacgctatgactcacgcaattgaagcttatgtttcaactctcaactgtgagtacacagatccgcttgcactccatgcaattgagatgattcacgacaacctcaagaagtcttatgagggcgacatggcttgccgtgataaaatgcacgatgcacagtgccttgcaggtatggcattctcaaatgctctgctcggtatcgttcactcaatggctcataagacaggtgcggctttcacaggcggtcacattattcacggctgtgcaaacgctatgtatcttcctaaggttatcaagtataactcaaaagatcctgttgcagctgagcgttatgctaagattgctaagttcatcaacctcaagggcgaaacaacagaagaacttgttgacgcactcatcgctgaacttcgttcaatgaacgatcagctcaacattccgcagggcattaagaactacggtccgggcggcgttaaggctgacgagagcattatcgacgaaaaagaattcctcgaaaagctccccgaagttgccaagaacgcaattgccgatgcttgcacaggttctaacccacgccagccaaatcaggaagaaatggaaaaacttctcaaggcttgctactacgatacagaaatcgacttctgattcgtttgacaaatctatttgtacttatcacagctctccgttttcggggagctgtttttttaataaaaaatccgcattaaaaagcacttaaaaggcataaaaatcatatggacaatattgctttgttgtgctaaaattgacttgaaattgatgaatttggtgacataaaatgaaaattgcagtaataaacggtcagaaccataaaggctcaacctatcatattggcaagcaggttgccgataaattaggcggcgaggttacggagttttttcttccgagagatttcggcaatttttgcgtaggttgtacgcagtgttttctaaaatccgaaacactttgtccgcattatgagcgactgaaaaagattaccgaggctatggacgaggctgatgtactcatcttcacaacgcccgtgtatgtttatcattgcacaggctcaatgaaagcatttcttgatcattacggttatcgttggatggttcaccgtcccgaacagaaaatgttcacaaagcaggcggttgtaatttcgacagccgcaggttcgggtacaaaatctgccaacaaggatatcgccgacagtatgttcttttggggcgttccaaaaacttatcgttacggtgtcaatgttcgtgcaacaaattattcaggcgtcaccgatgaactcaaaaagaaaattgacaaaaagactacctcaattgccaataaggtaaagaaaaatgacggcaaagttaaggcagggttaaaaacaaaaggctttttctttattatgagaatgattcagaaaagcggctggaatgaagccgataaaaattactgggcagaacgaggttggaacggtaaaaacagaccgtggaaaaatacataaggagatgttttaaatggcaaaaaatactgaaatcagcttgagaaacaaggttatttattcggtttatgtccgcaaccacacaaatgacggcacatttaatgccgttgcagaggatcttgacagaataaagtcactcggtactgacatcatttggtttatgccgattcatccgattggcgtcaagaataaaaaaggctctctcggttgtccttatgcaaacaaggactatcgcacaacaaatcccgaatatggcacaatggacgatttcaagagccttgttgaaaaaattcacgcaaagggcatgaagtgcatcattgatgttgtctataaccacacttcgcccgattcaaatctttcggttgaacatcccgaatttttctacagaaagccggacggcaattttggcaacaaagtcggcgattggagcgacataatcgaccttgattattctaacaaagaattatggcggtatcagattgattcactcgttatgtgggcgagaattgttgacggcttccgttgtgatgttgcatcattcgttcccgttgaattttggaaacaggcgagagaggctgtttcaaaggtaaatcccgactgcatttggcttgccgaaagcgtacacagctctttcaatgtgttctctcgcaagagcggaatttataccgcaagcgactatgagctttttgacgcttttgatatggaatatgactacgatatccgtgaggttttcgacaaatatttgaagggcgaaacctcactttcaaattatatggatatgttcaattatcaggaggcaatttatccgcagaattacgataaaatgcgttgccttgaaaaccacgatcagccccgaatctgccattatgtaaagaacaggagcgaccttgaaaattatacagcttttctgtatttcttgaagggttcaaccctcatctatgcaggccaggagtttggttgtgatgaaactccaagcctttttgacaaggatgttttcccacgcaacacaggcattgatttaagtaaccttcttgcaaagcttgatacaatcaagaaaaccgttcttgatgatgacgattatttcagggctgatgcagacgatgaaaacgatattgcaattcttgagcgtgacaacaacaagagcaaaaaagtcggcattttcagccttaaatcaaagtcggctgatgtaaaagttgacctccccgacggcgactataaaaacgaaatcagcggtgaaacagttgcggtttcaaacggaaaggttcattgcaacggcaaagcaataattatccgcaagtaaaataaaattctatataagaataatacaacctccctgcaaagcatttcagcttacggggaggttgttctttatataaaaatccgtgttgcatggttacaacacggatttcttggttttatttaattgaaccgtcgccacccataagagcggtcatttcttcaacgcgttccaaaggaaacggtggttcgcaaagcagttttttatatgctcacttagctttctttttattactgccgaaaattttagtcggaataatgcttccgaggaatgcggcgagcaaaatccacggaataactcttgcgtcaaagcagagcaaaaggagcattgttacggcaagcggttttttcattgtgacaccgagaagtcctgccgttacgactgccgcacaaaatgccgtgtcaagtccgccgagcattgcaacaccgtagccgatgctcactccgcagaagatgacggggaagaagtgaccgcctttccaacccgactttatgcagatgtttgtgagaataagtttcagcacaccgctgataatgagaatccacggtgcaaattcggcaaagctttccttgacaacggtaatgctttcttcgcccgaaaacattgtgagggggaggtatgtacccataacaccgaggataattccgccgagagttgtgctgatattaatgccgagtttaccctgaatgagtgcgaaaaattttccgaaaatctttgaagatacgataaacagaaaaccgcatacagcacccaaaagtgcgagaggaattccccacaaacgctcaaaatttgtaatgttataaccaccaagtcgtggaagtcccatacttccgccgaaaatcgagttaagcaaaaacagagttcccgccgcaaaaagtacggcaatgatgtttgaaataagctttgttgaacggatatcggtaggcttttcttcgctgtcaagcctttcttcattgaccgatgcaagaccgaaaagcggtgcgtagaataccgcactcagggttgcgcttatgccgatttgcattagttcgggaattttacttttagcgtctttcatatgacttcctgcccagtagcaaagtcccacgataacgcctgtcaagcctgcctcaggaccgagacttccgccgaaaacaaggggcaaaagtgccgaaacgcagagaaaaagcaccttgttgtacgggtaaaatttatctttttttacctttttcataacctcgtcaagttcatcgggaacggcatttgtcagcttttgccatattccgagaataattccgccagccgtacagacgataatcggataaaatttgaaatcaaaatttgacggaattgtatcccacacaagaccgattcccaaacccataagttttagaaacagccatactatcagcgaagtaaccgcaccgctgaatccgcaaaaaatgtagtataaaaaattgttggcaacagtccgtttagtcattgtcgcacctccgtgtgtttataattggattataacataaaacacagcaaaaaaacaattattccgcacaaaaagtacgaaataattgctttttattatttttttaattttagagcctcttctaaacaaaaacagctgacaccaatgccgatgtcagccataaaaacctatttgattttaaatttcaaaagcggcgcttacctttttgaattctctttttctgatgatgaagtaggcaatcaaaacggatgtgcctgtgataagccatgaaacggggtaaaccataaggagcatatcataggtgtggaatgccttgaatactgtgaagagccagatgattctgaacacaacagaaccgaagattgtgaggattgcagggaggagtgaatgtccgattcctctgagcgcaccgccgctgatttcgtatgaacctgtcataagctcaaggagcataacaatcgccattctgatgattgcgtacttgataacggtggggtcggttgtgaagaaggtgatgaaaaatccgcttccgagcatgaatataacgctcacacagcctgtgaaaatacagctgaaaagcatacaaagcctaaacacctttttgcatctgtcaaattgaagtgcgccgtagttctgacttgtgaatgtaacggctgtctggctgaacgcacatactatatagtatgtaatgtactcaaagttgagttcagccgatgagcctgcaaccgcctgtgaaccgaagccgtttatggctgtctgaatgaatacatttgaaattgagaaaaccataccctgaatacctgcaggagcaccgattttcaaaatcataatgagatgttctttcttgaatgaaagtttttttggattgactctgattgattcgtcctcgtttctgatgaggaacatcataacaagtccggcgcttatgccgtcggcaattactgttgcaatgccgactcctgcaacgctcatatcgcagacgattacaaagaagaggttcaaaagaacatttacaatacctgaaattacaagacagtagagcggacggcttgtgtcgccgacacttctcaaaattgccgaaccaaagttgtagagcattacaaacggcatgcccataaagtaaattctcaggtatgttgccgcaaggtcaattacatcatccggtgtgttcatcagccttaacagcggtgctgcgataatctgaccgagtatcagaagaagaaatccgcatataagtgaaagtgttattaccgtgtgaacagcttccgaaacttttttacggtcattttgaccgatatatcgtgcaatcaaaacatttgcgccgaccgaaagtcccgtgaataacagcacaagcatattgatgagcggagcgttgcttccgactgcggcaagtgcctgactgcttgaaaatctgccgaccaccgcaacatcggttgagttgaaaagctgttgaagaatactggatcctgcaagcggaagtgtgaaaagaagaattttttttccgagcggaccttccagcatatttatctggtgtgagcgctgtcgcttttcttttacggtattctgacctttgtttcttctaaacagacttgcaaacgcaagtgagagcatttttttgactttctccattaatttctaacctcttcaatcacataaccgttgtaaacgatactatccttttccgttttccacaattattgtaatcctgttgcccgaaataaacaagcaaaataccttataaacataaagtttactttgctcacaattttagttacaataactacctcgtcaaaattcttctttttatgcctttataatatggtaaaaactgcttttctgcatattttcagaccgatttttctcaataagcaaggctttgaatttgtatgcaatttgtgccttttcaacaaaagtaaaattgctctcttgtaagcattgacgaaaaattttttaacctacaaataaatgattttaaaattgttgtatatgcctattaaattataatgatacaattatgatacaagcttaatataatatatttttaaagggataagcgaaaaggagtgaatgttatgaagaaaaagattgctgtaattgtggttgcaattgttttatgcgttgccgccgcagtatttgccgtgccgaaaatcagtttctatgcgtgtgagcctaccgtgtattttgatgttgagtactgcgacaaggttgacacaaagatgtctgccgaagatgccgaaaccgtgaagaaaatgtttgagggcaaatccgcatattttgattcaccgtcttgtggtttttccgaaaatgcatcaataagaataggctgtaatacatatatgcctgcgtgtgacggtgatgaaacagttaagcacggatttatgtattttagtctttcaaaaagcgaaaataacgaacttcgcaagattatgaaaaagtacggagcagatacgagaaaagctatctaaaaccgttgacagacgcatttccgtgtgttaaacttttctcgaaaaatatacggaggtgtttttatgaaaaactacaactgggcaacactcggttgcggagttatcgcaaatgagcttgcagccgcactcaaaagcagaggacagaaactttattccgttgcaaaccgtacccatgaaaaggcggttgcgtttgccgaaaagtacggcattgaaaaggtttacaacgatattgacgagctgtttaaagacgaaaatgttgacataatttacatttccacaccgcacaacacgcatataaaatatcttcgcaaggctcttgcggcaggaaagcatgttttgtgcgaaaagtcgataacgcttaattcagatgaacttgacgaggcaatctctcttgcagagaaaaaccatgttgtgcttgcagaggcaatgacaattttccatatgccgatttacaaggcacttcttgaaaaggtaaattcaggtgaccttggcgagcttaggcttattcagatgaatttcggcagttacaaagagtacaatatgaacaaccgatttttcaaccgcaatcttgcaggcggtgcaatgcttgacatcggcgtgtatgcgctttcgtttgttcgtatgtttatgagctcatgcccaaacgatgtgttgtcgcaggttaaatatgcagaaacaggcgttgacgaacaagcgagtattcttttaaagaataaagaggaggaaatggcaactgtcattctttcacttcacgcaaaacagccaaagcgtggcacaatctcgtttgacaagggttatgttgaaatctttgaatatcccagaggcatggaagcaaagattacatacacggctgacggccattgtgaaacagtctcggcaggtcatacaaaggacgctttgctttatgaggttgaagatatggaaaaggcgatagagggcgacacggctcttatgcaccttgactacacaaaggatgttatgaaaatcatgacagacatccgcaaaagctggggcatgaaatatcccgaagaagagtaagttttttgaatttaatttgatactaaacacaaaactccaccgtgatatgcggtggagtttcctttatatatttgattaaatcagaattagtagttttctgcgtggatttcaaaatagctctgtgggtggttgcagacggggcaaacctcgggagcctcttttcctacaacaatgtgaccgcagttacggcattcccaaaccttgatttcgctccttttgaaaacttctgcagtttcaacattgcggagtaatgcacggtatctttcttcgtggtgcttttcaattgcggcaacaaggcggaacttgtgtgcaagctctgtaaagccttcttcctcggcagttttagcgaaatcttcgtacatatctgtccactcgtagttttc

SEQ ID NO: 961 - DNA, 10054 bp, unidentified
  source 1..10054: mol_type = unassigned DNA
atgaaaaacttatttgacatcaaagacaaagtagtggttataaccggtggaacgggagtattggggaaagccatcgcctttcatctggcagaagaaggtgcaaaggttgttgttttaggacgcaaggcagaaacaggggacgccattgccagagaaatcaaggcaaacggtggagaagccatgttcctgacaaccgacgtgacgaaccgtgaactgctggaacagaacctggctgatattctgaaaacctatggacgcatagatgccctgctgaatgcagccggtggaaatatgccgggtgccaccatcgcgcctacgggtacattcttcgatttgaagatagaagaattccaacgggtgctggaattaaacctgaccggtaccgtactgcctacacaagtcttcctcaaaccaatggtggagcagaaggcaggcgctattgtcaacttctccagcatggctgctttccgccccatgacgcgcgtagccggatatgctgccgcaaaagccggtatctccaatttcacagctttcatggctacagaagttgccaaaaagtttggcgaaggtattcgtgtaaatgccatcgcacccggatttttcctcacagagcagaaccgtgccctgctgacgaacccggatggaagctacacggaacgtgggcaagatgtgatccgccaaactcccttcggacgtatgggccgtgcagaagagctttgcggaaccatccaatacctcatcagcgatgcttccagctttgtcaccggtacggtggctgtagtggacggagggttcaacgcattcgcgatgtaaatagtaaattgcaaatcatcaaacaataaataacatgattctttgtgaacaaacctggcgctggtacggtcccaacgacccggtaagcctttgggacatcaaacaagccggggctaccggcattgtaaacgccttgcatcatattccaaacggggaaatatggacagtagaggaaatcaagaaacggaaagaaatgattgaagccgtcggtctgcgctggtctgtagtagaaagtgtacccgtacacgaacatatcaagacccaaaccggagacttccagaagtatatcgacaactataaagagagcttgcgtaacctgggcaaatgcggcattcacattgtcacctacaactttatgcccgtactggactggacacgtaccgacctcgcctacgaactacctgacggcagtcgtgccctccgctttgaacgtgccgccttcatcgccttcgacctcttcctgctacatcgccccggtgcagaagccgaatacactgacgaggaaaagaccaaggcccgtacccgcttcgaacagatgacggaggcagacaaacaactgcttgtacgcaacatgattgccggacttcccggttcagaagaaagcttcaccctggaacagttccagcaggaactggaccgctacaaaggcatcactccggaacgcctgcgtgccaacctgatctatttcctgcaagaaatcactccggtagccgacgaagcaggtgtcatgctcgttatccatccagacgacccaccgtgctccatcctcggcctgccacgcatcatgagctgtgctgccgatttccaggcactgattgacgctgttcccaacaagagcaacggcctttgcctctgcaccggctcactcggtgtaagcagtgccaacgactgtgcagccatcatgcagcagtttgccgaccgcatcaacttcgtccacctgcgcagtacgcaacgcgacgccgaaggcaacttctacgaagccaaccacctggaaggagacgtggacatgtatcacgtgatgaaagccttccttgaactgcagcaacatcgtggcgtctccatcccaatgcgccctgaccatgggcaccagatggtggacgacttgaagaagaaaaccaatcccggctattcctgtatcggccgcctgcgtggactggcagaacttcgtggactggaaatgggtatagccaaatcgctgtacgaataaggcacaagaaatagcaagcataaggaaagaacaggaagccctccgtccgaaacttcaaagtttcggacggagggcttccctttataagttttctgccatcagccgcctcttcttaaggcactgtctgccggcatttatttaccttcttttgcagcaagcactttccatacaacggcactcagcgcagcacccacaaacggagctacaatgaacagccacaactgagagagagcctcgccaccctggaacagtgccggaccgatgctacgggcaggattgacagaagttcccgtaacaggaatacaaacaatgtgcactaataccaacgtaagaccaatggccaatcctgcaagattacccgcccccttctcggaatccgtagaacctaagacaaccagcacaaagataaacgtgaacacagcctctgcaatgaatgcctgcaacatcattccgtcagcaaacccattggaaccggtagccgtaggaccgccatgagcgcccgtagacaccaatgcataaagaatggcagaaccgataaccgccccgataacctgaaacaccatatacatggctgcatctttcccgctcatcctgccggacaacagaacgcccagggtaacggcaggattaatatgacatcccgagattcctccgatagcgtatgccatcgccacaacggacaagccgaaagcaaaagccactcccagcgttccgacacctgcactaaccgcccccgcctcacttccggcaaagacagcactaccacatcccatcaggacaagaaccattgtcccgatcatttctgctaaatacttcttcatgatagtttttattaaacattgatttctgcaaaaataaatataaaagatgaaaatctgcctaaacacggcggtaaaaactcacccattactacaaaacatcactgctttgattctaacatccagcatatctgcatcttctttagccaacccgaagaaactcagaaatataagaaaacatattggcttgtaaagagtacaaagaaagggtgcaacctcacggccacaccctccatctacactatctttgataataacctaaaaggaaactttatttccctacatcatttcaattcaaaaggaaccgttcccttcacatcggctgccgaagctgctatgacagcctcgaacttacccggctcggccacccaagcgtgctgggtgtcatcgaagaagctaagagcctccttatcaatggtaaatgtgacttcctttgtttcgcccggagccagtttcaccttttggaaacctttcagttccttgacgggacgaggcagagaggacttcttgtcactgatgtacagttggacaacttcctgcccttcgcgcgctccggtattctttacagaaaccttcacggtcagcgtaccgtcggcctgcatggtcttgctgtcggctgtgggcttgccatactcgaaagtggtatagctcaaaccgtggccgaaggggaacaacggtttcaccttcttctgcttatcggcccaacggtaacctacaaaaatactttcattgtatttgatgtcgatgatgtccttgctccgcttgccggtatattcacccaggctgtgggccgggcaatcctccaacttcacggggaaggtaaacggaagcttgccactgggattcacatcccccataaggatagcggcgagagcactgccggcttcggaacccagataccagtcctgaacgatagcaggcacttcgttcacccacggcatggcaatggcattgccagaaatgttgacaacaatcagattcttgtttgcctttgccagtgcagagataacagcatcttgtccgtaagacaaacccagaccttcacggtctgaatcctcacagtcctggccgttgcttttgttcaaaccgccgatgaagattacataatcggcatcctgggcttctttcacggcttcggctatcagttcttcgggagtgcggtcatccttcaggttctgtccagtcaccacaccattatactcaccgcttgcatcgcccacgtagccacgagcatacaccacttcagccttgccagccacacgctgcttgataccgtccaacggagaaagctcacgctgcaccttcagcgaagaactgccaccacctacagtcatcatcttgatagcattttcgcccactaccagaatctttttagtctggtccaaatctatcgggagcacattgcctttgttctgcaacagtacgatgccctcctcgccgatgcggcgggcagcctcgtaatgctccggagaaagcatacttccccacggacggtcgggattcatcactgtacggaagataaggcgcagaatgcggcgtaccttgtcgtccagctccttagtaccgaccttgccttcgcgtatgaggttcaggtagggattcgccagataataattgtcgtatgcattgctggcaccatttgaaagtccgttagtccaactgccgaattccatatccagcccattggtaatggcttgccgagtatcgtgcgtgccgccccagtcggaaatgactacgccgtcgaatccccattcgcccttcaatatatcgtttaatgtgtattggttgtggcaaagatgttggcctttgtaaaggttgtaggcacccatgatgctccacgctccaccttcctgcacagccatcttgaaggcaggcagatagatttcataaagggcgcggtcgtccacgatgacattggtggtgtgacggttcacttcgtggttgttcaaggcaaagtgtttcacgcaggcagccacaccattctgctgcacgccccggatatagggcactaccatctttccggccagataagggtcctcacccatatactcaaagttacgtccgttgagcggtgtacggtagatattgacaccggggcccagcaagaccgatttgttgcggtagcgcgcctcttcaccgatactctgtccgtaaaggagagacatttcggggttccaggttgctgccagacaagtcaaggcagggaaagccacacaggagtcattggtgcatccggcttgttcccactcgtcccacaacacatcgggacgtataccgtgagggccgtcatccgtccatacatcgggaatgcccagacggggtacacccgcactgctgaacttgctttgcgcatgagtcaacttcactttctcttccagggtcagacggctcaaagcgtcttccactctttcttcaataggtttgcttgcgtccagatagacgggcttctgctgggctgaaagaggcagcgcgacagcagccagaaccaaaccgaataatacttttttcattgttgtacaatttaagttgttatataatttaagtaagtactcataatcagtccgtactattgacaatccccagcagacaagggaatatgacttatccctacacacataggaactgaaatccttacagccgtatagtgaatatctataacatccggatgttgttgtccaaaacatccccatgttttaccccaaaacacccggatgttttatcccaatacatccccatgttttgccctaaaacatccggatgttttgggttctcagtcctatagtgtgtacagctcagtccctacctctttcatgctaagtcccggcatctcatcctctgggacttgatacgtactgtttgcagcgaggcaatacccgctacttcattcccaatgaccggatataaccctcctgaaccacacaattcttcagtttgcatgcctcgataaagtccatcatcgccttgcgggacatggcctgcgcgggacgtgcctcacggatttccttgtacgtggcacgcggtgcttcggagaaatacacgatgtttgcccagttctccggcggagtgatgccgacgaaagaagaaccgtccatcttcttgtagggccagaaggtatagccgatgttgttctcgcgcatcgtctggcagaaagcggcctgccattcgtccgtattgtggcctatctcacccatgtacatgggcaggttcacactgtcgcggaagttgataatcgtctggatggcagcttgggtaggttcgcctccgtaacggtggcaggtgtacattatcttgtcgtcgaacttggagtccttgaaaggcttgaaattaccgttccattgcgaaccgcccagcaggatgatgtggttgctgtccacctcgcggatggcggctacacctttcttatatacatcttccagcttgccgttgagctcctccatgttctcgaagtaaggggcaatgggctcgttgaagagttcgtaaccgaggatgaccggttcgttcttgtagtggtcggctatccggcgccagatgtcacagtaaagttgctggctgacttcgctgtcgaacagccagggatagccgtagctgtcgtcgatgttgtcgcccgtctgtccgccgggggcgtcgtgcatgtcgaggatgaggtacaagtccgattcgcggcaccactctaccaggctgtccacgcgggcaaagccgtcttggtcggcagtcagccccatatagtcctcgtccgtaaacattttgtaatggaaaggcaggcggatggtgttggcaccctgctccttgatgaagcggatgtcctcgcgcgttacataattgtccttgaatgctttccagaagtcggccgtaaagtccggtcccaccagctggcagaacatctcattgatgaaacgagcggaattggtcttgttgaacttgaacatgtatccttccggattcagccagttacccaggttggtacccatgatgaagagtttggtaccgtcgggctttatcaagtcctgaccctgaatggttacgaatgcatccgaagttacttcttttgtcgcttgtttctcaccgcatcccgcaaggcccaaagacagcaaggcgatggaaatgcttgtcgctaataaatgtttcatggcaataattttggttatggtattagttgcgatattcgcttttacttccccaaagttaggaaagataagaacacctcgtaccggcgaatcgggaataggtggaagaagtaaagaagcacaaacaaacaaacaactaataatcagaaatataagtagaagaagagaaaggcagaaagtggattcaaaaagccggtttgacgtattgtcagcgtatctgcatcagccgtatttcaaagtcctcgcgcgaaatgcgggccttgttcttcactttggcacggtaattatagatggtgtttacggaataacggaggaattctgcaatctgcgaactgtcgtcgatgcccagacgaatcaaggcgaaaatgcggagttccgtatttagcaactcgcctttacggagcacgatgcgttcttcgggctgcagcaagtcattgaatttatcgacaaaatcggggaaaaggtgcaagaaggcagtatcaaagttatcatagagttccttcagtccggtgtccagcacctcacgggaacgcaccatcttcagcagctcttccatctgcccggcagagattttcttgttgaccatccgccggtaggtatccagccggttgatataaacggagcagagattcatgaaacggcccacatactcctccttgatgttgtttgagagttgcagttgctcgttggcatgctccagtttgttccgtgcggcagagagtcgctgcatctgccggtagataaagcccactgccaccaccaacagcacaatcaaagtgctgatgagccagaggtacagccggagccggtcattctgcttctcgcgcatggcctgataagtgaggtctatcagtgaaaggatgccggcagtctggaggctgcggctacgggcgttgtatcggttggtttcgtcccacgagaaacggatgtaacggtaggcatgctccatatccccttcctcataaagaagttccgccaggttccagagtgaggcatggtctgtgatgctcaggcgaatatcggtcagtgccgacaaagccagatagcgcttctcctcctcccggttcccgagccggcggtagagcaatgagcgctgataggtcaccagcgcatattcgggagtattgggcttggcatgtgccagacgcgtatcattgatgctcaaggcttcgtccggatggcctgcagcggcctcccgcgcctctcttcgttccaggtagagggaggatgaaggcagaagtacctgcatcaaagaatcgtcataatgggtagccaaagcctgataatgcttcttgaaagaatcgtccagcgtatagaaactcagttctgtgtaaagtttatgacaggcattgtaatagtccggcagcagatgggagggaagggaagctttgtccgtctgcctcaagagttcggcagcctcctcgtacatacctgccgaagccatcagatgggcaagctccagccttgtttcgagtaccgcatcctgccggccataacgctctgcccaatccagattgacacgaagataatggatggccgaatcgcagatatatgtcttatactccttatagatttccccattccatcgaaaaaaagagatattggcggtatcggtatccagcacttggcgcttcagccgggcaatgcgtccttcacgcacggcgacatagtgccggtgcgcctcgatagcctcatccaaagaggacgtcagcgcagtaaaagagggcgtgccggcagcaaaaaccacactttgccataccacgacggcaagaaaacaaaaagtgaacaatctcctttccatgaccataaagttcatgcaaatatagcaagaaatcctgcaaagcagtagcatcggaaaaaatagtttcctatatttgcgttctaaacccccaaacaaattatctatcatgaaaagcttaacaccccaacggattgccgcggtagacgtattccgcgcactcaccatgttcctcatgctctttgtcaacgacattcccggactgaaaaacgtcccccactggctgatgcatgccaggatggacgaagacatgatgggattctccgacaccatcttccccgctttccttttctgtatgggcatgtccgtatcctttgccatacaaaaccggtacaaaaagggagacaacaccctgcaagtcgtggcccatatcttctggcggacagtggcgctgattgccatgggactgttttcactgaacagcggaggcatcgaaggcggtctatcgcaccaatggttttccatcctgatggtcatcggtttcttcctcacctgggaggtatatcccaaagcggaaggaacgaaaaagacccttttcaccgcaatgaaaacagcaggcgtgctgctgctcgccttcctcgtcatctacaaggacatgaacgggaaaccgttccagataagctggtggggcatcctcggacttatcggctggacgtatgcggtatgtgcaggcatctatctgttcacccgggaaagcctgcggaagaatgccattgcctggttcgtggtcgtattgcttgccgtagtcagccattcagacttgatacctggagagtacggcagccggattatcctgcttccctttatcccgagtgactggacgctgcatgccttcggtatgtccggcgtattgacctccctgctcatgcagcgttatgccgaccgggaacggccgggacgattcatcggcatgctttgtgccctcggcgtaggaatgcttgtccttgccctcgtctcacacccgttctggattatatccaaaatacaagccacgccgacatggttgttctactgcctagccatgttcttcccgctgttcggtttcttctactggctgacggacgtgaaaggcaagaccaactggttcgatatcatcaaacctgcaggtacggcaacgctgacctgctatattatcccttacatctggtatgctgtccagcaactgctgcatctgcactatcccgaggcattgggaagcggtgtaccgggactgctcaagtccctcgtgttctcgcttgtcattgtggggctgaccggcctgctggtgaaaggcaagattaaactgaaagtataa

SEQ ID NO: 962 - DNA, 24701 bp, unidentified
  source 1..24701: mol_type = unassigned DNA
ttatacaaccgttacaacacctatttcaacttgattattgattctggggatgaatacggggttgctcagacctgcgcagacaatcatttttgtgccgtcaaggtcaaattcgcctttgtcatatttcggaaaaagaccctgattcggagcgattactccgccgatgaacggcaattgaatctgtcctccgtgggtgtgaccgcagacgattaagtctatgtcggttttctttgcgtcctcggcaatgtattcgggctggtggtgcagaagaattgtgaaattgttctttgctttttcggcaaattcttcccacagcgttcttgacggaacatcgtcatcgggagtgtagaactcataataagggtaatcgctcattccgccgataagcacactcttgccgtttttggtgaattttatgtattcattatcgagcaatacagcgcctgttgaatctgtttcgcttttaaaatccgttccgaatttggcggcattgtcacgctcatggttgccgagacagcagtatgtgggtgcaatttttgaaagcttttcaagcacatctttcatctttgttgtgtcgggatcgccacggttgaccatatctccgcaaactgcaataaaatcgggattttgttcctttacaagctctgcaaggtctgcgttcttttctccgtattccttgttgtgcaaatccgtgatgacaacaaatttcagctttgcatcgttcttagtattgtttacacagtaatttgtgattgcaattgtgttgtcacagtaaacgccccatattacgagagtcacaaacagcacaagtattattgctccgaggattatcgaaaattttttcattcaattcaccgctcatattaagtatggtattattttaggctcgttttgtgcggttgtcaacaaatgtgtgtcgaacaagtctgattattactgttccttgtgctttgattgtcggattttaagttgatttagaaattgctttgtttgacattccttttgcactgttgtataataaatcataattgtatttatatgttactcgggaaatttacacaaagttaaacagaagaggtatgggttatgaagaagattaatttgcgtaagatgttgctggctctcgcagatgtgtttattatcgttgtcagcggtattcttgcaaattatattctcttgcttgtcggctacataggtgctgcttcaagcaaaggcttgttgagctatattgttattgatcttgtcatgtgtctgtttacgctttatataagcggaacatattcaaaattgtggcgatactttaacgcaaaggactatatggtgtgcggaattgccgtcttttcggggtttacgctcggctttgtaatctcgttgtttttgcagattccacagagaaagattttttgtatagtacatttcgcaatagcccttgtcggaattcttgtattccgttttgttttcagaagggcttttcttgaccttaccgaggcaggaagggcagagggcggagagcgcacccttattgtgggcgcaggcaatgccggcagaatgattgttcgtgaaattcacaatgtgaaagagcagggtgatgttaataatccttcaaaaagcatcattccggtatgctttgtcgatgatgatttgaaaaagctgaatcagaaaatcgaaggaatccccgttgtcggaacctgtcccgaaattgttaaaatatgtgatgaataccgcatagacaatattattgttgcacttccgtcatgtgaggaagatgagaagaggaagattcttgactactgttccgcaacagagtgcaaaatcaagattatcccttatctcggcgagcttttgtttgatgacgggcatacacagcttatttcacaggcaaaggaaatcaagattgaggaccttctcggcagaaaacccattgagtttgaccgaaaggagattcatgaccttatcaacggaaaggtttgtcttgttacaggcggcggcggttcaatcggaagtgagcttgtaagacagattgcaaagaatgatccaaaacaaatcatcattgttgatatctacgaaaacaacgcatatgacattcagcaggagcttgtgcttgaatacggcacaaagcttaaccttgtaacgcttatttcatcggttcgtgattacgacaaaatggagcttatcttcaagacatatcgccccgaactcgtattccacgctgccgctcacaagcatgttccgcttatggaaaccgttcccgaggaggctgtaaagaacaacatcttcggcacattcaatgttgcaacccttgcagaaaagtacaaggcaaagaagtttgttatgatttcaaccgacaaggctgttaatccgacaaatgttatgggcgcaacaaagcgtgcgtgcgagatgattattcagtacaaggcgcagcacagcaccgataccgaatttgtaacaacaagattcggtaatgttcttggctcaaacggctcggttattccgctgtttcgccgtcagattgaaaacggtgcgcccgttaccgtaacacatcccgatattatcagatattttatgactattcccgaggctgtttcgcttgttcttgaggcaggtgcaatggcaaagggcggtgagatttttgttcttgatatgggtgctcccgtcaagattacaacccttgccgagaatcttatcagaatgtacggtaaggttccgtacaaagatgttccgattattttcacgggacttcgtccgggtgaaaagctttttgaggagcttcttatggacgaagaaggtcttaagtcaacacagaacaagaaaattttcataggaaatcaaattaaaatagacgaaacagatatgctgtcaaagcttgaggttctcaaaaagaccgcagaaaacaatgacagtgaaaagacagttgaacttttggcagaacttgtacctactttttgccacaaggtcaatgattaaccgaaaaggagaaattttatgtgcggtattgtaggttatgtaggacctaaggattgcagtgaagtgcttgttaatgctctcacaaagcttgaatacagaggctatgactcggcaggtattgcggtttttgataacggggaaatcaagaccgtaaagaccaagggtaagcttcaggacttaaaggataagcttgcagaggtcggcactccgaaaggtcatgtcggcataggtcacacccgttgggcaacccacggcgagccttcggatgtaaactcacatccacacagcggtgcaagggttacaatcgttcacaacggtattattgaaaactatatggagcttaaagacttccttatctcaaagggaagaacttttttaagcgacacagatacagaggttgttgctcagctcctcgactataaatacaacggaaatcctcttgaaacaattgacagtgtaatggctgagcttaagggttcgtttgcactcggaattatgttcaaggatttccccgacagagtttttgcggttcgccgtgaaagtcctcttatcgtaggcgttgcagaaggcgagtgctttattgcgtccgatgttcctgcaattcttcagtacacaagggattattatcttcttgaccatgatgaaatcgtaacactttcacctgacggtgtttcgttcgttgacgaacaccttgatccgattgaaaaggaacttcagacagccgactgggatatggaggctgccgaaaagggcggttatccgcactttatgattaaggaaatcaacgaacagcccgaggctatcagaacaacgattatgccgagaatcaaagagggacttccgttccttgaggaatgcggcatcacaacggaaacaatcaagaatttcaaaaatatcacaatcgttgcctgcggtactgctatgcacgcaggtatggttggcaagtatgttattgaggatctcgcaagagttcccgtaaatgttgacattgcgtccgagttccgttacagaaatccgattgtaggcgagggcgaccttgtaattatcatttcacagtcgggcgaaacagccgacagccttgccgcaatgcgtcttgcaaagcagaagggtgcaaaaactcttgcaatcgtaaacgcaaagggcagttcaattgctcgtgaggcggatatgctcatctacacactcgcaggtcccgaaatttccgttccgtcaacaaaggcatacatcacacagctttccgttatgtatctctttgcctttgagcttgctcttgcaaaggaaacaatcagcacagccgagtgcaagcgacttgtttcggctcttacaaaaatgcccgaggcagttcagtatgtaatcgacaactgcgaggatatctgcaagttcgttgccacaaagcttgttgcaaccgacagtttgctttacataggcagaggtcttgactatgccctttcaatggagggttcactcaagctcaaagaggtttcgtacattcactcagaaagctacgccgcaggcgagttaaagcacggcacaatttcgcttattgacgaggatgttcccgttatcgccgttgcaactcagacaggtattatccccaagacaatcagcaatgttgttgaggttaagtcaagaggtgcaaatgttattcttgtttgtacagacgcctgtgcaagagaactcaaggacggtgttgcggattatgttatcgaaattccgcatacagacgagcttcttatgccgattacagcggttgttccgcttcagattcttgcttattatacatcaatcaacagaggtattgatcccgataagccaaagaaccttgctaagtcggttactgtagaataaacggcagtcttgtttttaattgaaaattgaaaattgaaaattgaaaatttcggttggcggtgtgccaccgcagtcaattcgagaagatagttagataaagaaattgcattgatgcccgatacggcattgatgcaatttttgttttatatgaaagcgaatgtttatttatataattttaatttgtacaaatctttgcgtggctatctgcaggcggataatattcgcacatacagttttgcaacaacttccgtatataacaaaaatatacaaaaacagtcgggcaacaatgttttgcattcttgcgaattgtcttctcgaccataattttccattttccattttcaattttcaattttatgcacgctcgggcgtaatatgttctttaatatcataccgcattcacgaatagggtactcttgttttcaaatttcaacggtaaaaaccttgtatttttttgacagattatgtataattaattagatatacattctaaaaagcagtattgatgaatctaatttagtttcgggggaatatacggacatgatgaaaactgtttttaaaagagctgtaacgcttgcaatttgtgccgtaacggtattttgcggtatttttgcctgttcaggcgcaacaaaagattacgagattccgcagattgacgatatgacgctttcaatgcctgacggtatgagcgctgttacaagggacagtaaaagcacagataaatatttttccgttttcggtcttgattatgacacaacaatgaaaacctttcagaacggaaatatctatcttcagggtatggataatatgtcatcggttattctgaccgtgacaatgacaaaaaatgagagcagtgagaatgtcggcaactatgctcagctttcttcaagcgagcttgcaaatatacgcaacaattttcttaattcagacgagtatcggagctgtactcccgaccaaaaagaaaaagttgtgtggcttgtgtttgacgcaactgctcagagcagtaagggcgatgtgaaaacctttgttgccaacacggtttatgacggtatgaacattaatatcacaatgcagagaacagagggtgatgttacaaccgttgactacgatactttttccaaagttgtatcttcggtaaaattcagcgacctgccgttttcaaagggatttattccgtacataatcatcggcggcggtgttgttatccttattttgattgttctcatcataatttttgccgtgagaatcagaaagcataaaaaggctaagaagaataacgctattcttgaggagcttgcagtcaagtataaactcggtgaaaagggtacggactacgacattgacaattttgacgattctcccgaaaagcccgataaacgctcaaagaaaaagcagaaatatgcggaagaggttgaagaagaaccggcttcgccgggcagaagatatgctcccgagccgataatcgaaaatatggaagaaccggaagaaattacaagtgagtattcaaactttggttatgatacggatgatgccaaggaaaaagaaattgacgagataatcaactccgcaaaggcttacaagagtgagcttgagcgtgaggcatataaaaacaactacggttacgaggaaaacagcacggaggacgaaaaaaaaaaggagcctaccgcagcagatacctcagagactgaacccgaaaaaattgacgaaaacgaaaaagataacgcagaaacacctgaaaaacacgaggacataagctcttcgtcgggtcctacactcgttatccccgagcccgaacacgatctttttgaaacaagcgagcctgacgatatcgaccgtgaggacgatgccgatgttgaagaaaccgaggaggtttccgaacaaaagcatccgcttgaaaaaaaggttgacaagtacgcaaacatcattttcggcagtgacgatcccgaggagaaaaccggggaagaggttgatgacgaggagcttgtaagggcaaaggctaagaaaaacaagtttgacagcggttatgacttttttgacgaagctcccaaaaagtcaatgggggttatcaaaagctcagacctcagagatgccgaggacgttgatgttatcggcgaggttgaaagaaaagcagaaaccgtaaagcagaacgctcttgaaaaagagaataataaagaaaccgagggtgaaccgaatgataaacggtcaacggaagaggttcttgccaatgtaggcaaaaacatcggtaacgctctcaggggctttgcaggcggagttaagaattttggcattcactgcggatatttctgcaagaatgtttcaataatgataaagcgtaagcgtgcgattgccaaacgcaagaaggcagaggaagagagaagagagagagaaagacaaaaggcagagcgtgcaagaaagcgtgccgaaagaggcgaaagtgacggacttgttcaggttcacagcagaaccgaccgccgcccacagcagaatcgccgccctgcaaacagaaacaagagaagataatttcttttcttaacggaggaaaaacatggaaatgctaattaaaaacgcagtggttgtttcccctgccgacaagcttaacgaaaaaacagatattctcataaaggacggtgtgattgccgaaatcggcagcggcattacatcagacggagagattattgatgcagacggtctttgtgccgttccgggatttgttgatatgcatgtgcatcttcgtgatcccggtcagactcacaaagaggatattatcacgggatgcaaggcggctgccgcaggcggtgttacaagcctgcttgcaatgcctaacaccaacccgacaaccgacagccccgaaattgtaaagtatattcttgacaaagctaaagacgccgacagccgtgtttatgttgcggcaagcgttaccaaggggcttaaaagcgaagaacccacagacattgacgctgtgaaaagtgcaggtgcaattgcacttaccgatgacggcagacctgttgaaaacacaaagtatttgagtgacgcaatgaaaaaagctccaaagctcggcatgacaattgtcgcacattgcgaggacttgttccttgccgacggcggtaaaattaacgagggcgaggtttcggaaaagctcggtgtcaagggaatccctgccggtgccgaggactgcggaactgcaagagaaattgcacttgccgccgctcttaacgagcctattcatatctgccatgtcagcaccaaaacaagcgttgcacttatccgtgatgccaaaaggagaggtgttaaggtgaccgccgaaaccgctccgcattatgtttcgctcacggacagggagcttttaagaggtgacgctgattacagaatgaatccgcctctcaggactcagactgatgttgacgagattatcaatgggctttgtgacggtacgcttgatgccatagcaaccgaccacgcaccgcacacacccgaggaaaaggctgattttgtaaaagcccccaacggttcaatcggcatggaaacctcgtttgcggtctgcaacacatacctggttaagacaggcaaaatgacgctttcacagcttgttgagaagatgagtgttaatcctgcaaggattttgaaaatcaacgcaggcacactttcagtcggtgcaaatgccgatgttgttcttataaatcccgatgaagaatggacagttgatgctggtaaacttcacggcaaaagcaaaaacaccccgtttaaaggcagaactctcacaggtaaagtcaaaaagacaatcctcggcggtaaggtagtttttgaagattgagtttgttttaattgtagatgttgatacgattaaaattgtgcaaacggtagctgtactacgctcgggcataaatgttttttatttatcaaactgtctgcacgaattggggacggcggctcgccgtgttcgcccaccaaataaatttaatttaatataaactttaacataaaggagtaaaattatggcacagaaaggcgacctcctgtcggtaagacaggacatcagagtagtagatgcaacaatccgtgacggcggtctttgtaacgatttcagatttgacgacaaatttatcaaggctctttacaatgcaaatgttaaagccggtgttgattatatggaattcggctacaaggcatcaaaggaaatctttaacgaagaagatttcggtaagtggaaattctgtaacgatgcagatatcagaaaaattgtaggcgacaacaagactcctcttaaaatcgctgttatggctgatgtcggcagaacagattttaagaaggatattatcgcaaagaaggacagcccgattgacctcatcagaattgcaacatacatcaacgcaattcctgcggctgttgaaatgattgaggacgctgcaaagaagggctacgaaacaacaatcaatattatggctgtttcaaaggcaagaaccgaggatattacagcggctcttgaaactctcggcaaaactcccgtaaacgctttctacattgttgacagctacggcgcactctatcccgaggagtcaagacgacttgcagacctttactgctcaattgccgacaagtacggcaagtcggtcggtattcacgctcacaacaaccagcagcttgcttttgccaacacaattgaggctatgactcagggtgtcagctaccttgacgcaaccgttgacggcatgggcagaggcgcaggcaactgtgcgcttgaacttcttctcggtttcctcaagaacccgaagtatcaggttgctcctattctcaaaatcattgaggagtacacccacaagtttaaggctgagggcgttaagtggggttacgatattccgtaccttctcacaggtcagtacaacacacatccccgtcctgcaattcagttcgtaaaagaggacagacaggattattacaagttctcaaatgaactttatgatattatcaatagctaattaaatttgtagcggcgttcattgaacgccaatcgaaccgattgcaaaatcggttcgaccatacaaacgatttgaattaaagtaattaaccacgatataacaatacatttgttgtttattcgttttggtttcacaaccaaaacgattggcggtcattgaccgccgctacggttaagcaatgacattgtttaaatcaaaatatgaacgaacaaattgtttttacattacaaaaaatgaggagaatcactatggcatttgacagacttatcgaaaatattgtaaaaatgcagaatcctacggttgcaggtcttgaccctaagcttgactatgttcccgaatcaatcaaaacaaaatgctttgaaaagtatggcaagacgcttgagggtgcggctgctgcactttttgaattcaacaaggcgcttattgacgcgctttatgatattgttcctgccgtaaagccacaggctgcatattatgaaatgtacggctggcagggtgttaaggctctttgtgacacaatcgcttatgcaaagtcaaagggtatgttcgttatcacagacggcaagcgtaacgatatcggcacaactatggaggcatatgctacggcacacctcggtcatacagatgttgcaggcgaaagtattgacgcattcggtgcagacgcactcacggtaaacggctacctcggaacagacggtatcaagccgcttgcaaaaatttgcgattcggacgacaagggcatttttgttcttgtaaaaacttcaaacccaagctcgggcgaacttcaggatatgaagcttgaaacaaatgagagcgtttatgagcatatgggcaagatgtgcgaaggctggggcgaagaccttatgggtaagcacggctattcggcagtaggtgcagttgtgggtgcaacatatcccgaacagctcggtgaaatgagagcaaaacttccgcacacattcttccttgttcccggttacggtgctcagggcggcggtgccgatgatgttaaaaacgcatttgacgaaaacggtcttggtgcaatcatcaattcaagccgcggcattatgtgtgcatggaaaaagcaggggcttacagaagatgactttgccgttgccgctcgtaaagaggctgagcgtatgagggatgaaatcgttggctgtatcggcaaaattaagcttggctgattcatttgcacaacagaatcacgaaatttttcgttttttatgctttagtgctatgaatttattgactttagcgtgctaaaagcgtataatttaagtgtatttatttttacaactatatttttaaattttctttaaaaagggagatatcagaaatggcaagagtatataatttttcggcaggtccttcaatgctgcctgagtctgtgcttaaaaaagcagcggcagaaatgcttgactacgaaggcagtggtcagagcgttatggaaatgtcacaccgctcaaaaatttacggtacaatcatcgagggtgccgaggctcttttgagagaggttatgaacattcctgacaactacaaggttcttttccttcagggcggtgcgtcaacacagtttgcggctatccctatgaaccttatgacaaagagcggtaaggctgattatgttattacaggtcagtgggctaaaaaggctcatgcagaggctgcccgttacggtcaggctaatgttgttgcttcatcggctgacaagaccttcacatacattccaaagcttgatccttcaacattcacaaaggacgctgactatttctacatttgcatgaacaacacaatttacggcactgtttatcacgagcttcccgacacaggtgatgttccgctcgttgcagatatttcttcctgtattctttcaagaccgattgatgtttcaaaattcggcgttctctatgcaggcgcacagaagaacatggctccggcaggtcttacggttgttatcgttcgtgaggatcttatcggcaatgctatggatatcactcctacaatgcttaactggaaaactcacgctgacaacggttcaatgttcaacacaccgccttgctacacaatttacattgcaaagcttgttcttgagtggattaagaacgaggttggcggtcttgataagatgtatgaaatcaacaagaagaaggctgaccttctctacggtttcctcgattcttcagagcttttcaagggtactgttgttcccgaggatcgttcgcttatgaatgttccgttcgttacaggtgacgctgaccttgacgctaaattcgttaaagaggctactgaaaacggtcttgttaatatcaagggccatcgcacagtcggcggtatgagagcttcaatttacaacgctatgccttatgagggcgttgaaaaactcgttgagtttatgaagaagttcgaggctgaaaacaagtaattattgaatattatgatataacgggcgaacgctgttcgcctgttattgtaaattcttaaaataaaaaattaaaaaggattgattttgatgtataacattcttacattaaacaaaatcgccgctatcggcacaagccgtctcggtgataactataaatacggtgacgatgttcagaaccctgacgcagttcttgtaagaagtgccgcaatgcacgatatggaatttgccgataaccttcttgcaattgcaagagcaggcgcaggcacaaacaatattccgaaggataagtgcagcgagcagggcattgttgttttcaatactccgggtgctaacgcaaacgctgttaaggagcttgttatcgcaggacttcttctttcaaatcgtaaggttattgagggttatgaatgggcaaagactctcaagggcaacggtgcagctgtcggtaagatggttgaaaagggcaagagtcagttcgtcggtcccgaaatcaagggcaagaccctcggtgttatcggtcttggagcaatcggtattcttgttgcaaatgccgctgttgctctcggtatgaatgtaatcggctttgacccgtttatgtctgtgggcaacgctctcaagcttgctcctacagttaagctcatgaagagcgcagaagatgttatggtgaattgcgactacctcacaatccatgttccgcttactgacgacacaagagatatggttgatgccgatatgattgccaagatgaaagacggtgttcgtattctcaatttcagccgtgacggtcttgttaattcaacagcagttcttgaggctgttaagagcggcaaggttgctaagtatgttacagacttcggaacagacgatatcctcggtgaagagaatattatctgcctcccacacctcggtgcatcaactcccgaaagtgaagaaaattgtgctgttatggcttgtgatcaggttaaggagtacctcgagaacggtaacatcatcaactccgtaaactatcctgcaatttcacttgcaagaacaaatgctgacgatacccgtttctgcgttgctcacaagaatgttccagagcttctcaagaaggttctcacacagatcagcggcaatgttgaaaatatgctttcaaagagccgtggtgactatgcttacacaattattgatgttgcaggcgccggtgcagatgaccttgcaaaaatcgcagcagttgacggcgtaatcagagttcgtgcaatctgatttcgattaaaatttaatcgttgaaaatttaatctatgaaaaaagtccgaacacgcaaaatgttcggactttttgtttgtgtgaatccaaatatgtagcggcgttcagtgaacgccaatcgaaacgattgcaaaatcggttcgactgtatttcaaaatattggtgtatggttgatttggctttgcagccaaatcaaatggcgatcactgatcgccgctacatatcgctatatattaaacttttaccagatggtatttttttgcattggcaattataaatgttacggaaattgcaacggcacacaattctgcaacgggcaatgccgaccatacaccgtttatgcctataaacatcggcaaaatcagcattgcggcacactcgaaaacaagcgttcttgcaactgaaattacggctgaaatcttgccgttgttgagtgcggtgaaaagtcccgatgcgaaaatattcattccgcacaacagataatttattgcaaaaattctgaatccgctgagtgcaatctgctgaattttttcgttgcctgccgagaaaattccgacaagcggttctgcaaaaaattcagatgccgtaatcattgcaaccgaaattatcagcgtgatttttatgcataatttgaacagcttttgcagtttttcgtgattttgtgcgccgtagttaaagctgatgacgggtgaaactcccgaagtgaatccaaacgaaaccgcagtgaaaataaagtgaatgtacaaaatagcacttatagccgcaacgccttttgcgcctgcaaagtgcatcatctgaatgttgaacagcgctgttgtcacggctgttgaaagatttgtcacagcctctgacgagccgtttgccatagcaaagaggatttcacttaccttgaattcaggcttgccaaagtgcagagtctgctttttgttgaaaaagagcaaaagcggaattgcacccacagccattccgatgattgtgccgagtcctgcaccgattattccaaaatcccacacagccataaaaagaatgtcaagcacaatgtttgtgcaacccgacagtatcgagaaaacaagcatgatatgtggcttgtctgctgttacaaggtacgattggttgagcatctgccagcacattacaaagccatacggaatcataacgctgccgtagtcaatgcagtaggggagaattttttcgtttgagccgaacatcatgtacataggttcggcaaaaattgtgaacagcacagcaatgataacagaaatgaccgttgccgtgattgcaacaccggacataagtcggtttgcttcctcctgtttgccttctcccattttctttgcgattatagcatttgagcctgttgaaaacattaagcccacagccataaatacgagcgtgaacggatatacaatattgattgcggacaatgcgtcacttccgacacagttcgcaacaacgattccgtcaacaaccgtgtaaagtgacataaaaaccatcataagaacggttggcaaagtgaacttcagaatcgtttttgctttgataggttttgcataaattgatgttgccataaaatttccttaccctcaaatttatatttttcacagaccatttaaacgattgtatcataactttgtcgcaattacaaccgatttgtctttttttgtaaaatatgctattatatacagacttaaaagcgaaaaaaggggcggttttatgtttaagggcgcagtttttgatatggacgggcttatgattgacagcgaaaggcttgtttattcaatctggcaggaaatgcttgatgaggacggcaaagagtttaatcttgacattttcaaaaagacaatcggacttcgcagtgaggattcctacgaatattacaagtcggtttacggcgatgattttgactatcctgcttacaaggcggagtcgagaatccgctattttaagcgtatcgaaaagaacggtgtgcctgtaaaaaaaggcttgtacgaaatttttgattatttaaaatcagtcggttgtaaaatttcgcttgcaacttcaacctcgtcacaaacggctttgaagattatgaagaaaatcaatctctatgataaatttgacgcattcgtgtgcggtgatgatgttaaaaacggcaagcccgatcccgaggtttttttgattgccgcaaagaagctcgggcttgagccggtggactgcgttgcgtttgaggacagcattaacggcataaaatctgcacatgccgcaggtatgaccacggttatggttcccgatttgtcagagccgacagacgaaattaaaccgatgatagattttttgtgtacggatttaagcgaagcgatagaacgaatttcaaattgaaaatggaaaattgaaaattaatgtcgggcagacagtttgtaatgtaaaaaacatattatgcccgagcgtagcattgtaattgttcgcacaaatctgtatgggcggatattatccgccacaggcggcggtcgcaaggctactcctacgattttatggttcttgcatattgttggttcaattatccgggaaaattacaaataattacaaatggttacaatttacaaaaatacaattaagcagggttaattattatacacattttccacatagttttcaacaattgttaaaaaagaacggcaatgcctgttaagcgttgatacggttactgcggaaaagggtaaaatgaaaaataatcattgaataacagcacgataatatgttatactttggtaaacaacaatctttacggaggacaaaatgaagaaaattataaataaaaagtcactcaagggtacgcttgctgttatgttgtgtgccgttatggcattttctgtctgtgcctgtgactttgactctgacacagaaccaaccaaaacggatgcacaaattcagtttgataaatattgtgacgatttgttttcggaagaacttgaggatgacgctcttaccgcacattttgacatttcaaatccgtcggactacggtttgaaatatgacgaggaggactataccctcggtcatgtgtccgatgaagatacaaaagaatcctttgatgaactgaaagaggcaaaaacggatttggaggagtttgaccgttcgggacttacttcttctcaaaagcagacatatgacacccttgaaagctactttgaaattcagctttcatatgatggtacaacagaattgcagagtatatttgcaccgcagtcgggaattgttgcaaacctctttaccaccctgtccgagtttactttctatgaaaaggatgataccgacctttaccttgctgttttgaaggacacaaaacgctatatggacgagtgcattgagttcacaaggaaacaggctgaggacggttactttatggctgaagatatcgtacagcagtcaattgacgagtgcgaaaagcatattaagaatgacaagtccgtgcttgttgacgagtttgaatcgagaataaagtcactcggtcttagcgattccgagaaaaagactgttgtcgaaaccaataaaaagtattttgaagaatactacattcctgctttgaaatcagcaaattcagcacttgaaagtctcaaaaaatcaggcaaaaacgaagaaggtctttgcggttacggcaaaatcggcaaaaagtattattcggcaatcgtcaaagacaaaacaagcagcagtatgactcccgaggagcttaagtcataccttacaaacagctttacaaaggttggaatgagtatgagcaatgtttcacaggatgacttgagcaaatttcaggactacaaacccgactttaaggacgccgatgaggtgcttgaatttttgattgagaatatcgaggaggactttccgactcccgttacaacctcttacacggcagattatatgagcgattccgcaaagagcgacaatgtgggagcgtactatgttcagggacgaattgacgatacaagcattaatatcatcaagataaatcccgattttgcaaaaaagggtatgactcagatgtacacaacccttgcccatgaaggctatcccggtcatctttatcagtttaccgcatcaaatgcaaacaaggatatcccgaatatccgcaaggttttaagctttatcggcgcaaccgagggctgggcgcagtatgcttcaaaatgtacgcttgattaccttgatacaagcgagggcattaagaagcttatctacgcaaacgatattctcggctatattctctactcaatggtcgatgtcggtgtgaactacaacggctgggattatgaaaaagtcaaagagtatatgtcaacggcactcggttcggctgacagcgagagcgttacagccgcaacaaaagaggcgtatgaccttgcccgttcaaatccgggttactttctcccctataccgtaggctacctcaagatgattgatatgcgtgaaacagccgaaagcgagcttggctcaagctttgacgcaaaggagtatcacacattcattatgaatctcggaatcacaagcattgatgtctacgaaaaagcccttgatatgtggcttgaaagcaaaaagtaaatttttggtgataatcttgaatattttttacaggtatggtataattaacttattgatatgataaatataaattggtatggatttttctaagatgtgattcttattttcgccatacactcattatgggtgtatggcgatttttattttacgcaaggggtgttaatatgggcgttaaaacggaaaacaaaatggcttatgaacctgtcaacaaacttataattcaaatgtcggcaccgccgctgatttcaatgttctttcagtattcatacaaccttgttgacagtatgtttgttgcggggataaatgaacaggcacttgcggcagtatcgcttgcattcccgattacaacgcttatgaatgcgttgtccgtgtggataggtgtgggtgttaatgttttgattgcaggttatttgggacagaaaaatcagcaaaaggcaaattctgcagcggctctcggagtggtaatttcggtagttgtcggagtgctgataaatttcctttcgcttttcataataaatccctattattcggcttttacgcaaaacaaagagatttttgaatacggaattgcgtatatgagcatctgcgtttttatgcagataccaaatatggtgcatattgtaattcaaaaaatacttcaggcaacaggcaatatgattgctccgatgtggtttcaaattgcaggtgttgtattcaattttgtgtttgaccctttgctcattttcggcataggtccgtttccgaaaatgggtgtggtcggagctgcagttgccacggttttaggctatgttgtttcaacaatcattgcgttgatacagctgtttcttacaaaacaaaaggttaagccggtgtttaaaaactgtcttgaaccgcagatgataaagctgatattttcctacggattgccctcgtttgttatgaatgcgttgggagcattcaccgtgaattttgcaaatatgtttttggtgcgatattcggacacggcggttgcatttttcggagcatatttcaaggttcagcagttgatttttatgacggtgaacggactgattcaaggctgtttgcctataatgcggtttaattacagagcaaaagagtacggtcgccttaaacaagcaaataagagcggaacaattattgcgactgttatgatgattgtcggtatgctcttggtgctgattttcccgaaagagatattgtttttgttttcggcatcggaagaaatgtgtgcttttggagtgccggcaatgagaattatgtcactcggatttgtgttcagcggtttttctgcaatgattgcaacctatgaacaggcaacagacagtattatgcccggcgttgtaattcaactgttgcgacagggcgtgctgttagtccccgtaatttggcttttaaacagcgctgttcaaatgacaggcatatggcttgcgttcccaattacagaatttgtcacatttcttgttgctgttgtatttgcaaaatttgcaaaaattaaaaatcattgaataaataaaaataacaaccgccaaaacccgatagaatggattttggcggttgtttgttatttaaaatatgtttaattttaaattgtttttgcaaaaacattatcagatgattttgccctgaaaattgtttttacgagcaggaatgttatataaacataaagtgcggtgtagatgattgccgtaaatttaaggcttataagctcgtaggagaacagatagtagcaatagcctctcaggcttataagcgttgacacaatcggaatccacaaatgttttgcacttaccgccgcatagacaattaaaataatgtcaagcagataaccgtagcgttcgtgcattgacgaaaggaacatgatacaggtgaacacagtccacgctgttgtcagaagaaaagtttcaaggttcttcaaatcaccctttttatagatgataatgcacatcataattccgagtacggcaattgtcagaaagaccgaaaactgcttgaacagataataatatgtcatatcgtttccgtcacatatgagtgcataaaagttcggacagttcatctgaataagctttccgtagtcggtctgttccgcatatattgtgataatatcgataaacggtctacccataataattgcaggcaggcacattatcacatcaaccgcaggaattataaagaaatgcagaatcgaaattttctttgtcgaaatccagtaataaagcagaacaggaatgatgaatacggtttgtagcttgaatgcaaacgcaatgccgatgaacacaaacgatgcaatcggcttgtctttgtgcaaaaacaggattgcaaggattataaacgaggtgtaaattgaatcgcactgcgcccaaaacgatgagttaaaaatcaccgttgccgaaagaagtacggctgagtaggtgagtatcgctttgagccgtcggttattctttgcaaacgaataaacaagtattgcggttgaaattgcaagtacaaaatcgaatattattgatacgattttgtacgcatacagagcatttagcggcaaaagagtcataagatagattatgacttgatacggaatgttgtagttgcccacctgagttgcaagccccgtgaaatcattcagcttgattatgctccaccacgaatttaaaaagctgttgaaatcatcgctttgaaaatccattccgcaggctctgaggaaaattgcaataatcgttaccgcaacgagtaaaaataaaagaatgtgtttttttataaagtcaatgactttgctttctgcttttgtcatagagaaaattcctgttcgggtttaaataaaaccgattttcttcataaccttgcccattgtgcgactgctgattttaagggcaatttcatcggcttttctgtaacagctttcaagatatgccttgtctgcaacaagcttttcgtagcgttcacgaatcggacgaagttcttcaacaactgcctcgcctacagctgtcttgaagtcgccgtagcccttgccgtcaaaatccttttcaatctgctcgtatgaaagacctgtaactgcgctgtaaattgccataaggttatttacaccgtctttgccctccgcatagcgaacctttgcctcgctgtccgtaacggctctcttgaacttcttcattataacctcgggtgcatcaagaagatgtacacagccgttgacattttcatcggacttgctcatctttcttgtcgggtcctgaagactcataacccttgcaccgttctttggaatgaaaccgtccggaatcttgaacacattgccgtaaatgccgttaaaacgctctgcaatgtttcttgtaatttcaatgtgctgtttctggtctgcaccgacaggcactttgtcagcctgatagagaagaatgtcggcagccatgagtacgggatatgtgaaaagacctgcgttgatgttgtcggcatgctttgcagacttgtccttgaactgcgtcattcttgaaagctcgccgaactgtgtgtaacagctgagcgcccatgcaagctctgcgtgagtgtgaacatgactctgaatgaagaaaaggcttttttcaacatcaataccgcaagccataattgaagcataagcatcaattatattcttacgcataacggcaggagtctgtcttaccgtgattgtgtgcaaatctgcaagagcgtaaatgcagtcatattcgttctgcattgtaacccagttgcgaaccgcaccgagatagtttccgagtgtaattgttccgctgggctgtattgcgctgaatacaacctctttttttgtctgattttccattattcccctccgtgattaaagactgtttgcatactcgccgaggatttttattcctctttcaagctgttcgtcagtcggtgttgaaaagtttattctgaaactgtgacaggtttcgttttcgtcagttaaaaatgcgttgcccggaactacgcaaacctttttgagaacgagttctttgcagaaattcggcatatcaatatcctcgggcaagtcgcaccaaatgaaaagacctccgtcaattttatgatatgtgattttcggtgcgcagtatttgtcaagaagctccatgcagaagttcgctttctttgtgtagatttcacgaagctttgcaaggtgagcgttaaagtcatactttgtgatgaattcatcgcatacatattgtgcccagatatttgtatgtacatcgttgccctgtttgcacacaacaagcttttgaaaaatcggctttggtgcaattgtgtaagcaacacgcatacccggtgaaattacctttgagaatgaaccggcatagattacaattccgtccgtatcaaagctttttatgttcggaacatattcaccgctgtaacgcaggtcgccgtacgggttgtcctcaatgatgagaacaccgtattttttggcaagctcataaactttcttacgcttttcaaggctcattgtaacacccgaaggattttgaaaattcggaattgtgtaaatgagctttgcgttcggattggcttttaaagcctcttcaagcttttctgtgctcataccgtcaggctcaacgggaacacctgcaagctttgcgttgtagcttctgaatgtgttgagcgagccgatgaatgacggtgcctcgcagattacaacatcgccctcgtttacaagagcctttgagcataaatccataatctgctgtgcgcctgttgtgatgagaatgtcgtcattgtcagagcctgtgttatgctcctttttcatatattccgtaaggtgctttctcagcggagtgtaaccctccgaaacgctgtactgtaaaaccgaaatcggatcttctgcaaaaacctttgccgagatttccgcaatctcctctgagggaaatgcatcgggcgacgggtttcctgccgaaagcgacacaacgctcggatcggcggcatatttgaaaatttctctgatagcactcggcttcaggcttgaaaccctgtcggaaaacctgtattccataaaaatatctccttttaagatgataaggattttttaaaattccataccctgtaattctatcacgaattgcatatattctatcacgaattgcatatatgttcaagaaatttgactgtttttactgcgattttattcaaaaaatgtgtaatttattattttgcatttgtaaatgttaattcacggaaattgtattttttgtgctttttgtattgtttttgatgagtttctgttgtataatctaaatgataatgtccttacggtcagagcaaggcttgctttgattcaaacaggagtacactgcgagtaattaatacacttatataattcattgaattcaaattgaatttaaaaatcttcagtttgggagagtaacactatgagcagaagaaacgattacgattattttgatcttgataatttcgatgacagcattgattcccgtgaatatcgtcgcagacagcaacagcgccgttctgcaagctatgccgcaagaccgtcatcacagcgtcccgtcagaagacctgtaaaaagaagaaacaaaagaagaaccagaaacagaattattatcgttgtgagcgcattggtaattctgtttgttattatttttattataacttcaatttttaagggttgttcaaaggaagatgcccttgcaagcgttcccacgggaacagtgggcacaacggcatctcccgacgaaaccgcaaaatcttcgacagctaacaaagcagacgagctttctcctacatactttatgacaccgagcataaaggacgacaatacaaacggaactctttcgtacggcatttatgtgtggaacaaaataggctacgaattgttcagcagtgatgatgcaagagcgcagaactatgctcagacaatcaacggctttgcagacaagttcggcagttccgtaaaggtttatgatatgattgttcctaaccataccgaaatgggacttccgcaaaggctcaaaggcagcgatgctccgtcaacctcacaggctgacaacatcaaggcggcttatgcggctctttccgataaggtaactccgattaactgctacaaccgtcttgcggaacataatacagattacatctactttaagagcgaccaccattggacgggcctcggcgcttactatgcttacacagcatttgccgatacaaacgatttgcccgttctttcgcttgatgattgcaaggaacagaagattgacggctttacaggctcgtttaccaactcggcagacggtcttgacagcgatacggtaagttattggaagttcccttataatgtaacaatggatatcacacaggcagacggttcttccgcaagctatgacagtccctactatgaagccgcagagggcggttcaaacacctacggtgtgtttattatgggtgataatgccctcacggttctgaaatcagcttcgaaaaatgcggcggcaggcaagaagattgccgttgtaaaggaaagctacggcaacgcttttgttccgtatctcaccaataactacgaagaagttcatgttatcgatttcagatatttcaaacataatcttgttgattactgcaaaaccaacggaattgacgaggtgctttttatgaacggtgtaatgagtgccaacactcaggttcagcttgacagtatgagcggactttttaactga
